United States Patent Application Publication US 2011/0183924 A1 - sequence listing, part 236

SEQ ID NO: 639253 - DNA, 482 bp, Homo sapiens
  misc_feature (446)..(446): n is a, c, g, or t
cggagctggtggcttacacctgtatcccagcgctttgggaggccgaggcaggtggatcacctgaggtcaggagttcaagaccagagtggccaacatggtgaaaccctacctctactaaaagtacaaaaattagccgagtatgatgacgcgcgcctgttatcatagctactggtaaggctgaggcaagagaattgcttgaacccaggtggagtttgcagtgagctgagattgtgctattgcactctagcctgggagacaagagcaaaattacatctcaaaaatgaattgcaaaggggtatggatagtagaaaaatggttctcaaagtaatgggacatggaatccaagtttggaccgggtaggaagtgagggaagggtggaaggagagaaaataggtttgaattggctagaacacatcatctctatgatgaaatcagaaatctaaatnataaattggaagcctgagtaaatcttaactggaaac

SEQ ID NO: 639254 - DNA, 442 bp, Homo sapiens
  misc_feature (366)..(366): n is a, c, g, or t
  misc_feature (380)..(380): n is a, c, g, or t
aataatcttgtttacctctccttcagacgctccaggggccctctgtagcatccaaaagttaggggtcaggaaagacaaccttgaaactcaagtttgattttgggaagactgttaaatatgttagaggttcaaagcacttgatattgtgaagtagaattccagattactgtaagtcattttatttagtcaaaatgatgactcaataattttttaaaagacaaaaaccattcattattgtttactatttttcttaaagagcaaagtcagtgccttaattaaaaccttgttgtgcttttatttcaatgctcaatttatggaaaatccatatgatacctttttgagggttagttcaatatgttcacacancagagttttctttnttgcaagatttccaccttttttaaaaccttcacattatcttttttttttttttttttttttt

SEQ ID NO: 639255 - DNA, 162 bp, Homo sapiens
tgctgttgcgtgcgttgtactggtcggctgtggaaggtggtggatacttcactgacgcctgagcttgtcgtgctggcaggtgagagtgttgtggctggtgatctaggggctactgtggaacagtggtcgatttctcactgacggcctggcagatgtggtact

SEQ ID NO: 639256 - DNA, 192 bp, Homo sapiens
atactcgctcgtgtccggggggatggtccaggaccccgcaggtacaaaattgtggatgctgataggccttgtagtataaatggcgtagtattgcatatacctgtgcacatcctcctatacaatttaaatcatttctagattacatatcataccttataccatgtagatgctattgaaacttctaaaactagg

SEQ ID NO: 639257 - DNA, 891 bp, Homo sapiens
gcccatgtccctcagctcaaagttgagggatactgattgcctggctttaggtcaagtcatagtgcttccacttgctggatagatcgtatcatgattactgccatacttgaacttggtcccgtgtagagatgtcaggctgtcacagcagatttgctaggctgatccagctccctccttgtcaggagctggttctgatgtgtagccatgggggtagagaaggagctgggagtagcttttgatgcagatgaaggcctggatgttcccgtggctcgtcacaaagtccacgatggacttgacctccacttcagagttgggaaacttgccacggtaagtttctgagcaggggttgctactagctccgggcatcccaaaggcagcatcccagttcctgttgggtccaccccgacgcagagggagccctcggtgtgtgatcgagttttgcgccacatgcgattcgttttgtgggtgtagacaaaaccatcagggttagttacaatctccaggaagatgtccatgttgtcaagaatggccgtgagggtgggttcctggccatagtccttcgtgatcttttttgcaaaccagaccccactggcctgagtgacccactccctggaatggatgccagtgtcaatccagattgctgggcgattggtccctccagtgctgaacttcagcacattgatgggacgaccttcaaaggtgctgccgatctggatcttgcttacaagctgtgggtgctctgtaaccagcaggtccatgaattcatagatctcatccagagtatggtaggtggcataattgaaagcatcggtggacagagccctggctggaaggcggacatctgctgcttctcctcgtcgagcagagactgcacatcttcgatcatgatct

SEQ ID NO: 639258 - DNA, 973 bp, Homo sapiens
cggtagaagcccaggcaacatggagcttctgaacccttcagcgcaggaacatgtactattgctgtccctacaagtatataaggtgacttctggccatgctgccctgtccattgaggctctgtgtgtcactaggctagggagagcagggctgctgtctgtccactatgctcccctgcccaaaactttcgtggcagagagtgccaaagttgtgtgttggccacggacacggggtcacgtcctgaagggcacaagacacggattcaagggcagtggctccgaaccttgtggtgctcaccatggttggggtccattcaatacctggcaaccctgtgagccctgtctgccggaagccttgaatggatccactcaatcaatgtcttcgtccccgacatactaagactggcgccatgttctgctgtggtgtggtcccattgcaacttcaggaatggtcacaatcagtggggtatacccctcaataaggcactcctttgtcctatacctcctttctcaaaggccatgttaagtcgcccatctcctaccgtgtccctgtgccacacaaagagggttatcctgctcttggccaattctggatggatggtgggccggccccagagtcttgaaggcacactggcgcagaggcacctcgttgaagtggcacgttgtttgccaccctggtgcagtgaagggcctgagggcctctaccatcagaatttattctccctttccgttcactcaatggggccattttccactagtccttatttccccaaataccatcacggttaattaggccccaccaggtgctaatttgtttgcgcccgccaggtgtggggtcctcaccacgccaaaggttgtgctacaacacaagggccactgatgtcgcccccagatggggcatttcgtcgccgccagtaggcatacgccgcgagcagtgtttttccccccaacgtggcgttagggccaccaaacctcc

SEQ ID NO: 639259 - DNA, 344 bp, Homo sapiens
ctagaagagatggtccgtttgactaacgcgtaagtgtttcatgttcacatacaaagcttgagagtaaactaggaaaataaaagtatgaatagtacaatctttcgaatgcgtagttcagaagaatggaatagaggccgggcgcggtggctcaagcctgtcatcccggcactttgggaggccgaggcgggcggatcacaaggtcaggagatcgagaccatcctggccaacatagtgaaaccccgtctctaccagaaatacgaggatattagcggggcgtggtggtgggcgcctatagtcccagctactcgggaggctgaggcaggagaatagcgtgaacccaggag

SEQ ID NO: 639260 - DNA, 546 bp, Homo sapiens
gtgaccacagagcatctcatagagcaagacgcctcatttgccactagtcttactgcatggcccgtacagctatttccatgagatggatctcgtggagctatatagtctggcgtgccacatcaatgtgcccgtcgtgacttggaagacaatcccctccttgcacattccgaagtctgccagtttacagtgaccctcgtggtcccaacaggacattgtccagtttccgatctctatagatgattcctttatcatggaggaacatgagagccgaaatgatttctgcagcatagaagcgagctcgtgcttcatcaaaacggacgagacttctgaatgtggaacatcaaggtcacccccattcacaaactccatcacaaaaaacagacgatcgggggtctgaaagcagcaaaacaactgagtgaggaaggggtgattgcgggccagagacaggatccttttctcggtcatggtgcattccacatcatcatcctgcagaatcacgtccttcttcagcaccttcacagcatagaggtctcctgtttcttttac

SEQ ID NO: 639261 - DNA, 120 bp, Homo sapiens
atcactcaactagatgcaaggttcagtgagccaagattgcaccattgcactccagccgtgagcaataagaggaaaactctgtctcagacaaaacagaacataaaaaccccttatggtgac

SEQ ID NO: 639262 - DNA, 674 bp, Homo sapiens
  misc_feature (17)..(17): n is a, c, g, or t
  misc_feature (24)..(25): n is a, c, g, or t
  misc_feature (28)..(28): n is a, c, g, or t
  misc_feature (76)..(76): n is a, c, g, or t
  misc_feature (122)..(122): n is a, c, g, or t
  misc_feature (136)..(136): n is a, c, g, or t
  misc_feature (177)..(177): n is a, c, g, or t
  misc_feature (186)..(186): n is a, c, g, or t
  misc_feature (346)..(346): n is a, c, g, or t
  misc_feature (396)..(396): n is a, c, g, or t
  misc_feature (401)..(401): n is a, c, g, or t
  misc_feature (493)..(493): n is a, c, g, or t
  misc_feature (503)..(503): n is a, c, g, or t
  misc_feature (505)..(505): n is a, c, g, or t
  misc_feature (512)..(512): n is a, c, g, or t
  misc_feature (537)..(537): n is a, c, g, or t
  misc_feature (590)..(590): n is a, c, g, or t
  misc_feature (592)..(592): n is a, c, g, or t
  misc_feature (656)..(656): n is a, c, g, or t
gcagcttcagcagaggnaagcaanngancagcgagaagccacagagacaattcatgagtacaacttgcaggtggcngaagaagagagatgaagaaagcacagtaattaaatcccagcagaanaggaagatcaatcncctggcatgatatacttaacaatctgagatcaaaatatgcnaagcaaatnaagcagtttcagcgaggagaaccagtctctaagcctccggcacctacacaacagtcttagtgcatgctaattcaaggacgctacagaaagcgcgatgaggcattttgctcattatctcgcatgatgagaagatgtatacgcggagagtgtatgagctgangaatgaagaggaggcgaaggcacctaatagccagagcctttgcatgtggncaggntcatccacacccatcatctggggcttccctgggcagcacctgatttctggttcctgaacaatgttgggcctatttctcagtatcccaaaaantccgccaaananatagtanaagaaatgcttatgcgctcagacanaggaggaggcagaagaggccgccgcggaaccagagtcctagcgtggatttggngnagcaaatttctgaaaaaacataccaagatgatcactgtatgctcctgtgatgtacgagatcggnggttcctcgatagagagc

SEQ ID NO: 639263 - DNA, 109 bp, Homo sapiens
gctctctctctctctctctctctctctctctctctctgtctctctcggctctctctctctccatccgttttgccccccccggtagtacccccaagttgattttccccca

SEQ ID NO: 639264 - DNA, 301 bp, Homo sapiens
tatgtcagtgtaaacagggtcagcagccctctctatgtcagtgtaaacagggtcagcagccctctctatgtcagtgtaaacagggtcagcagccctctctatgtcagtgtaaacagggtcagccgccctctctatgtcagtgtaaacagggtcagcagccctctctatgtcagtgtaaacaggatcagcagccctctctatgtcagtgtaaacagggtcagcagccctctctatgtcagtgtaaacagggtcagcatgctgaagagggaaactacagtctcatcaaataggaggtcgacgc

SEQ ID NO: 639265 - DNA, 110 bp, Homo sapiens
ttactaggagttagcaaaaggaactgtggccttccagccgtagcctacgtaatacctgtcttatttggaatggggattgtccagcaaagcggagcatacatgtaattagc

SEQ ID NO: 639266 - DNA, 287 bp, Homo sapiens
tactaaattcgcggccgcgtcgacccgggcagcacaggaggagggacacacagcatgcattctgggtttcaaatgggcaaatgagttgcagaggatgaccaagaggaagagggaaataatgtgaggtgctggtaagagaggaattgaattaactactaaagaggagaaggaaagaaaagggaagaaaaaagtcagaagccgggtgaagactggaagaactgaaatgggtcccaggatgaaaggctgaagagcaggttttgcaagaatgaggagattttggagacaga

SEQ ID NO: 639267 - DNA, 260 bp, Homo sapiens
tcctggctacgtgtgaactcatgaaggctgaggcgagagaacacttgaacccaggaaatttgaggttatagtgagctatgatcgtgcctttgctttccaacctgggcaacagagcatgaccctggctcaaaaaacaacaacaacaacaaagacttgttgctttctaaaaccaatgaaatttgatctctagtgatagaaaagaatgtataacaactctgaaattatcacaagtgggtgagttaagttgcccgccaatcgaa

SEQ ID NO: 639268 - DNA, 200 bp, Homo sapiens
tcaagcttctaacgatgtacggggacatggtgaaaactcatctctactaaaaaaacaaaaattatgtgggttggtggtgtgcgcctgtaatcccagctacttgggaggctgaggcaggagaatcacttaaacctgggaggcagaggctgcaacgagccgaaattgcccactgcactccagcctgactccgtcccaaaaaa

SEQ ID NO: 639269 - DNA, 540 bp, Homo sapiens
ggaagagaaaagaaaaaaaagagcccatcgcatagcagaagcaaaaagagagggagttagagaaaccggcagaaagaaaaaggggggaaataggaaaaagagaagaaaaaaaggaaaagaaggggagaaaaagaaagggaaaaggagagaaagagagagaagaagaaaaaagagagaaaaggaaaaaaagaaagaaagagaagaggaaggaaaaaaaaaaaagaagaaaagagagaaaaagagaaaaaaaaaaaagaagaaagagaaggaggaaaagaaagaaaggaaaaaaagaaaggaagaaagaagagaaagaagaagaaaagaaagaaaaaagaaggaaaaaagagaaaagagaagagaaaaagaaagaagaagaagaaggaaagtagaggaagagaagaaaaagaaaagagagaaagaagaagaagaaaaagaaaaagggaaaggagaaaagaaaagaaaaagagaagaagagagaaaaaaagagaaaaaaaagaaagaaaggggaaaatagagaggaggaaaggggggcggggg

SEQ ID NO: 639270 - DNA, 552 bp, Homo sapiens
gggggggtttttttctctccgcctcctgtctgccccctctctctgtggtttgtctcttctctcgcgcgcgcgcgcgcgcgcgctcgcgctcgaccacactcacccccccccccctccctcacacaagacgcgctctctctctctgtcagacacgcactcactctcaccccacaccccacacacgcggtgtgcgccacccacagcgcgagacacacaccccgctcggccgtcctctctctcttttgtttcaccccaccgctgtcgtgcccctctctctggggccctcccccgtcggggctctgtttttcccccgcgttgttttttgtcgcccccccccccagcaagagtatttccttttcctccccccgcgcgggctcaccatgtggggctcccttcgcccacctctcttttgagagagccctcttttctgtgccctcccccccccccccccccgctcttttttttgtttgttcccccggccgctgccgacgaggaggggccccccccctttttttttttcccggggaaaaaaaccccccaggaggggcacga

SEQ ID NO: 639271 - DNA, 439 bp, Homo sapiens
ttgcccatttctttgttattttcccaaaaaggaatgaaagatcgtgttttaattttttactccccaagctgtagacaggtcctttcgagtgggacatattttcttggcctttataatcttttaccaggtgtcttacagagaaaagacataagccaaagcctatgaggaatatttgcaagccatagaatagtgttggaaaatgtgcaatatgtgatgtggcaaatctctattaggaaatattctgtaatcctcagccctagaataatactagtcttataataggtttgtgcctttcctaaaccaattttattacgggcaaaacttcaaaacttcatttaaaatatttttatgggcaataaaagggatttgtttgtattttgggttcaggccaattataagcggtttttaaatatgtgaaataaaagtagaataaccccca

SEQ ID NO: 639272 - DNA, 314 bp, Homo sapiens
gaccgcaatggtctgtcggttgtagggaagggctagaactcccggggcctaccctgaataacctttttcttagacagggtcttgctctgtcgccgcaggctggagtgaagagctgcaatcatagctcactgcagccttgacctcccgggatcaaacgatccccccagctcggcctcccaagtcgcctggctaattttattcatttattcatttgtttgagacggagtctcgctctatcgcccaggctgaagtgcagtggcgccatctcggttcactgcaacctcggcctccggtgtacaagcgatctccctgac

SEQ ID NO: 639273 - DNA, 186 bp, Homo sapiens
ggggggtccccccccccctctttgggtccttggggccccccccttccgtttgtttcccccctcccggggggtaaatcggccttttggggggccaccctgggttcgccctatgccttttttccccccccggtttccgtcccccgccggtttcacccgtttttttttttcaagttttttggttgtccc

SEQ ID NO: 639274 - DNA, 334 bp, Homo sapiens
  misc_feature (304)..(304): n is a, c, g, or t
  misc_feature (325)..(325): n is a, c, g, or t
cataggtgggagttgaacaatgagatcacttggacacaaggaggggaacatcacacaccggggcctggcaggggtggaaggctgggggagggatagcattaggagaaatacctaatgtaaatgatgagttgataggtgcagcaaacaaacatggcacatatatacctatgtaacaaacctgcacattgtgcacatgtaccatggaacttaaagtataataataataaataaattaaaaaaaataacattaatctccttctacatctctaccagaactcttgtgtgaccatgcatgctttgtcgntaaacagtaacattttgaagngattttttt

SEQ ID NO: 639275 - DNA, 724 bp, Homo sapiens
tgtcctaattgagatctctgcctaaggcagaatatcagtacgactagggctacttagttggtcattacctacttgccactacgtacttgctcataactattggtacttacgtttaactgtctacgtttgataaattctcataactctggctacgttcttgctatgtacttttataactgtttatcatgtgcagtaaagttgtaaacctcagtatctatggaaattgataaatgttgactctggtgtagtatactttttatcgcactttctcttatgacttagcacacactgtctgcatgattacattgttactcttcctttggtaacttgtagcatgttcagaatacgtgtattgctatatagggtcgccaagattcgaatcatgaagaagcccgagtgttgtgtagtattactagtcttctacagcaaatcgtgtcgccggtggatagcatgccagtaagaactcggggctgtgatactaaacgtcctgtagcactgtcacagattgttgtaccagacgaatgttctgtaactgttataaatgtgtatcatgaaacatgtagaatacttttaagaatgtgacataaaatgacgtgtatttgttttaccttgtgtgtgatgagtctagtcatatgcacgtaaatataattgattatgtattctgtagtataatcatacattgatgactacatttaactggtaagtcaaatccgttggatgttaa

SEQ ID NO: 639276 - DNA, 819 bp, Homo sapiens
  misc_feature (3)..(4): n is a, c, g, or t
canncctccatgatatgtgaataataacaccaaagcaagaaccattaatatctcctacgtcccggatctaactccctttgctacttgtgttcaatttttaaggcttttgcgttaaatttccctgctataaatcaatccgggtggcctccgtactttcctaaaaagctcacaaccgaatttccttgacacaaagtcttagaaagaaaaaggggccatctggcatcccctcccccccttggtttgtaacaacgccgcaatacctgcgtctgagagcaaaaccaattcttgcccgccaaaagtcccctcgctgactcttacaaaacgggggatccacataagggaccaccccccgtttcgcccccccaaccaatgtgtatttattacatcccccgtagtaggttatttacacttcacaaccattaatacccttctttagtaccccttccataatcctgcccatgtttcacccgctgtaccccccttcacaataggtacttcggcattccggtatatagcaccaataagtctctttcccgggagtgacccaacccatcttggattctgctccccttgtgggacaatgccgcacttccactactctgctgatcctccatatgagaaccagcatgtagtttgttcaagcccaggcacctgatttattaagcactgcgggattccccgccccctctttcaagaatgtgttaaatgggtattaattttagacaaaaagccccctatttctgagaaacataaaattatggggaacaaagaatttccttcattggacaaaaaaaagaacccctttcaaaccacaaaaca

SEQ ID NO: 639277 - DNA, 1821 bp, Homo sapiens
  misc_feature (20)..(20): n is a, c, g, or t
tttggtgcttgcggcgattntcgtccaagtcccacgtgtctcggtcctgtattctttctataattaatggggcgtttctcccctcaccacgtcgtcttcgtcttgagagcggaatatatgtctgtctcctacatgtagtggttgttctccacccatccactccacgtgcgtgtgctccccccccctcctgtgcgtggtcttcttcgttattcttctctcctgtgggttgtgttgggccccccctctcctccttcgttttgttgtctccacgcggtgttcgtacacccgcccccggtgggggttggtgttgtctccccccccaggtggtctgtgtgtgggtcacaataatttgtttttgttcacccacgcgctggtgtttttgtttccgccaccgtcgggggggtgccctctcggttgcgtagttttatattagttgtatgcgccgtgcgtgttgttgccccgccaccacctctgggcgggggtgtcccccatatattttctccctcccccccgccccatctgtcggggtagtatgtgcttcctctcctccactcgaaccccccgggcgtcgttctagttttattagcacgcctcgttttgtttgttctcgcccccccccccccgtgcgggggtgtagttgtccctctctccctcctccgcttttctgtttgcttccactccctagctgtggtagtaacctttctgctggtgctggtgtttgtttgcttttctcctcctgctctcttcgtctccacgaaagagacaaccagcatgtgtttttgtttcttgcgtggggggtcgcacccgcatattgtgatgatgtcttctcttttggggggtgtgctcctccccccccccccgcgcgagtataggatcaaccccacatctgctgtgggtgtggtagtaccacgccgctgattcttcttctctccccccgcggcgttgttcttctctgtggtagtagtggagtccccccacccctcctctctcttcttgtgttgttgctctctgcgttggctacttcctcattatttggtcgccccctacctctctgttgttctccctccccgccgcccctcctgtgtgtgttgctcctcctctcgctgtcgcgtcttcacacacctactctcttctacatcacactcctcctggtggtgtgttgtgtttgcggcgtctctctctcccgcacagcatcagtgtcgttcaccccatcttatggtgacgtcgcgcgcgcgcgcctcttcactcactcaccactcacgtctctccccgccggcgttttttttgtgattctcttccccccccctgtgtgtcttctcctctcacacgagagagagagtgtggtacacccccctactacagagttgtgcgcgcgcgtcacacacacccgacactattatttttggcgcgacactatatttgtgcgcgcgccctctcataatatatattttgtgtgtgcgcgcgcgccgccctctctttatccccccttctttttttgtgtgtgatgaatatatttcaccctgcggggcgcgccttctccactggtggtgtttctcccacacagagcgcgccctcgccggttgtgtgtgagtgtggtaccaccacacacagagaggtggtcgttctctcttcttctgtgtgtgtgtgttgtgtgagcaccactccccctctctctcgtttatattcttctctcctctctcttcgggggtttctccccaccctccccccccccccctctccgcccccacaaagcaaacaacccacacatattttttttttttctttttttaaaaaaataataaatctctctctctcccccta

SEQ ID NO: 639278 - DNA, 112 bp, Homo sapiens
  misc_feature (19)..(19): n is a, c, g, or t
  misc_feature (97)..(97): n is a, c, g, or t
  misc_feature (110)..(110): n is a, c, g, or t
gagagctacctgattctcngaattcgtgggtcctagagtcatagctagtaacctagtagtgaaattagttatcttttctcacaattccacagggggncacccgagccagnga

SEQ ID NO: 639279 - DNA, 654 bp, Homo sapiens
  misc_feature (237)..(237): n is a, c, g, or t
cagtggtgtttcgccctttacgtcaattgttagttgtcttgcttcagaaagccggactgacgtgttaggcgccatgtctcccatgggtgcccgttgagttttagtccattgtgtttgtgaacccagcgcgtttgtgtacagagggttgcccatgttgttagtacgcaagaaggttgctcagtttgggatgttgtggacttctcccgcccagttttgtagttgtcctgcagggtatanacagacgtcggagatactcttttattagaaaggggttcgcttaatattcttggttcctttctcgtggagagccctttctagagtttctcctgtagatgaagtggtgagtagaatatgtatcgacactagtggtacctttattgtagagaacagtgcttcccctgtcacttcgtagatgatgcttctcggactcgtctcttctgtgcctggaaatctagttgttttggtatctactgagcaccacttgccctcgactaggacagtagcaatcattagtacccgggccacccttttaagcaacaagggccaaaatgtttaacagtgccacgagaagaatacactccttttttttcccccttcgttttttttttctataaatggggtaagaccaaaaagaaaaatgcaaaatcaaaaaaa

SEQ ID NO: 639280 - DNA, 136 bp, Homo sapiens
aagaaggctcgggctcagcagacagtgaagtccgtggagaggtgggcccttccccagagagaacatggaaggtttagcactgcagagatgtctgctgtcacccagaatgacacgggaacttaaccaactcatatca

SEQ ID NO: 639281 - DNA, 553 bp, Homo sapiens
gtatatgctgtctcatgtataacttcaatttggctactctgtatacacggtggtttctttctatggttcacagccttgtatttgattataatttaataaatgttgtaataaatacataattaatcaaaatgtagaacatctaaaacagtcttaaaaaatgtttccagaacctaatttagtctatacgtcatctgattactgaaaaatattaatgttttctcagcagcaggaacaatctatctctcatatttgactcaactatactcactgaaaaaccttttctggatgtctggatctttaaaaatgggaagtatcattcctagtaatgactttggtacttcaatgatgatgcatttaaaagtgcagatggtattaccaggcagcaaagagttactgtatatttactttttattattatgaaatagaatataccacaaatagcaatgcttccttagtgtaagatgtgttcttatgatgtacagttgccaaacagttaataattataaattaactaattaaatggtgaaaatttgcatccaatgtgaatatataa

SEQ ID NO: 639282 - DNA, 818 bp, Homo sapiens
cgttcacggcaggatactgcttagcgaggaacagctacagcgtgctgggctctggatttagagagctgagcgcttaagagtgaatttagagattagtcataaatcggccttataagctattggtagaaaaagaaaacggtaactggcccataaatagcaaaggaaggagcattgctgcacttatctggctgctggagaaagatgaacgacgcgtctgtgatccagtgatggagcacgattatccgggaagactacctcgtggaggccatggagatcctggagctgtactgtgaccatgctgctggcttcggtttggccttatccagtctatgaaggagctagattctggtctggctgaatctgtgtctatattgatcttgtggctgctcctcgtatctccagtccaggaacgtgtgcttggggtttggcaacaatcagtagctgatcagctctgtgccaagtatcatgcacaggacatcattggcatagctatggttaggaccaaagcaagattgagaacttgttgaattgacaggcttaaatgcacagagctgatgtagtgtggaatggcccatccaaaaaatcactgggtgggtaatgcagatcccccttgcaatctgcactagttcgcaaacggaaattttactaaacgttaaccgcttaatagaaatcgctttgagcttactagatgtgtccagtaggggaggaaatgccatccttctctggggggtttaggagaaccagggagtcttaatatgccggctcaggattgcaaccagaaatgatcgtggaaggcaaaccgggaactggaacccccg

SEQ ID NO: 639283 - DNA, 90 bp, Homo sapiens
gggttccatgttttccttgttccctcccaagacctaactgggattgcagagttaagtttatattatggaaataaaaactaaataacaata

SEQ ID NO: 639284 - DNA, 129 bp, Homo sapiens
ggcggatgctgcggtggggcttccaggaattctacattcaaggaggggactgggggtcccggatcggcactaatatggcccagctggtgcccagccacgtgaaaggcctgcacttgaacatggctttgg

SEQ ID NO: 639285 - DNA, 723 bp, Homo sapiens
  misc_feature (709)..(709): n is a, c, g, or t
cgtgtgatgcacccttgtggcgagttccctggtccgtagctctgggcgaggatctgcaggctgggagggggcagccaagaagccggagctggcagcatattcagagatccggggccccccctccctctaatcacgagtgcagctggagcttgctcccccccgttcggaacctggacgttcgcttggtgtctggtgcctctgctctgacggaggactctgggggtccttcttaccggctctgacctctctcttcgtgcctggtctgggactgggtcagccctgggggatcagaaggggccatctgggcccagctgtgtacagcgagggtgggcagccccctccactccactctgcttccacaaagtcggctcccgagagctcgaggctgcttctgtttatatgtgcagggcccgggccggtgaagggtcagagagacggacacaaggagccggcaggagggcggagcgaggatgtcctttcccgggagacaagtcgggaaagcctggctggactgcctcagccccgcgcgcctcctggactcagggttccctcctggactcagggttccccgtcctgagctcgggagatgttcagagtcacactgccgcccggtctgccacgcagaggtccaacttgccacccgcgtccctggtacctgagaccaccgacatcctcaggttcctgaccgtggcgcccttctacccagccnagtgtgcggccgct

SEQ ID NO: 639286 - DNA, 201 bp, Homo sapiens
  misc_feature (98)..(98): n is a, c, g, or t
  misc_feature (118)..(118): n is a, c, g, or t
  misc_feature (131)..(131): n is a, c, g, or t
  misc_feature (135)..(135): n is a, c, g, or t
  misc_feature (198)..(198): n is a, c, g, or t
tgggccccacgtcaaaggtcaagttaaacgtaggtcaagtcctacgtcggggcccaaacatcctggggtcctggtttgtcaaacaggctgccctaaanccccccccagtccggggggnctgggagcagttncaanacccccccccccccttttgtaaatcttgttcattgtaaatcaaaaacagcgtctttttccctntga

SEQ ID NO: 639287 - DNA, 478 bp, Homo sapiens
  misc_feature (19)..(19): n is a, c, g, or t
  misc_feature (61)..(61): n is a, c, g, or t
  misc_feature (464)..(464): n is a, c, g, or t
cctccaattttcagtgacnccatacccatgcgccagtggctggtggtgctccagatatctntgcctgtcatcctgtggatgaggcctcaagtacctgtcccggaaccacatgcacgaagaaatgagccagaagtgagcgctgggaacagggtggagtctccgggcccgggccggtgaagggtcagagagacggacacaaggagccggcaggagggcggagcgaggatgtcctttcccgggagacaagtcgggaaagcctggctggactgcctcagccccgcgcgcctcctggactcagggttccctcctggactcagggttccccgtcctgagctcgggagatgttcagagtcacactgccgcccggtctgccacgcagaggtccaacttgccacccgcgtccctggtacctgagaccaccgacatcctcaggttcctgaccgtggcgcccttctacccagccnagtgtgcggccgct

SEQ ID NO: 639288 - DNA, 1035 bp, Homo sapiens
  misc_feature (731)..(731): n is a, c, g, or t
  misc_feature (1035)..(1035): n is a, c, g, or t
atcgggactcagagttctagcttaggtttctggtcctgaagctgggacaagctgacatttctgtggcttgtgtgggaatcattgatccacctagaactggtgtgaaggaagctgttacaacactcattgcctcaggagtatcaataaacatgattactggagattcacaggagagtgcagttgcaatcgccaggtcgtctgggatagtattccaataacttcccagtcagtctccggagaaggagatgagatgcacatggctgttcatgccagcttgcacaaataggtaccaaaggttggaggtattttacagagctagcccaagggcacaagcatgaaagaattcattgaagtcgctacagaagaacggtgtcagtggtagccatgacaggagatggcgtagatgatgacagcgtgctctgaaaggctgcagaccctcggagttgctatgggcccagacggtacaggatgtttgccaagaggccgctagacgatgattccataggtgattgattgactttttcaagaccataaattgtctcgcgatcgaagagggtccccgggattttataatcaccatttaaaaaattttcgttagaaaccaggctgagcacggagttatagccagcattaacttgaatctccattgggttacatttattggaacttttccctaaatccatcctccaatggccattggcagaatcttggggggctcaacattacatatntggtgggacccccccagttcagaagccgttgggaggtaacaacccagggggaattagatgtcatttcgtaaaaccttccttcgaatggcaaagaaacgccatttcggccttacaactgggtactcaaacaatcctggttcaccaccaaacactggtggggcgctggtggtctcggcggtgacccagaaaatgtgattcctgcggacaaaagacctccactgtcgggtgaaattccaagacagtcatcacaccccgttgagcctccacagttgtgcggcgacacacgagcatatattattgcgan

SEQ ID NO: 639289 - DNA, 700 bp, Homo sapiens
  misc_feature (686)..(686): n is a, c, g, or t
cgtgtgatgcacccttgtggcgagttccctggtccgtagctctgggcgaggatctgcaggctgggagggggcagccaagaagccggagctggcagcatattcagagatccggggccccccctccctctaatcacgagtgcagctggagcttgctcccccccgttcggaacctggacgttcgcttggtgtctggtgcctctgctctgacggaggactctgggggtccttcttaccggctctgacctctctcttcgtgcctggtctgggactgggtcagccctgggggatcagaaggggccatctgggcccagctgtgtacagcgagggtgggcagccccctccactccactctgcttccacaaagtcggctcccgagagctcgaggctgcttctgtttatatgtgcagggcccgggccggtgaagggtcagagagacggacacaaggagccggcaggagggcggagcgaggatgtcctttcccgggagacaagtcgggaaagcctggctggactgcctcagccccgcgcgcctcctggactcagggtcgtcctgagctcgggagatgttcagagtcacactgccgcccggtctgccacgcagaggtccaacttgccacccgcgtccctggtacctgagaccaccgacatcctcaggttcctgaccgtggcgcccttctacccagccnagtgtgcggccgct

SEQ ID NO: 639290 - DNA, 320 bp, Homo sapiens
gacccagagtctgaatggtggcgtattgcttgagctcgggaagtcaaggctgcagtgagctgtgatcacgccactgcactctagcctgaatgacagaccctgtcttccaaaaaaaaaaaaagggaggcttagggctaagggaggcctctgccacttactaccttttggagggaataggccacgatttctaaaggtaagaatctttatctctaactatgggaggtagaaaagggtcttaaaaaacattctaggactctatcctttccttttttccaactgggaattttctggctttctacctcagccttatctactattta

SEQ ID NO: 639291 - DNA, 262 bp, Homo sapiens
acgtgctcctcctccataggactcccaaagtgctgggattacaggatgtgagccaccgcacccactcaaaatttacttttaaatgtatatcatacaataggattacacaattatctagagaatataattatcaacatatttttcaagattgtaatacagttatttatatgcttcttaattaatgatttaaatgaaagacttagcaactagtcaaactgcttcagccccttgacatctgtttccatctgtggaccacaggtaa

SEQ ID NO: 639292 - DNA, 149 bp, Homo sapiens
cgctcttctgtggcttcatcatgctgctgatctgtttcatcctcatcttcttcgcactctgtggacccagatgcttgtcttcctgagagtgattggaggctctccttgccttggctgctgtgttccagatcatctccctggtaacctac

SEQ ID NO: 639293 - DNA, 298 bp, Homo sapiens
tctcacgtgagccaacagtatagattctgaaggcgtttatggcaggagaaacaaaatacgcagggaaagataatctcagtgttaaagacagatgtatgcctggaggccaagacagaaaatgagctgcagagagaacgcagtagcctgctagccagccagtaaagaagtgaggctagttcagcggactcgcgcggcctcgctctttggactcgtcaccctcccctccccctcccgccgccgtcacccaggaaaccggccgcaaacgcgggcggacctgaagctggtttcatggcagcct

SEQ ID NO: 639294 - DNA, 2088 bp, Homo sapiens
tcgagcggccacccgggcaggtctctgggtgaatagcagcgtgtccgccggcagcgaaccgagaccagcgagccgaccatgcggctgcacagacttcgtgcgcggctgagcgcggtggcctgtgggcttctgctgcttcttgtccggggccagggccaggactcagccagtcccatccggaccacacacacggggcaggtgctggggagtcttgtccatgtgaagggcgccaatgccggggtccaaaccttcctgggaattccatttgccaagccacctctaggtccgctgcgatttgcaccccctgagccccctgaatcttggagtggtgtgagggatggaaccacccatccggccatgtgtctacaggacctcaccgcagtggagtcagagtttcttagccagttcaacatgaccttcccttccgactccatgtctgaggactgcctgtacctcagcatctacacgccggcccatagccatgaaggctctaacctgccggtgatggtgtggatccacggtggtgcgcttgtttttggcatggcttccttgtatgatggttccatgctggctgccttggagaacgtggtggtggtcatcatccagtaccgcctgggtgtcctgggcttcttcagcactggagacaagcacgcaaccggcaactggggctacctggaccaagtggctgcactacgctgggtccagcagaatatcgcccactttggaggcaaccctgaccgtgtcaccatttttggcgagtctgcgggtggcacgagtgtgtcttcgcttgttgtgtcccccatatcccaaggactcttccacggagccatcatggagagtggcgtggccctcctgcccggcctcattgccagctcagctgatgtcatctccacggtggtggccaacctgtctgcctgtgaccaagttgactctgaggccctggtgggctgcctgcggggcaagagtaaagaggagattcttgcaattaacaagcctttcaagatgatccccggagtggtggatggggtcttcctgcccaggcacccccaggagctgctggcctctgccgactttcagcctgtccctagcattgttggtgtcaacaacaatgaattcggctggctcatccccaaggtcatgaggatctatgatacccagaaggaaatggacagagaggcctcccaggctgctctgcagaaaatgttaacgctgctgatgttgcctcctacatttggtgacctgctgagggaggagtacattggggacaatggggatccccagaccctccaagcgcagttccaggagatgatggcggactccatgtttgtgatccctgcactccaagtagcacattttcagtgttcccgggcccctgtgtacttctacgagttccagcatcagcccagctggctcaagaacatcaggccaccgcacatgaaggcagaccatggtgatgagcttccttttgttttcagaagtttctttgggggcaactacattaaattcactgaggaagaggagcagctaagcaggaagatgatgaagtactgggccaactttgcgagaaatgggaaccccaatggcgagggtctgccacactggccgctgttcgaccaggaggagcaatacctgcagctgaacctacagcctgcggtgggccgggctctgaaggcccacaggctccagttctggaagaaggcgctgccccaaaagatccaggagctcgaggagcctgaagagagacacacagagctgtagctccctgtgccggggaggagggggtgggttcgctgacaggcgagggtcagcctgctgtgcccacacacacaccactaaggagaaagaagttgattccttcattcacttcgccattcattcatacttccgtccagaagttgattccttcattcacttcgccattcattcatacttccgtccatccattcagaaaggcatttattaagaatttactcaggcatgatggcccatacttgtaatcccagctattgggaaggatgagatgggaggatggcttgagccagaggtttgagaccgaccagccagggcaacacagtgagaccccttctc

SEQ ID NO: 639295 - DNA, 623 bp, Homo sapiens
cgcggtggctcacgcctgtaatcccagctctcagggaggctaagaggcgggaggatagcttgagcccaggagttcgagacctgcctgggcaatatagcgagaccccgttctccacaaaaaaaaaaaaaaaaaaaaaaaaaaaaaagtgtggggggcgggccggggcccccggaaaagctttctaaaacacaacgggggggggccgggggccccaggggagaaggaagaacgtgggcgcgcaaagcgcgggtccccaaaggagagaacccggggccagagagacaaaggggcggggagattctcccccaataaaaaaagcgcgccgggggggaacccgagagcggtttcttgagaaaatattctcccaagagggcgaggtctaggagagggccattaagggggcgctcttattacaacgaggagaggctcacaaggagagaggcccgagatatatctacaatatatatagcgcccccgggaccggggggggggggaccaaccgagaagttcagagtggagtgtgagagaacacaagagcccaacaaaacgaagacaacaacacgaagcgtagagcaaaaactagcagaccagcatacaacaacaaacacggcaacacagcaagg

SEQ ID NO: 639296 - DNA, 1978 bp, Homo sapiens
tcgagcggccacccgggcaggtctctgggtgaatagcagcgtgtccgccggcagcgaaccgagaccagcgagccgaccatgcggctgcacagacttcgtgcgcggctgagcgcggtggcctgtgggcttctgctgcttcttgtccggggccagggccaggactcagccagtcccatccggaccacacacacggggcaggtgctggggagtcttgtccatgtgaagggcgccaatgccggggtccaaaccttcctgggaattccatttgccaagccacctctaggtccgctgcgatttgcaccccctgagccccctgaatcttggagtggtgtgagggatggaaccacccatccggccatgtgtctacaggacctcaccgcagtggagtcagagtttcttagccagttcaacatgaccttcccttccgactccatgtctgaggactgcctgtacctcagcatctacacgccggcccatagccatgaaggctctaacctgccggtgatggtgtggatccacggtggtgcgcttgtttttggcatggcttccttgtatgatggttccatgctggctgccttggagaacgtggtggtggtcatcatccagtaccgcctgggtgtcctgggcttcttcagcactggagacaagcacgcaaccggcaactggggctacctggaccaagtggctgcactacgctgggtccagcagaatatcgcccactttggaggcaaccctgaccgtgtcaccatttttggcgagtctgcgggtggcacgagtgtgtcttcgcttgttgtgtcccccatatcccaaggactcttccacggagccatcatggagagtggcgtggccctcctgcccggcctcattgccagctcagctgatgtcatctccacggtggtggccaacctgtctgcctgtgaccaagttgactctgaggccctggtgggctgcctgcggggcaagagtaaagaggagattcttgcaattaacaagcctttcaagatgatccccggagtggtggatggggtcttcctgcccaggcacccccaggagctgctggcctctgccgactttcagcctgtccctagcattgttggtgtcaacaacaatgaattcggctggctcatccccaaggtcatgaggatctatgatacccagaaggaaatggacagagaggcctcccaggctgctctgcagaaaatgttaacgctgctgatgttgcctcctacatttggtgacctgctgagggaggagtacattggggacaatggggatccccagaccctccaagcgcagttccaggagatgatggcggactccatgtttgtgatccctgcactccaagtagcacattttcagtgttcccgggcccctgtgtacttctacgagttccagcatcagcccagctggctcaagaacatcaggccaccgcacatgaaggcagaccatgttaaattcactgaggaagaggagcagctaagcaggaagatgatgaagtactgggccaactttgcgagaaatgggaaccccaatggcgagggtctgccacactggccgctgttcgaccaggaggagcaatacctgcagctgaacctacagcctgcggtgggccgggctctgaaggcccacaggctccagttctggaagaaggcgctgccccaaaagatccaggagctcgaggagcctgaagagagacacacagagctgtagctccctgtgccggggaggagggggtgggttcgctgacaggcgagggtcagcctgctgtgcccacacacacagaagttgattccttcattcacttcgccattcattcatacttccgtccatccattcagaaaggcatttattaagaatttactcaggcatgatggcccatacttgtaatcccagctattgggaaggatgagatgggaggatggcttgagccagaggtttgagaccgaccagccagggcaacacagtgagaccccttctc

SEQ ID NO: 639297 - DNA, 531 bp, Homo sapiens
ctcagggtgctcaggtctggcattcgggggccccgagtgaccctcatactgccctgctgggatggcatgtctaccggaaccccaatggcgagggtctgccacactggccgctgttcgaccaggaggagcaatacctgcagctgaacctacagcctgcggtgggccgggctctgaaggcccacaggctccagttctggaagaaggcgctgccccaaaagatccaggagctcgaggagcctgaagagagacacacagagctgtagctccctgtgccggggaggagggggtgggttcgctgacaggcgagggtcagcctgctgtgcccacacacacagaagttgattccttcattcacttcgccattcattcatacttccgtccatccattcagaaaggcatttattaagaatttactcaggcatgatggcccatacttgtaatcccagctattgggaaggatgagatgggaggatggcttgagccagaggtttgagaccgaccagccagggcaacacagtgagaccccttctc

SEQ ID NO: 639298 - DNA, 1388 bp, Homo sapiens
  misc_feature (279)..(280): n is a, c, g, or t
  misc_feature (288)..(288): n is a, c, g, or t
  misc_feature (291)..(291): n is a, c, g, or t
  misc_feature (294)..(294): n is a, c, g, or t
  misc_feature (306)..(306): n is a, c, g, or t
  misc_feature (316)..(316): n is a, c, g, or t
  misc_feature (328)..(328): n is a, c, g, or t
  misc_feature (345)..(345): n is a, c, g, or t
  misc_feature (357)..(357): n is a, c, g, or t
  misc_feature (373)..(373): n is a, c, g, or t
  misc_feature (408)..(408): n is a, c, g, or t
  misc_feature (419)..(419): n is a, c, g, or t
  misc_feature (426)..(426): n is a, c, g, or t
  misc_feature (441)..(441): n is a, c, g, or t
  misc_feature (449)..(449): n is a, c, g, or t
  misc_feature (478)..(478): n is a, c, g, or t
gtttaatgtttactttgtgtagatccatttgtctattttatttatttttcccagtgaaaagtgtattttgatagagaacttttcattctataaatacactatgagttactaaaatatcatggattttgtttattcctgaaacatagttacatagttaaactgtacatatgacatggcttatgttaaaaatacccagtgctcagttttgaaagataggcaaaaaaaaaaaagtataggagaaactgaagaatgtacacttttttagagggcacatttggnngtaaatcnggnaanttggatagactngactgtgttngtgaaaactgancattaaaggtttggatngatcctttcttnccatttaatctctganacgtaaatatgtgaggtgtgctgctgtgcggggtnaacagcttccntcccttnctgtgtagcagtctngaaatgtnctgttaaatcagtaggcttaatgtgttcngggtatttatctccttgtattttaaatatatgtagttgcaaatagcaccaggaattagatttctgtacacccctaatctagccttgtgagcttcgctagttaatgtgtgctcactttccctccatttgttacgtgagagaatgcgtctgctgatcactgaagtgtcccttttagcttctgattcattgggttctgttgggcatctttaaatccaccttaacctgaggaatgtatgtgggcaaccaggccctgcatttttttatattctgaattttgcatgcttgcctgacttagtatttctgaattgatgttttttttaatggtataactatcttgattttcactgaaattatatggttctgtcactactctgtaaattaatccgaaacttttaaggtaactgggatgatctgcttgtaaaaatgcttgttgccttttgctttatcttcagtgtacctccttaatcctgcttcaacttgattatcttgtgaaacgatgagagtaagttgcaaccttgtgactgaaaacttgaaaagagtggagcaggtgggacctcttattctcaaatagtgacatattctccgtagtcacagtttcagaactgagtaaggatccttggtacttggtggcatctgttgaactgaggagcatttctcattgtaaagattgcctttgttctgtctaaaagtctggagaaatcccaaagacttttcctatgtactaggcattttattttgattgacttacaaactcttcttaatcattatcaatctcggtttttttgtggtgcagtggaaggagaaataggtctagtttctgcctctgattagccgcacagccttgaacaaatcacaaaaaaaccgagattgataatgattaagaagagtttgctaatacaatgccagtacgg

SEQ ID NO: 639299 - DNA, 786 bp, Homo sapiens
cgcggggttagcgcggggtcagcggaggtcagcgggggtcagcagtcagtggctccgagggcgcggcggacgcagggcaggatgtacacgctgctgtcgggcttgtacaatgtacatgtttcagaaggacgagtactgcatcctgatcctgggccgggacaatgctgggaagacgagcttcctgggagcagtcgaaaacccgattgaacaagaactacaaggggatgagtctactccaagaagtcaccaccaccgtgggcctagagacatcggcactgtggcatgtgggcaaaggctcggctcagtgttctgggacttaggagggcaggaagagctgcagctctattgctgggcacaaggtacttatgcggagtgtcaccggcggtcactctacgctcattgacgtccaccgacgaggcagaggctggcatgagctccaaggcaggcgctcttgacaggctgggtgagccagcgacggcgcatgatgcggctggtccccggtctctggatgcgtggccatacagagcaggactgtggagaccgtgccctctcaagtcccgtgacatcaagcacggccttcagacgactgcgaccagccaagatcggcatggcgagattgccatgagccatggcctgcgtcggcccgtcacaggcaaaggggtgcgcgagggcatcgagtggatggtgaacgtgtgtcgttgcggcaatgtgcaccggccggccgcggcacagggcacatcacggtaggcgcacgcgggctgtctgtccgggacggctggacatcgg

SEQ ID NO: 639300 - DNA, 195 bp, Homo sapiens
tctctatgaaggtatccccgtacgctctctctgcgctgttctccatctgcctctgtgcatctaggtcctttaatgttttaccgggtattctgagcctcacagtgactgttccgggtccagggacgtagagagtgctcgtgttccctgtgcgcggtgtacttcgtcttcccccaaaggattgctcctgcttcccca

SEQ ID NO: 639301 - DNA, 2627 bp, Homo sapiens
  misc_feature (279)..(280): n is a, c, g, or t
  misc_feature (288)..(288): n is a, c, g, or t
  misc_feature (291)..(291): n is a, c, g, or t
  misc_feature (294)..(294): n is a, c, g, or t
  misc_feature (306)..(306): n is a, c, g, or t
  misc_feature (316)..(316): n is a, c, g, or t
  misc_feature (328)..(328): n is a, c, g, or t
  misc_feature (345)..(345): n is a, c, g, or t
  misc_feature (357)..(357): n is a, c, g, or t
  misc_feature (373)..(373): n is a, c, g, or t
  misc_feature (408)..(408): n is a, c, g, or t
  misc_feature (419)..(419): n is a, c, g, or t
  misc_feature (426)..(426): n is a, c, g, or t
  misc_feature (441)..(441): n is a, c, g, or t
  misc_feature (449)..(449): n is a, c, g, or t
  misc_feature (478)..(478): n is a, c, g, or t
gtttaatgtttactttgtgtagatccatttgtctattttatttatttttcccagtgaaaagtgtattttgatagagaacttttcattctataaatacactatgagttactaaaatatcatggattttgtttattcctgaaacatagttacatagttaaactgtacatatgacatggcttatgttaaaaatacccagtgctcagttttgaaagataggcaaaaaaaaaaaagtataggagaaactgaagaatgtacacttttttagagggcacatttggnngtaaatcnggnaanttggatagactngactgtgttngtgaaaactgancattaaaggtttggatngatcctttcttnccatttaatctctganacgtaaatatgtgaggtgtgctgctgtgcggggtnaacagcttccntcccttnctgtgtagcagtctngaaatgtnctgttaaatcagtaggcttaatgtgttcngggtatttatctccttgtattttaaatatatgtagttgcaaatagcaccaggaattagatttctgtacacccctaatctagccttgtgagcttcgctagttaatgtgtgctcactttccctccatttgttacgtgagagaatgcgtctgctgatcactgaagtgtcccttttagcttctgattcattgggttctgttgggcatctttaaatccaccttaacctgaggaatgtatgtgggcaaccaggccctgcatttttttatattctgaattttgcatgcttgcctgacttagtatttctgaattgatgttttttttaatggtataactatcttgattttcactgaaattatatggttctgtcactactctgtaaattaatccgaaacttttaaggtaactgggatgatctgcttgtaaaaatgcttgttgccttttgctttatcttcagtgtacctccttaatcctgcttcaacttgattatcttgtgaaacgatgagagtaagttgcaaccttgtgactgaaaacttgaaaagagtggagcaggtgggacctcttattctcaaatagtgacatattctccgtagtcacagtttcagaactgagtaaggatccttggtacttggtggcatctgttgaactgaggagcatttctcattgtaaagattgcctttgttctgtctaaaagtctggagaaatcccaaagacttttcctatgtactaggcattttattttgattgacttacaaactcttcttaatcattatcaatctcggtttttttgtggtgcagtggaaggagaaataggtctagtttctgcctctgattagccgcacagccttgaacaaatcacatttcatctttgaacttacctctactgttagactaggcgactcacatttgaggacttttctcgggtatcttgagggtttgtgatcctgaacccttaaacagtgcttttttgttacacaggagggcttttttggggggatgaccagtacagacatgccagttagttttactagtgggatcccaaatccaaagcagtgtagtggtgattggtcagtgactaaccaggcagctaagaagtcttaggcagcagcccagacatgtatagaggggcagttagagggagaacaggggtgggaaagggagcaaggggcagatagctcagcaaggaaagaatgggctcagaaaaaggagggctggctggaggagtgaggggcagcttaagtttggggagggtagaaacgccgtttccttgggaactggagtgcagtatgagctgggtgtcacttggctctgaacatactggctttgctgtaatgcttgaaaaggcgttggtatcttcattttacagttcattaacccaagtacgttttcttatttaaatgacaactttggtgctttaaaatgaggtaccactttttaaagctagctgtgtcgagttaaagaaaaaatcagcagttttttctcccagaaatgtaattgccaaacactattcatccccatcttaagttttacaaggtgatgtaatcagcttgttgtagtgatgctggccaaatggtgctcagcaggtgagaacaaaaaaaccccagatttcagtgaactaatacacagcttgagcgtttccatgtgctaatgttgcacacttactaaaaaactttggaaatggaaaataatgtattagtgcaacagttgatgtgcttctttgggcaaagatatagttttgttccacaatttgtacttaaaagcgaaagaacattgaaaacatagacttactggctgtagcaatgctggcctgttaactgataactagaacttaggttcacgtttatgtaaagtgtgtaaaacctagtagagcttgcatagtcggcactcagtaaatgtttggttccttttgccccttggtaagtttattttaccatcctcccacctgccattctgactttattaaatcaacatgtggaccagagtgttaatgagatgttattgcagaagagattgagaaaattggtatatcatgcagataacatacaaaatctttttgtaacgtaaaaaatgcagttttattattgcttgtgcctcaactgtttaagtgaatattaaagggcttggagtaaaaaaaaaaaaagaaaacaaaaaaaaa

SEQ ID NO: 639302 - DNA, 339 bp, Homo sapiens
agcataccaatctgtactagctaaccagggtaactgggaggtggtggatatgtgaattaccttgcactgtggtaatcattccacagctgcattcacatatcaaatcatcacattgtacaccctaaatatatacaatttttgtcagtcatacctcaaacaagctggggggtagggacgaaaaatcaagtgaatctgttctaaagtttaacaaaaccggccaggtgtggtggctcacacctataaccctaacactttggcaggccaaagcaggcggatcacctgaggtcaggagttcgagatcagcctgacccacatagtgaaaccccatctgtactaaaa

SEQ ID NO: 639303 - DNA, 290 bp, Homo sapiens
ctcacatatatagatgtatagtgattatgtcgtggactcgagtgtagtagtgatgttagagcacgtcttgcatcgacccgcgcgtgtttctggacgacggtttacaaccgactgattgggctttgctcactttttaatgcgatgatggttttttttcactggtgagttgtttattttcagtattagtcttctgttggatgaatagtttgcaaatattttctctcactcaagaggttgtctcttcactctgttgttttctttgcttgctgggcttttttatttttagttta

SEQ ID NO: 639304 - DNA, 89 bp, Homo sapiens
ggcccccctccccccgggggccttgggggaaatttttttttttcccccccccgcccgggggcgttttaccaagggccccccttttttta

SEQ ID NO: 639305 - DNA, 2893 bp, Homo sapiens
  misc_feature (279)..(280): n is a, c, g, or t
  misc_feature (288)..(288): n is a, c, g, or t
  misc_feature (291)..(291): n is a, c, g, or t
  misc_feature (294)..(294): n is a, c, g, or t
  misc_feature (306)..(306): n is a, c, g, or t
  misc_feature (316)..(316): n is a, c, g, or t
  misc_feature (328)..(328): n is a, c, g, or t
  misc_feature (345)..(345): n is a, c, g, or t
  misc_feature (357)..(357): n is a, c, g, or t
  misc_feature (373)..(373): n is a, c, g, or t
  misc_feature (408)..(408): n is a, c, g, or t
  misc_feature (419)..(419): n is a, c, g, or t
  misc_feature (426)..(426): n is a, c, g, or t
  misc_feature (441)..(441): n is a, c, g, or t
  misc_feature (449)..(449): n is a, c, g, or t
  misc_feature (478)..(478): n is a, c, g, or t
  misc_feature (2893)..(2893): n is a, c, g, or t
gtttaatgtttactttgtgtagatccatttgtctattttatttatttttcccagtgaaaagtgtattttgatagagaacttttcattctataaatacactatgagttactaaaatatcatggattttgtttattcctgaaacatagttacatagttaaactgtacatatgacatggcttatgttaaaaatacccagtgctcagttttgaaagataggcaaaaaaaaaaaagtataggagaaactgaagaatgtacacttttttagagggcacatttggnngtaaatcnggnaanttggatagactngactgtgttngtgaaaactgancattaaaggtttggatngatcctttcttnccatttaatctctganacgtaaatatgtgaggtgtgctgctgtgcggggtnaacagcttccntcccttnctgtgtagcagtctngaaatgtnctgttaaatcagtaggcttaatgtgttcngggtatttatctccttgtattttaaatatatgtagttgcaaatagcaccaggaattagatttctgtacacccctaatctagccttgtgagcttcgctagttaatgtgtgctcactttccctccatttgttacgtgagagaatgcgtctgctgatcactgaagtgtcccttttagcttctgattcattgggttctgttgggcatctttaaatccaccttaacctgaggaatgtatgtgggcaaccaggccctgcatttttttatattctgaattttgcatgcttgcctgacttagtatttctgaattgatgttttttttaatggtataactatcttgattttcactgaaattatatggttctgtcactactctgtaaattaatccgaaacttttaaggtaactgggatgatctgcttgtaaaaatgcttgttgccttttgctttatcttcagtgtacctccttaatcctgcttcaacttgattatcttgtgaaacgatgagagtaagttgcaaccttgtgactgaaaacttgaaaagagtggagcaggtgggacctcttattctcaaatagtgacatattctccgtagtcacagtttcagaactgagtaaggatccttggtacttggtggcatctgttgaactgaggagcatttctcattgtaaagattgcctttgttctgtctaaaagtctggagaaatcccaaagacttttcctatgtactaggcattttattttgattgacttacaaactcttcttaatcattatcaatctcggtttttttgtggtgcagtggaaggagaaataggtctagtttctgcctctgattagccgcacagccttgaacaaatcacatttcatctttgaacttacctctactgttagactaggcgactcacatttgaggacttttctcgggtatcttgagggtttgtgatcctgaacccttaaacagtgcttttttgttacacaggagggcttttttggggggatgaccagtacagacatgccagttagttttactagtgggatcccaaatccaaagcagtgtagtggtgattggtcagtgactaaccaggcagctaagaagtcttaggcagcagcccagacatgtatagaggggcagttagagggagaacaggggtgggaaagggagcaaggggcagatagctcagcaaggaaagaatgggctcagaaaaaggagggctggctggaggagtgaggggcagcttaagtttggggagggtagaaacgccgtttccttgggaactggagtgcagtatgagctgggtgtcacttggctctgaacatactggctttgctgtaatgcttgaaaaggcgttggtatcttcattttacagttcattaacccaagtacgttttcttatttaaatgacaactttggtgctttaaaatgaggtaccactttttaaagctagctgtgtcgagttaaagaaaaaatcagcagttttttctcccagaaatgtaattgccaaacactattcatccccatcttaagttttacaaggtgatgtaatcagcttgttgtagtgatgctggccaaatggtgctcagcaggtgagaacaaaaaaaccccagatttcagtgaactaatacacagcttgagcgtttccatgtgctaatgttgcacacttactaaaaaactttggaaatggaaaataatgtattagtgcaacagttgatgtgcttctttgggcaaagatatagttttgttccacaatttgtacttaaaagcgaaagaacattgaaaacatagacttactggctgtagcaatgctggcctgttaactgataactagaacttaggttcacgtttatgtaaagtgtgtaaaacctagtagagcttgcatagtcggcactcagtaaatgtttggttccttttgccccttggtaagtttattttaccatcctcccacctgccattctgactttattaaatcaacatgtggaccagagtgttaatgagatgttattgcagaagagattgagaaaattggtatatcatgcagataacatacaaaatctttttgtaacgtaaaaaatgcagttttattattgcttgtgcctcaactgtttaagtgaatattaaagggcttggagacacctttgtcttggcgtatgtttggagaagtaaactctcctgaatttactgagtctaaagctctgctcctttgttgttaccatctttaagcatgtgtaagaacagctgttttacctccctgaacaactcactgtggcgttccgttatcagctgtatagaatccctgtgggaatgtgagcaactcagcgcttacagttggtgctggccccgagcatcctggtacatagcagtcgactcgcagccgcgggttcgacaggttctatagtaaaaaaccatggtggtagtacccgaccn

SEQ ID NO: 639306 - DNA, 159 bp, Homo sapiens
cgtgctctgggtataacatcactattgtaaacctaagttcagcgcttgagatattttgcagaccctgcacttgttagatcagctgacaccgcccagaccagtaatctggctcaactagttctgccttccaccccaggagttggaggacagcaggagaac

SEQ ID NO: 639307 - DNA, 2587 bp, Homo sapiens
  misc_feature (279)..(280): n is a, c, g, or t
  misc_feature (288)..(288): n is a, c, g, or t
  misc_feature (291)..(291): n is a, c, g, or t
  misc_feature (294)..(294): n is a, c, g, or t
  misc_feature (306)..(306): n is a, c, g, or t
  misc_feature (316)..(316): n is a, c, g, or t
  misc_feature (328)..(328): n is a, c, g, or t
  misc_feature (345)..(345): n is a, c, g, or t
  misc_feature (357)..(357): n is a, c, g, or t
  misc_feature (373)..(373): n is a, c, g, or t
  misc_feature (408)..(408): n is a, c, g, or t
  misc_feature (419)..(419): n is a, c, g, or t
  misc_feature (426)..(426): n is a, c, g, or t
  misc_feature (441)..(441): n is a, c, g, or t
  misc_feature (449)..(449): n is a, c, g, or t
  misc_feature (478)..(478): n is a, c, g, or t
gtttaatgtttactttgtgtagatccatttgtctattttatttatttttcccagtgaaaagtgtattttgatagagaacttttcattctataaatacactatgagttactaaaatatcatggattttgtttattcctgaaacatagttacatagttaaactgtacatatgacatggcttatgttaaaaatacccagtgctcagttttgaaagataggcaaaaaaaaaaaagtataggagaaactgaagaatgtacacttttttagagggcacatttggnngtaaatcnggnaanttggatagactngactgtgttngtgaaaactgancattaaaggtttggatngatcctttcttnccatttaatctctganacgtaaatatgtgaggtgtgctgctgtgcggggtnaacagcttccntcccttnctgtgtagcagtctngaaatgtnctgttaaatcagtaggcttaatgtgttcngggtatttatctccttgtattttaaatatatgtagttgcaaatagcaccaggaattagatttctgtacacccctaatctagccttgtgagcttcgctagttaatgtgtgctcactttccctccatttgttacgtgagagaatgcgtctgctgatcactgaagtgtcccttttagcttctgattcattgggttctgttgggcatctttaaatccaccttaacctgaggaatgtatgtgggcaaccaggccctgcatttttttatattctgaattttgcatgcttgcctgacttagtatttctgaattgatgttttttttaatggtataactatcttgattttcactgaaattatatggttctgtcactactctgtaaattaatccgaaacttttaaggtaactgggatgatctgcttgtaaaaatgcttgttgccttttgctttatcttcagtgtacctccttaatcctgcttcaacttgattatcttgtgaaacgatgagagtaagttgcaaccttgtgactgaaaacttgaaaagagtggagcaggtgggacctcttattctcaaatagtgacatattctccgtagtcacagtttcagaactgagtaaggatccttggtacttggtggcatctgttgaactgaggagcatttctcattgtaaagattgcctttgttctgtctaaaagtctggagaaatcccaaagacttttcctatgtactaggcattttattttgattgacttacaaactcttcttaatcattatcaatctcggtttttttgtggtgcagtggaaggagaaataggtctagtttctgcctctgattagccgcacagccttgaacaaatcacatttcatctttgaacttacctctactgttagactaggcgactcacatttgaggacttttctcgggtatcttgagggtttgtgatcctgaacccttaaacagtgcttttttgttacacaggagggcttttttggggggatgaccagtacagacatgccagttagttttactagtgggatcccaaatccaaagcagtgtagtggtgattggtcagtgactaaccaggcagctaagaagtcttaggcagcagcccagacatgtatagaggggcagttagagggagaacaggggtgggaaagggagcaaggggcagatagctcagcaaggaaagaatgggctcagaaaaaggagggctggctggaggagtgaggggcagcttaagtttggggagggtagaaacgccgtttccttgggaactggagtgcagtatgagctgggtgtcacttggctctgaacatactggctttgctgtaatgcttgaaaaggcgttggtatcttcattttacagttcattaacccaagtacgttttcttatttaaatgacaactttggtgctttaaaatgaggtaccacagttttttctcccagaaatgtaattgccaaacactattcatccccatcttaagttttacaaggtgatgtaatcagcttgttgtagtgatgctggccaaatggtgctcagcaggtgagaacaaaaaaaccccagatttcagtgaactaatacacagcttgagcgtttccatgtgctaatgttgcacacttactaaaaaactttggaaatggaaaataatgtattagtgcaacagttgatgtgcttctttgggcaaagatatagttttgttccacaatttgtacttaaaagcgaaagaacattgaaaacatagacttactggctgtagcaatgctggcctgttaactgataactagaacttaggttcacgtttatgtaaagtgtgtaaaacctagtagagcttgcatagtcggcactcagtaaatgtttggttccttttgccccttggtaagtttattttaccatcctcccacctgccattctgactttattaaatcaacatgtggaccagagtgttaatgagatgttattgcagaagagattgagaaaattggtatatcatgcagataacatacaaaatctttttgtaacgtaaaaaatgcagttttattattgcttgtgcctcaactgtttaagtgaatattaaagggcttggagtaaaaaaaaaaaaagaaaacaaaaaaaaa

SEQ ID NO: 639308 - DNA, 751 bp, Homo sapiens
  misc_feature (12)..(14): n is a, c, g, or t
  misc_feature (21)..(22): n is a, c, g, or t
tactactaaatnnncggccgnncgacctttttaaagctagctgtgtcgagttaaagaaaaaatcagcagttttttctcccagaaatgtaattgccaaacactattcatccccatcttaagttttacaaggtgatgtaatcagcttgttgtagtgatgctggccaaatggtgctcagcaggtgagaacaaaaaaaccccagatttcagtgaactaatacacagcttgagcgtttccatgtgctaatgttgcacacttactaaaaaactttggaaatggaaaataatgtattagtgcaacagttgatgtgcttctttgggcaaagatatagttttgttccacaatttgtacttaaaagcgaaagaacattgaaaacatagacttactggctgtagcaatgctggcctgttaactgataactagaacttaggttcacgtttatgtaaagtgtgtaaaacctagtagagcttgcatagtcggcactcagtaaatgtttggttccttttgccccttggtaagtttattttaccatcctcccacctgccattctgactttattaaatcaacatgtggaccagagtgttaatgagatgttattgcagaagagattgagaaaattggtatatcatgcagataacatacaaaatctttttgtaacgtaaaaaatgcagttttattattgcttgtgcctcaactgtttaagtgaatattaaagggcttggagtaaaaaaaaaaaaagaaaacaaaaaaaaa

SEQ ID NO: 639309 - DNA, 2916 bp, Homo sapiens
  misc_feature (279)..(280): n is a, c, g, or t
  misc_feature (288)..(288): n is a, c, g, or t
  misc_feature (291)..(291): n is a, c, g, or t
  misc_feature (294)..(294): n is a, c, g, or t
  misc_feature (306)..(306): n is a, c, g, or t
  misc_feature (316)..(316): n is a, c, g, or t
  misc_feature (328)..(328): n is a, c, g, or t
  misc_feature (345)..(345): n is a, c, g, or t
  misc_feature (357)..(357): n is a, c, g, or t
  misc_feature (373)..(373): n is a, c, g, or t
  misc_feature (408)..(408): n is a, c, g, or t
  misc_feature (419)..(419): n is a, c, g, or t
  misc_feature (426)..(426): n is a, c, g, or t
  misc_feature (441)..(441): n is a, c, g, or t
  misc_feature (449)..(449): n is a, c, g, or t
  misc_feature (478)..(478): n is a, c, g, or t
  misc_feature (2916)..(2916): n is a, c, g, or t
gtttaatgtttactttgtgtagatccatttgtctattttatttatttttcccagtgaaaagtgtattttgatagagaacttttcattctataaatacactatgagttactaaaatatcatggattttgtttattcctgaaacatagttacatagttaaactgtacatatgacatggcttatgttaaaaatacccagtgctcagttttgaaagataggcaaaaaaaaaaaagtataggagaaactgaagaatgtacacttttttagagggcacatttggnngtaaatcnggnaanttggatagactngactgtgttngtgaaaactgancattaaaggtttggatngatcctttcttnccatttaatctctganacgtaaatatgtgaggtgtgctgctgtgcggggtnaacagcttccntcccttnctgtgtagcagtctngaaatgtnctgttaaatcagtaggcttaatgtgttcngggtatttatctccttgtattttaaatatatgtagttgcaaatagcaccaggaattagatttctgtacacccctaatctagccttgtgagcttcgctagttaatgtgtgctcactttccctccatttgttacgtgagagaatgcgtctgctgatcactgaagtgtcccttttagcttctgattcattgggttctgttgggcatctttaaatccaccttaacctgaggaatgtatgtgggcaaccaggccctgcatttttttatattctgaattttgcatgcttgcctgacttagtatttctgaattgatgttttttttaatggtataactatcttgattttcactgaaattatatggttctgtcactactctgtaaattaatccgaaacttttaaggtaactgggatgatctgcttgtaaaaatgcttgttgccttttgctttatcttcagtgtacctccttaatcctgcttcaacttgattatcttgtgaaacgatgagagtaagttgcaaccttgtgactgaaaacttgaaaagagtggagcaggtgggacctcttattctcaaatagtgacatattctccgtagtcacagtttcagaactgagtaaggatccttggtacttggtggcatctgttgaactgaggagcatttctcattgtaaagattgcctttgttctgtctaaaagtctggagaaatcccaaagacttttcctatgtactaggcattttattttgattgacttacaaactcttcttaatcattatcaatctcggtttttttgtggtgcagtggaaggagaaataggtctagtttctgcctctgattagccgcacagccttgaacaaatcacatttcatctttgaacttacctctactgttagactaggcgactcacatttgaggacttttctcgggtatcttgagggtttgtgatcctgaacccttaaacagtgcttttttgttacacaggagggcttttttggggggatgaccagtacagacatgccagttagttttactagtgggatcccaaatccaaagcagtgtagtggtgattggtcagtgactaaccaggcagctaagaagtcttaggcagcagcccagacatgtatagaggggcagttagagggagaacaggggtgggaaagggagcaaggggcagatagctcagcaaggaaagaatgggctcagaaaaaggagggctggctggaggagtgaggggcagcttaagtttggggagggtagaaacgccgtttccttgggaactggagtgcagtatgagctgggtgtcacttggctctgaacatactggctttgctgtaatgcttgaaaaggcgttggtatcttcattttacagttcattaacccaagtacgttttcttatttaaatgacaactttggtgctttaaaatgaggtaccactttttaaagctagctgtgtcgagttaaagaaaaaatcagcagttttttctcccagaaatgtaattgccaaacactattcatccccatcttaagttttacaaggtgatgtaatcagcttgttgtagtgatgctggccaaatggtgctcagcaggtgagaacaaaaaaaccccagatttcagtgaactaatacacagcttgagcgtttccatggttgctcacatgggtttaggcaacaaccatattaacctttcaacacaaaactttggaaatggaaaataatgtattagtgcaacagttgatgtgcttctttgggcaaagatatagttttgttccacaatttgtacttaaaagcgaaagaacattgaaaacatagacttactggctgtagcaatgctggcctgttaactgataactagaacttaggttcacgtttatgtaaagtgtgtaaaacctagtagagcttgcatagtcggcactcagtaaatgtttggttccttttgccccttggtaagtttattttaccatcctcccacctgccattctgactttattaaatcaacatgtggaccagagtgttaatgagatgttattgcagaagagattgagaaaattggtatatcatgcagataacatacaaaatctttttgtaacgtaaaaaatgcagttttattattgcttgtgcctcaactgtttaagtgaatattaaagggcttggagacacctttgtcttggcgtatgtttggagaagtaaactctcctgaatttactgagtctaaagctctgctcctttgttgttaccatctttaagcatgtgtaagaacagctgttttacctccctgaacaactcactgtggcgttccgttatcagctgtatagaatccctgtgggaatgtgagcaactcagcgcttacagttggtgctggccccgagcatcctggtacatagcagtcgactcgcagccgcgggttcgacaggttctatagtaaaaaaccatggtggtagtacccgaccn

SEQ ID NO: 639310 - DNA, 321 bp, Homo sapiens
  misc_feature (319)..(319): n is a, c, g, or t
ggcaatccctaaacatgtcttattcatacaagaaatgggtctatatttttccatctagcctaaaaaatgctttagtttgtcacctattaaattaatagtaagtgctatctactggttatcccacccctatataatttttaggtaaagacaattactttatctagtggtattctacttgtattcagaatactgtattaaaattttactatttcatttttgtattctgtgcttattttttttgctcacgcatgtatgcttagtataaatgtgtcacttctaaaaatttgtcacagacttttagaaataaatttcaaaaatntt

SEQ ID NO: 639311 - DNA, 229 bp, Homo sapiens
tctagatgcatgctcgcagcggcgctattgtgcatggcatatctgccagcaattcggcttgcattgtgtgtttgcagctggtgtgggtggctgcgatcggtgggccctgctgctgcacgctgggtgcatcatggccctctgctgatgctggtcttgccgctgtttggggcatatctggtactgctctatatgtcttggcttgattcgctggccattgggcgtacatagg

SEQ ID NO: 639312 - DNA, 2626 bp, Homo sapiens
  misc_feature (279)..(280): n is a, c, g, or t
  misc_feature (288)..(288): n is a, c, g, or t
  misc_feature (291)..(291): n is a, c, g, or t
  misc_feature (294)..(294): n is a, c, g, or t
  misc_feature (306)..(306): n is a, c, g, or t
  misc_feature (316)..(316): n is a, c, g, or t
  misc_feature (328)..(328): n is a, c, g, or t
  misc_feature (345)..(345): n is a, c, g, or t
  misc_feature (357)..(357): n is a, c, g, or t
  misc_feature (373)..(373): n is a, c, g, or t
  misc_feature (408)..(408): n is a, c, g, or t
  misc_feature (419)..(419): n is a, c, g, or t
  misc_feature (426)..(426): n is a, c, g, or t
  misc_feature (441)..(441): n is a, c, g, or t
  misc_feature (449)..(449): n is a, c, g, or t
  misc_feature (478)..(478): n is a, c, g, or t
  misc_feature (2626)..(2626): n is a, c, g, or t
gtttaatgtttactttgtgtagatccatttgtctattttatttatttttcccagtgaaaagtgtattttgatagagaacttttcattctataaatacactatgagttactaaaatatcatggattttgtttattcctgaaacatagttacatagttaaactgtacatatgacatggcttatgttaaaaatacccagtgctcagttttgaaagataggcaaaaaaaaaaaagtataggagaaactgaagaatgtacacttttttagagggcacatttggnngtaaatcnggnaanttggatagactngactgtgttngtgaaaactgancattaaaggtttggatngatcctttcttnccatttaatctctganacgtaaatatgtgaggtgtgctgctgtgcggggtnaacagcttccntcccttnctgtgtagcagtctngaaatgtnctgttaaatcagtaggcttaatgtgttcngggtatttatctccttgtattttaaatatatgtagttgcaaatagcaccaggaattagatttctgtacacccctaatctagccttgtgagcttcgctagttaatgtgtgctcactttccctccatttgttacgtgagagaatgcgtctgctgatcactgaagtgtcccttttagcttctgattcattgggttctgttgggcatctttaaatccaccttaacctgaggaatgtatgtgggcaaccaggccctgcatttttttatattctgaattttgcatgcttgcctgacttagtatttctgaattgatgttttttttaatggtataactatcttgattttcactgaaattatatggttctgtcactactctgtaaattaatccgaaacttttaaggtaactgggatgatctgcttgtaaaaatgcttgttgccttttgctttatcttcagtgtacctccttaatcctgcttcaacttgattatcttgtgaaacgatgagagtaagttgcaaccttgtgactgaaaacttgaaaagagtggagcaggtgggacctcttattctcaaatagtgacatattctccgtagtcacagtttcagaactgagtaaggatccttggtacttggtggcatctgttgaactgaggagcatttctcattgtaaagattgcctttgttctgtctaaaagtctggagaaatcccaaagacttttcctatgtactaggcattttattttgattgacttacaaactcttcttaatcattatcaatctcggtttttttgtggtgcagtggaaggagaaataggtctagtttctgcctctgattagccgcacagccttgaacaaatcacatttcatctttgaacttacctctactgttagactaggcgactcacatttgaggacttttctcgggtatcttgagggtttgtgatcctgaacccttaaacagtgcttttttgttacacaggagggcttttttggggggatgaccagtacagacatgccagttagttttactagtgggatcccaaatccaaagcagtgtagtggtgattggtcagtgactaaccaggcagctaagaagtcttaggcagcagcccagacatgtatagaggggcagttagagggagaacaggggtgggaaagggagcaaggggcagatagctcagcaaggaaagaatgggctcagaaaaaggagggctggctggaggagtgaggggcagcttaagtttggggagggtagaaacgccgtttccttgggaactggagtgcagtatgagctgggtgtcacttggctctgaacatactggctttgctgtaatgcttgaaaaggcgttggtatcttcattttacagttcattaacccaagtacgttttcttatttaaatgacaactttggtgctttaaaatgaggtaccactttttaaagctagctgtgtcgagttaaagaaaaaatcagcagttttttctcccagaaatgtaattgccaaacactattcatccccatcttaagttttacaaggtgatgtaatcagcttgttgtagtgatgctggccaaatggtgctcagcaggtgagaacaaaaaaaccccagatttcagtgaactaatacacagcttgagcgtttccatgtgctaatgttgcacacttactaaaaaactttggaaatggaaaataatgtattagtgcaacatgtggaccagagtgttaatgagatgttattgcagaagagattgagaaaattggtatatcatgcagataacatacaaaatctttttgtaacgtaaaaaatgcagttttattattgcttgtgcctcaactgtttaagtgaatattaaagggcttggagacacctttgtcttggcgtatgtttggagaagtaaactctcctgaatttactgagtctaaagctctgctcctttgttgttaccatctttaagcatgtgtaagaacagctgttttacctccctgaacaactcactgtggcgttccgttatcagctgtatagaatccctgtgggaatgtgagcaactcagcgcttacagttggtgctggccccgagcatcctggtacatagcagtcgactcgcagccgcgggttcgacaggttctatagtaaaaaaccatggtggtagtacccgaccn

SEQ ID NO: 639313 - DNA, 222 bp, Homo sapiens
cgagctaaagatccccagcagtatacagactcagatgtaactaagtatgtatcatatatgcattgagtatgtaaggacagagtaagatgagcctctgaagacatctcatatactctgggctcccaccgatatcaggttcttaatagtgtctcacgaatttcccagctaattcttacggtctgcatttacacatatttcaccagcataaatggttttactgtt

SEQ ID NO: 639314 - DNA, 442 bp, Homo sapiens
ccctagttgtgtcattacacacactccctactacactacgactactatattaggtcagcccgaaggtctgctggtagacaacactgcaaatcactcagtgatacactacatttgctattctctcatttatacgaggaaaagaaacaagtttccagtttgttttcaacaaaaacaacaaagaaccaaagggatggacaaaaaggcatttatactaatctagggtgaggaatactaagaaacttgcttataataataaaaaaagattacagagattaatgaacaaaaactggttacagttaagaacattatttaacaacagatgaccataccctttgaggaaagctccaacaacctattttaaagaaggtacacttggaataaaaaacaataaaagacttttatgaagtttaaattaaaccctctccttacaaaacaaataatt

SEQ ID NO: 639315 - DNA, 158 bp, Homo sapiens
gatattaaaaatacattctataagccaaaatagaaatttattttgcaaaatgaatggtacaacgtaaaaaatgcagttttattattgcttgtgcctcaactgtttaagtgaatattaaagggcttggagtaaaaaaaaaaaaagaaaacaaaaaaaaa

SEQ ID NO: 639316 - DNA, 390 bp, Homo sapiens
tttcccagtgcatataaaagttatgtttacactatactgtagtctgttaagtgtgtagtagcattatgtctaacaaaaagtacacaccttaaaatactgctgaaaagtgctaatgattatttgaacctttggctagtcaatctttttgctggagtgggtcttgccctgatgttggtgactgctgacttatcagggtggtggttgctgaagatttagtgtattattattattattattattattatttttctagaagcatttcttacttacatagataatttctttaagacaatgggctgggcacagtggctcatgcctgtaatcccagaactttgcgaggccgtgggaggattgcttgagctcaggagttcaagactggcctgggcaact

SEQ ID NO: 639317 - DNA, 271 bp, Homo sapiens
tgtgttgtgggaaatatggagagggagtataccgctgtgactagaatgttttttcctgtaagtaagagagtgatatttgatcaggccaacttggggactagctcatagagttctcccagtaggttaatattggggggtaaggccaggttagcgaggcttgcttcatgtcatcaaaaagctatcattgggatttcagtgtgaagtccttgaaagaggattatgatgcaactgttagtgctttttaactttgagtttgctaggcctactattc

SEQ ID NO: 639318 - DNA, 568 bp, Homo sapiens
  misc_feature (324)..(324): n is a, c, g, or t
ccgattttttctagtccttcatatattgaaaacttgccacatgacattgtatcgtcttcattttccagaagatgcgttggtgtgccataggtttctaacttccttgaaaatagttttttaagtcaattgtaaatatacgtattattgttaaaagtaactttaaactgcaacacatagcttcaaaacaatatagagattttgtaataccttataagtggagttggctaaaataccttatccatataaaacttattctattctttgcatgcttattttgtgtgttggttgctagcttaaagtttgatttgttgttactctttgtgngccaaattcactaggcaagcggatttttcctcagacttcaaaaaataattcttttaagaaaaaatgtaaaaatgtttattctaaaaagctgcattaaagggacaacctataaaaagttttgctagctcatctttagaaggaagaaagaatattagcttgggtgatgtttaatttgggtggcgatagtttctgtaggctaaactttatgagaaaagtgtacctactctataaaggtaataaatgt

SEQ ID NO: 639319 - DNA, 398 bp, Homo sapiens
  misc_feature (102)..(102): n is a, c, g, or t
tctggagtgcagtgacgcgatctcagcttactgcaacctccacctcctgggtttaagccattctgcctcggcctcccgagtagctgggattacgggcgcctnccaccacatctggctaatttttgtatttttagtagagacgggttcgccatgttggccgggctggtctcgaactcctgacctcagaatgtccgcccgcctcggcctgctaaggtgttgggatgacagggtttagccaccacggtgggccactactcagtcatttttaatagttgaatgtttttccccccatcttgtgtttccatgtataaaatagacattttgagtcaaaactgaaggccctgtatatataaacctttgactccctttttgctccccataaccccgctgatatttct

SEQ ID NO: 639320 - DNA, 285 bp, Homo sapiens
  misc_feature (118)..(118): n is a, c, g, or t
tggggccaaaagttgggccaacccctccacccaaagttgccaccaggggagtgcttgggcagaaaaggttcgagtccagggtcccaagtctttggtcccaaaagggacccatggctgnctcacaccaaggcctatggggaaaaattgggagctccccaacttggaccccccccttgtggctttgcaccccaaggagccccctcccagacagaaaggaaaaaaggcaggtgaccagggcttgttagattgtggctccttaataaatgttttttgttatgaagtcta

SEQ ID NO: 639321 - DNA, 464 bp, Homo sapiens
taaccttttcactcaccgtttgccacaccaagaaagaaatggagtgcattctcttgatatttggggtctgccttcccggggccatttctagggtaagagacattccggcggtgacttcagtcttgaagagcacctccttcacccccagctacttagtgaggtctccagtccatttcctaatcttataaggactgggaagcatgggccttgcatctgctgtctgcagctcctagctgtgtgacttcaggtaagtctcttcatctctctgagcctcagtaacttcactatgaaatgcgtattatcttgtagcttttgtgtgagtgctaattggtggaatgtggataagtcttcatccaggagctgacaaagccagccctcactctgttatagctgttatccagcagtggtcagaacagtactgcccatgccatgaattaagcacatagcataatacggagtttgaa

SEQ ID NO: 639322 - DNA, 267 bp, Homo sapiens
catatggacggcagatcgagcagcagtcggaaactggatctgcactgccaaacttttaaaggtgccatttcagtggtgctctctacaagatgcttgctgagttctttcaactgtccctccaggtcggggtgcagatctcttaattttccaaagaggaacccctgaacctcatcaataggatcatttcaccaatcactgtggtgtttacctcagttcctttcacctgagtatcatccttggccttgccataggcaagggtaccgagct

SEQ ID NO: 639323 - DNA, 215 bp, Homo sapiens
tcggccacaccctggtgaggagcatgtcttcccatagaacccacgtggccacaccttgggtgaggagcacgtcttcccacagatctcaacagaactccacatcgtctggttttgtggagactttcatatgtcctgtcaagttgcctcatgcacctgcagactgttcttgggaagcaaacctggactgcaaaataaacctcccggcctcctcctga

SEQ ID NO: 639324 - DNA, 357 bp, Homo sapiens
  misc_feature (30)..(30): n is a, c, g, or t
  misc_feature (32)..(32): n is a, c, g, or t
  misc_feature (119)..(119): n is a, c, g, or t
  misc_feature (328)..(329): n is a, c, g, or t
atggaaatactaaagaatgaaagacacagnanaagaaatcaaaataaaaagccgagatttttatgaaaaagaaaaactccttaggggagaggcgagggaggagctcctgcctccaccanttcaaactcaaattaaaggccatgcctctgctccatactttggaaaggaagaaccctcagtggctcccagcagcactggtaaaacctttcagccaggatcctggatgccacgagatggcaagagggggggggaatgaatgcgatatggtcaaatcttatcatgtatatggatgtgactattttaacaaataaaagaagtgaaaagttannaaaaaaaaagagaaagagagaaaaaagg

SEQ ID NO: 639325 - DNA, 804 bp, Homo sapiens
ggttacctgatgtggcggggacctgtttcatagctagcagaagccgtttaagaaacataacttccccccactggcccagaattgttggcgtacttttgtatgctggaaggtgacccctctatcatgggtattggtccgtgcccgctatcagtgggccactgaagaaacgcaggactgagttcttaaggcacatgggatttggtagaggtgaatgtaagcttttgctccccagtacttggctgttgagaggatttggatctttgacataagtaaacccatgtgaatggaggagcccttgctttgggtcaccccctgggaggatctggatccagaattactgcacacctgggtcacgagattacaggcctcgaggtggaaaatatgcccttggatcagcttgcaatggaggtggcccaggtattgctgtcatccttcagagcaccgcctgaagagacccgtgagctcactgtgacccatccttactctacttggcccaggcccaccagttaaaccagtgaccttcagagcaagctgccaccaactggccatgccctgcccattgaaacccgtgattaagtttgatccagccctggtgaccacccaaaatgccattgatccatgaataggagccccatgctagaagtaccttctctcagatttgaacccgtgaaatatgatgtatttctgagctaaaactccactatagaagaccttcaagaaatcgtattcttgcccagtaacccccacttctgccttagataatatgattataaggaaatccaataaatgttgcctttacttcca

SEQ ID NO: 639326 - DNA, 263 bp, Homo sapiens
  misc_feature (4)..(4): n is a, c, g, or t
tacngaggggagcagatcagtggctgcccagagcttggaggaggggaatagggagtcactgcttcctgggcaccaggtttcggtttggggtgatgaaatgttctataaccagacagtggtgatggttgcataacattgtaaatatgcttaatgccactggattgcacaatttaaaatggttatgatggtaaattttatgttatgtgtgttttaccacgtacacacataaaacttattttgtgccattaaaaagaaaaagctct

SEQ ID NO: 639327 - DNA, 856 bp, Homo sapiens
aagcagcggtatcaacgcagagtgcccatatacggccggttgtcatcaactaccagaactgtcctacaagaaatgtgaaggggagttcttgccaatgtgaaagaagaggagcatgaaccaataagaaattatctgaaggtacaaaagttattggtaagtattgccttagatattgtacatcaaaggcacagtattataacactgtaacttatggtatgtaaactactcatatctggagtagaaagacagagaaagatgaacctatcaataaataagtaagctaacaaggaactttgttaagatacagacagtatagataagaatataagatagaaagaaaagtttaaagcgtaggggggatgaagttagagtgtagtaatgtatgcatttgctctttgcctattggtgagttggtattggcaattagtgtagtcatcagtttaaaataacggcttttaagatgtgatttggaagccttatggtaatctcaaatcaaaagagctacaatagatacacagaaaagtcacagacattagaacataccagcagagaaaatcaccttcacaaaaaggaagacaggacggaagagaagaccccggaaagaagccagaaaaccaagtaacgaacatggtctgtaatacgtccttacttcatccagtaaccagccattggcaactgtcacactgggggctagacctcggttacagtcaacaacaccacagaagtacgctggaactgggacttctattaaagcacacagaaccccaatgcattcttgtggccctaccgagaaaaaagacagttaagggcaccgttctcggactggccaagtcacacgggctggaacacacgactc

SEQ ID NO: 639328 - DNA, 115 bp, Homo sapiens
gtaatagtacggcgcagtatgatggcattcggctaatagtcgcacaggttggagaggctgcagcatgtgcgatgagacgtgcacctaccgtgaaccccattagggctagacaggc

SEQ ID NO: 639329 - DNA, 214 bp, Homo sapiens
caaaaaaaaaaaaccccccccgggggggggggggggggccccccctcccctttttttttttgggggaaaaaaacccccccggggggtccccctttttttttaagggggggggggggggggttttttttttcccccttattttttggggcccccccctttttttttttttttttgcccccgggccttttttttaaaggggggggccccgggtgta

SEQ ID NO: 639330 - DNA, 910 bp, Homo sapiens
taaaaaggcacaagggtttggttttaataaattttttggctaaaaaagttccaagggggcaggggctgcccggggggggggcgtgcgcagcaaacccagcagccaaagcggtccctttcggctcccgtctgtttgtgccagcctgtgccgccggccagctctggcctccctcaaagccagagggtcctgggctccaggcttccgggccgggatgcgggccagccccgggggagaggacccaggccccctctagtaggggccgcaccaccgctccccccagggacagtgggagcctcacacttgggcgagggtcccctctcccttgtcaccaggagaactcggtgccttgaagcctgggtcccagtgaacgggcccccacccaaggggtgggaaacaggaaggccaggaggcaggaggggccaggccaggagacagtattggcccaatccccgtgcccacaaaagacgatatcggaaagcgcggtcagggcagggttggttcccccgggtgcggggcatgtggcacagacatggcagcagggctgcagtccgaaggcggaagaacaaacatgtcgtgggagccccatcacatgggaggcaggcagaggctagcagctttgggcaccccgagtggggggtccccaggggtcgtgccaccggttgagtgcgccaacggggcgggaaccccaaaaccaagggaaccgcgtgacgtcccccgggccagcccaccggcaacctatgggaatgggcgccgagggcatatgagagccaggtgcccagggcgcgaccccaaagacggggcctcggaccctacggccacagaaggggatggccgtggtgtgagaaagaggaggcgatgacacagccaacatcagcgaacaacacggaagcacagagcccgagtaacagct

SEQ ID NO: 639331 - DNA, 1049 bp, Homo sapiens
ggcgccgtgcggagaagttgtctagtccacgctcggaaccttgccgtccatgggcccgttgccactctgtgcaggtcttcgtgacgcaaaaagacaggcgacagctgtgtgcgcactgcaaacgcggcaattggtctcatcaaggtgaacgggcggcccctggagaatgatatgacgcccgcgccacggctacattgtaacgaaggctgctggagaccggatctcgtgctttctcggccgaaaggtaagccgagttttgcctgtgtgtacgacactccgatgctcccgtggtataaacggttgggtgcgttcaccgtggccccagtagtttgatgcgtatcccgtctacgtccactctcactacaagcccctgtggtgggcctagtataacctaggagatccttacttgtgggagtgaagtgcttacccatatgtaatggaggattgcaaaacgaatcaattctcctcgcttcgcgagtttactgacctcgagaacccctggctggtgttgaagtctggtaaccccttcgttctgccataggccgacggtcccaaaaatagtttttggatgcgctcctagaggtgacccctggaggctcggcatgactcagaaatataccttatccagatgagagtccccaattcgctgcactcaagacaaacttccaacgtttgtattaaattaagagcatgatttctctggtgacgggaatttgtcgacacggtttttcctatagatccttcctgcacagaaaagggcacacctggtttcaagacaggggccttgaataggcaaatgaaaacgtactcttaaagcgacgttttcaccccgtgggggcattaccttgatagacggcagagggattggccaacgaaatgaaccgactttttaaaagaaaccatagcgtgtggatactcttacagtgaatgccgacagccaacaagaaccttacttggacacaggggaggggaaagaacaaaacgcaggggcaccccaactatggtagagcgcagcgaaacatattcagggacacacccgcgggcaccgg

SEQ ID NO: 639332 - DNA, 164 bp, Homo sapiens
gatcgcttctgtgctggcgtgtggttctgtgctggcgtgtggtcttgtgctgtcgtgtggtcttgtgctggcgtgtggttcttgtgctagtgctgacgatgttctgtacaacttaactcactggcgagaatacagcgtgggacccttcagcacaagaaccaacg

SEQ ID NO: 639333 - DNA, 165 bp, Homo sapiens
acctcacgtgctcctatctcaggcagttcagagcctcctgtaactgagaccagtctcttcccatcaaattccttgagcgtgctgcactgcagtactcgtcagatgggctcggtcatatataccacctcgaagccacggtcaagccacaagccacggtcaacccac

SEQ ID NO: 639334 - DNA, 1162 bp, Homo sapiens
ctcagcgcgatacgcgggagggtggtggtgagttgtgatagtcttgtcggtgggggtccactccccacccgtgttgttctacttcgccctgtgtttttgatcgtatcattgtgccccaatggttagaaatgactcctcttgtttcgggcctcttctcttttacaactcgtgtggtatacaccagactgcctggggtgacgccccgctccacacatgggggcacagggaaaccccctcggtgttttgccgccgcataattctgcggccaccgggcgcctgttcccacagtattgacggcccccgcggggtctgccgacttccaaatgggaggggaatgtgccgccataggagagggccccccccagtgtgagaaacaccaggtgaccccccagggcaagaacctatagagaggttaagcccctggcttcccagaaggcccgggtcaaccaggcctatttcgcgtgtgaaaaaaatgagacttggctgccaacttcctccctgagtcagaactttgatgacgagtgatcccaggaacccaggcccccgaagccccccccctacccttgatgtgccatgaaagttttataaaaggacaatatatagatattcacgtttatttaagaaatggaaaaaaaaatccaaaattctttaaaaaacccagccaaccagtccagcttcctgtcctcctaaagtggcccccgttcccatctcccgggccaagacaagctgtccccccgtcctcctccccagcccagcctgctcaagagaaagctggcacggactgggagggcgacaagatgggcccctctgtggcctcctgtcccacgcttcttctgcacgccaagacggaaaaggcggctgcgttgcctgctccatcctcccgagaaaaccccctcgagggagcccccccccactccttctttctaggatgaaggggaaagctggaggccccacactttgagtcctccacttggaagtggccccaatctttccactctagggcaagtcctgaaaggcccaaggccccctccccacgtctggccttggcctccacgcctggagaagggctaaacacatcagctcattgtcaaggccacccccaccccagaacagaaccgtgtctctgataaaggttttgaagtgaataaagttttaaaaacta

SEQ ID NO: 639335 - DNA, 313 bp, Homo sapiens
acccggacacagctatcacggccggcagcatcccactccgcatcgccctagcagcccgacgacatcctatacagtaacagacgaggtcaacgagcccacccctaccatcagatcaacttggccaccagtggtactgaacctacgagtacaccgactacggcggactaatcttcaactcctacatacttcccccattattcgcgagaaccaggcgagctgcgactccttgacgttgacaatcaagtagtactcccgattgaagcccccattcgtatataattacatcacaagacgtcttgtaagcgcgtgctgt

SEQ ID NO: 639336 - DNA, 147 bp, Homo sapiens
gacggtgactgtccttagcgtagctcggagatatctgatgcagtgctagtgttcatcgtctcagactcctggagctgggtctggggtacctggctgacatctacgattctcttacttaactggcttagctactgtgtcttatttggt

SEQ ID NO: 639337 - DNA, 845 bp, Homo sapiens
tctggcagatgttggggccgtttggcgccgtcaccactgtgaaagtgatccgcgattcaacaccaacaagtgcaaagggttggcgtttgtgaccatgacaaactatgaagaagccgcgatggtcatagccagcctgaacggctaccgcctgggggacaaaatcttacagggtttccttcaaagaccaacaagtcccacaaataggctcgcatcatgcgtttctttgttgtagcggaatagataattaaggagtgacacggagttgaaacttttctatgtcagtgtacacactcatttagcgccaattttcacaagtgttggtcttctgtctgaatgacaagtgagaaggtttttatactctgggatgcaaccgacgatgttcagaatgttatgaaatcccacaatgttagagccaatcttaagtttcgtaacgttatttcctttagagatatatattaagaacagaaatctaagtagaactgcattgactaaccagtccctctggatggtggtgaacctgaagcatgctttaacctctaagactgtctaacacgcgtacattcaatgtctccacaggactggtgtagcaacacaaaaatcacctttatagttgaagtttattactctacagatgttagacacgatgctgagtgtgccgtttttctcaaccgcttcaaacatttgtaagcgatgtatgcatttggtggacacggaagtacctttaccacggcaggtcccgttgcaactactggttcagtcagtcccggggtcgcgagtgtactgaaatgcgggggccccgccacgtgggcccactgggcgggccagggcgctgtgggggctcaaag

SEQ ID NO: 639338 - DNA, 203 bp, Homo sapiens
aacagcgattagtcttaattctatcatatgtatacaaaactatccacaactttcactttgtatatacatctttcctccatcccctgcaccattcatccgtacatctctatagctctcacactagtgcgccttttctttagggccagagcacagagaacacactaattttttattttatgggcgactggcataaccctcaggat

SEQ ID NO: 639339 - DNA, 202 bp, Homo sapiens
gcacatcaccagcaccattccaccgtccacagtcacagtgcatctgtgttcccattctctcacctagttggctccctttcatgagcccagcatgctcagccttgcgggttttcgcacagtctgcatgcattcacagttctcgaacatctgctcactggacacaattgtccgcagcttacggggcatcctctcagcagtcgca

SEQ ID NO: 639340 - DNA, 1262 bp, Homo sapiens
  misc_feature (837)..(837): n is a, c, g, or t
tggccagttttttttttatttgtaaagctctgccataaaacttctaggcggtgtgccaatgtggttcccctgtggccattactcgcaccagggtgttgtcctggtgttagcgcagctaatacaggagctcgtggccaatcagtcagactcaggccaggtcaaggtgcacgtgggggtggttctgcctatgcgtgcgtggctacgtgatagacttcttgcttcagatgtcactcataccaagggatctttcgcccctctataagatctcccgagaatcgtgtggagtgcgttggggccttgtgtggctagcacgacgagtccagtgtagcgggtaagagggctgaatgcactaggggctgcttgagtgatgtcccacaccttttagcgtgtgtataaagagggtgttctgtgcccatatcgtgtgatggaatactccccatataagcgagtggtcgcgtggcccgatcctgttggcctctccgagaatagcgccgcagaaggggatctcacaactcgtggggaggagacattcagttccacgcggggtatctccaaaagatagcctgtggtgtgtggccccgaatgtggtgggttggggtccttgacacacggttattgccaaggtataaagccccagagggtttcacatattaccccttttgcaccaacgctttttgtccccaacgccaaccagtggtagagcacgtgactagaatagggggttgggcatgcttgggtggagcgcagaagaataagcgggggagcaccaaaagagaagcgcaccaatttctttgaatgggggggacttcttacagtaccctgggagaaccaggctgnggtcttttttttcgccaccaagacacccacaggggggttaatcccacaatatagagtcgtgagaacgacggggtatatataactcctctcagaagagatttccccagaaacgaaccaaatttcttggccagggtttttggtccaacagaatgaggaaggaaagggggcacaactacttctccaaagggaatctatctcccttatggtaattatgggaggcccccaacaaaaaatttccggcctcttctagtgggtgttgtgttcgcccctcgttgtgattgaaagattcccccaagagataggcgcgccagggggtgttcccaatctcgcagtgggaacgcccctggaaagagggtgcacacaatttgtcgctcactttttgacaggagagatattagccccgagctatttctactatttacatg

SEQ ID NO: 639341 - DNA, 97 bp, Homo sapiens
  misc_feature (36)..(36): n is a, c, g, or t
gcaggtcaaaagaccctttattacttttatgattgncattatgctttcttgccagatgccttggagcaggtgcttctgggctgagcttttgaccttc

SEQ ID NO: 639342 - DNA, 385 bp, Homo sapiens
ggttgggaaggagtagggaggatgaatgaatggaaaatgcaagccaggcatgtattatacgtgtgtgcagtttagagtaagacagtagaagtctactaggagcaggtatgcaagaggccaggcctttccctttggttcttcttcaatgcataggtgaaaaaagacatctggcattcacaaggtcaaggaaccccaggggccaagactggatagctgtgcgagcacacattggtagtggagaaaactatgcctgatggagcattgccagatgttgtctgtaggtcaagtggtagtaagtcggcaaggaatttaagagtataggtaggaggcaaagtttgaaaaatggaattgagtaatggtgatgggagggcataagatgagaaag

SEQ ID NO: 639343 - DNA, 117 bp, Homo sapiens
ggtgtgtacaaaacgggggcttcttcctgcgcatccacccctgacggccgagttgacggtgtccgggacgaatacgcgactcctcacactacacggctaaaccttcaacgcacgaca

SEQ ID NO: 639344 - DNA, 190 bp, Homo sapiens
tgtctataaggcagtacaatggtagggccttgtaggacatggtaaggactggagtaaaatctggaagggtgttaggaacccttggaagggcgtcgagcgaaagggaggtgataaacatttgcaaaaaggttggactgctgggtagtgaacacatcaggggttcgaacagatcataggatacgtagggaga

SEQ ID NO: 639345 - DNA, 316 bp, Homo sapiens
ccggaagcggtggtttgtagcggctctctgggtagcagtgtggtgtgatagcggcagaggggggctcggagaggtgctcgtattctcgtagctgtgccgggtacttacccaccaccatgtcgaacaagagaacaaagcaccaagcacaagaagcgccctcagcgtacaacatccaatgtgtgtgctatgtgtgcacagacacagattcaggagtacagagaggcctacaacatgattgcacagcacagagatggtctcatcgacaagggaggatgtgcatgatatgcttgcttcagtggagaagactccaactgat

SEQ ID NO: 639346 - DNA, 1010 bp, Homo sapiens
catttaccatctcactggctagcgagtactagtatatcgctcacacctcatatcctccctactatgcctacaaggaataatactatcgctgttcattatagctaggtctcataagcctcaagacccactccctcttagccaagattgtgcctattgccatactagtctgtgccggctgcgacgcaacggtgggcctaggtgccctgaactagctctcaatcgtccaacacatatggcctagactgacgtgacataacctaaacctactccaatggctaaaactagatcgtcccaacaattgatatttagcctagccactgggcattgaatttccggaagaggaaacccattgatttggatgtcacggaaccgacccagagcctaatgattagaatcatcgcgcctagctattgtgtatctcgaaagctaaccaacgaccttatctttatgcgttgttcgcccagaaccttctcccttcctgcaccgcacctggaagagacctccacctccgtaatagtaaacatgaagcgtgagtcctaccccatctgacaatacagtggctgggcctggcggtcccgagcattatccaggtgaaaccgagttattcacggaggaacatagtcataccggctcgtatagctagatctgcccatacagatgtgctcctgtgaattataacattcagcagtcctacagaactaatcatatgggatgattcttcttcgaatagcccacttagagcccacatgggtatcatccacccgatgaggcgaccaggcgagaaccgccatgaagaggggggcacataacttgctattctagagcctagtaggatccctttccctatgaggtggacttagttacaagcacaacagcggtaggttcacttaaattctagtggtgcatctcgtggccaaaattatcaaatctgagcacaacgtaaatgaagttacacaaaattgtggaaaaaccattaggggcacagagaaactaaggcagtgaaccatgaa

SEQ ID NO: 639347 - DNA, 285 bp, Homo sapiens
agccagtctagccagccagccaagccagtcaagccacccagccattcagcctagccagccaacccagagagccagcctatccagcctagacaggctagcaagccagccagtcatgccagccaagccagtcaagtcagccagccagccaagccagccaagcctaccacgccagccagcaagccaagccagccaagccagccagccaaccaagccagtcaagcaagccacccagccaagccaggccaacccaaattctttttaataaaaggcacaagccgcagcctc

SEQ ID NO: 639348 - DNA, 147 bp, Homo sapiens
gtgacccttcgtggaagacgaataacaggatctataagaccctggcagagcctcagagaccctcagcattgccaacaccagagtttttaccaacgtgtggaaggggctggcacacattgcgttcaggactgtaaattccaagaggcc

SEQ ID NO: 639349 - DNA, 127 bp, Homo sapiens
gtctcccttaatggtaagcttttaataaattatttccagtactctaattataaggatgaaccaatttaagactaccagctaatcatgagaacatatcttagacaacagtccccttctgtcgtcttct

SEQ ID NO: 639350 - DNA, 252 bp, Homo sapiens
gatgggactcttgaagcctgggattacaggctgtgagccagcactgcccggccgtgtttttttattttctgtagaggcgggttctccctgtgttgcccaggctggtctttttcttgttttcttttggtgtagtctgttcgctttttcgcctgtggttggcgtgctggggcctctgtttccagctttaactacaccctccgccgccccttgcaccgggttccagcgatttctcctgtgcctagcctcccaagt

SEQ ID NO: 639351 - DNA, 248 bp, Homo sapiens
caaaaatttttttttcccccccgggggggggggtttttgggggggggcctttccccccttttcacccccccaaaaaggcctttttttttttccccgggggggggggggggggttcctttttttttggcccccattgggtttttttggggggggccccttttttttttttttaaaaaaaccccttccccccccccctttttggggggcggggtttttttttttcccttttattgggtttttccccccca

SEQ ID NO: 639352 - DNA, 503 bp, Homo sapiens
ataaatccttctaccaaaaacacatatggtcatcacagtgctattcacagtagcaaagacagatcaacgtggctgcccatcaacagtggactggataaagaaaatgtggtacatataaatcatggagtattaggcagccataaaaagaacaaaatcatgtcctttgcagccagccacatggatgcagctggaagccataatctaagcaaattaagaacagaaaaccaagtactgcatgttctaacaaatgggagctaaatattgagtacctcaggatgcaaaggtgggaacaacagacactgcagactggaacactgtgggtgaggagggcagaaggataggttgaaaaactacctattgggtactatgctcactacctgggtgatgggatctgtacctcaaacctcagcatcacacaatatacccttgtaacaaacttgcacatttacccactgtttctaaatgaaaagttgaaatattttttattaaaaaacacaaaagca

SEQ ID NO: 639353 - DNA, 113 bp, Homo sapiens
cttgcgtagagacagacgaggacacacgtgactcggatagctccgcacgtgacttcgtttcagctgtacaagcagttagtctgaatgccctgatagaatgtatcttctcccac

SEQ ID NO: 639354 - DNA, 1149 bp, Homo sapiens
gggaagttgtggaagaggcagaaaatggaagagacgcccctgctaacgggaatgctaatgaggaaaatggggcagccaggcaggctgcaccaatgcaggtcagactgacagcaagcaggcaagcaaggtggggcaggcacagcaggcaggcaggcaagcaagcaaggtgcatggtgcaggcaagcaggcatggcagcatgcaagcatgcaggcaagcgtgcagtcagcttacgggacaagctgggcagctgacagatgatgacggatgaccgatgtcgagtaccaaagaacgcagacagaccgaacgacggatgacatacgacacgcacaacacagcgacaaagttaaaactacaaaaaaaacaaggcacgcacggtgaccatattacaagcctccacattcccagtctcagcaatctaacacgtgagatcacactatcagaataagagaggcccagaccagaccacacgtgagacagtgcacacccagcagatgaccacgacagcatctcacacgcaaccaaacccaaaaaccagtgaagaaactttgcaaacaggggtgagggacaaaccaaggaaccacagaagtatcacacggacccttggataatagatccttataacaagctcgctctaaacaaggaaacattctcgcatgaggagacctgttacatgaacctaaacaattaagacaaacaatgaatagggtaaacactaattgtgataacggggaatcaaagcaccataagacagtaaacaggaaacatcgcggacatgtaacacagaacacccagacactagctagaacagacggctaccgaccgtgcacccatacaatcatcattgcaactaatcaaaccttcgctaattgaaattgatattacaccccactaaatattccatatatcaataaaacaccatccactaaaaagtgagtaaaaactaacacaacaacaaccatgtagcataacaacacaaaaatacagcgaacaaaaaatttacacacacaacacgtacataaacaacacaacatcattatattctcccagcaaaaaattctccatcatacactacatattacacacgacgccactagtcacaccacaaaacaattacaatcaacatacaaacacacgcatacaaatcagtc

SEQ ID NO: 639355 - DNA, 559 bp, Homo sapiens
  misc_feature (88)..(88): n is a, c, g, or t
  misc_feature (119)..(119): n is a, c, g, or t
  misc_feature (130)..(130): n is a, c, g, or t
  misc_feature (181)..(181): n is a, c, g, or t
  misc_feature (191)..(191): n is a, c, g, or t
  misc_feature (213)..(213): n is a, c, g, or t
  misc_feature (221)..(221): n is a, c, g, or t
  misc_feature (227)..(227): n is a, c, g, or t
  misc_feature (256)..(256): n is a, c, g, or t
  misc_feature (263)..(263): n is a, c, g, or t
  misc_feature (265)..(265): n is a, c, g, or t
  misc_feature (268)..(268): n is a, c, g, or t
  misc_feature (282)..(283): n is a, c, g, or t
  misc_feature (285)..(285): n is a, c, g, or t
  misc_feature (293)..(294): n is a, c, g, or t
  misc_feature (297)..(297): n is a, c, g, or t
  misc_feature (305)..(305): n is a, c, g, or t
  misc_feature (315)..(315): n is a, c, g, or t
  misc_feature (326)..(326): n is a, c, g, or t
  misc_feature (328)..(328): n is a, c, g, or t
  misc_feature (340)..(340): n is a, c, g, or t
  misc_feature (362)..(362): n is a, c, g, or t
  misc_feature (385)..(385): n is a, c, g, or t
  misc_feature (391)..(391): n is a, c, g, or t
  misc_feature (403)..(403): n is a, c, g, or t
  misc_feature (411)..(411): n is a, c, g, or t
  misc_feature (413)..(413): n is a, c, g, or t
  misc_feature (427)..(429): n is a, c, g, or t
  misc_feature (434)..(434): n is a, c, g, or t
  misc_feature (444)..(444): n is a, c, g, or t
  misc_feature (446)..(446): n is a, c, g, or t
  misc_feature (454)..(454): n is a, c, g, or t
  misc_feature (555)..(555): n is a, c, g, or t
cacatggtcctgttcgtactccaggatggcggcgtaaagggcccgctgctcccgttcctccggggtcagggcgacttggctgcaaaanctcctggggagaaaggcacgcggtgggtgcnggggccagtgncctccccgcagcggccccaggggcgggcaggagttccacctgttggcggcntcctggagcngcagccaggcgattacctcacnaccttacncaaggnacaaaagtagacaaaataaagagaccgancataggnanagngcgggccatcggtnnanaaccccgnnccncacccggngaggccaggnagtcacagggncntcctctcggtgnggggatataaaaaaaaaaaaanaaaaaaaaaaaaaaaaaaataanaaaaanaataaaaaaatntataaacncnaaaaaaaacaatannntatgnaaaaaaaaanantatatatnatactcccggattgctctaaggccaggagctttgtgactctgccccctgaagcttctggaagatctcgggtggcagaaaaggagagagctttcctccttcntcgg

SEQ ID NO: 639356 - DNA, 844 bp, Homo sapiens
  misc_feature (95)..(95): n is a, c, g, or t
tttctataatgcctgaatatttataatcatataaattttcatgcattatataatttatcacctagtgtacgtttcacattaattaaaaatattangacactctaatttaaccacttctgaagaaatgaatggctgatcacaaaatgtcaaattactatcataagcccaagattttatcataatcatgaatagcatttaatcatgaatatcattatttaacttttagggggcgtacttacagttgtagattaaaatccaatattgagtcaacaatactttactccaaattataatcacatatcgaaaaaaagttttaattcaatatttttattatattccacgtataaaaataattttcataaacggttacctgattgatatcttccaaaaaaaatttcctaccacagggtagtaacttccaattaaacatgcccctaacccacatactctttatgaactccttaataattgcaattttattttaaattcaagttttaaaacgcaataaatttcaaattatccccaaaacagcttgttaataggccatttaaacttattcaaccagcttaatattgtcggcaggcatatttccgtgtactttactaaatctgaatcaaaagggcgtgataacccaagaaaaaaagggaaacaataagaacgcatggcaaaaaaagagtaaacgaaaaaggggtgaagaacaagggaaagtaaaaaaaataaaaaaaacaaacaccaacgggggggggtagcaaaaaggaaacaaattgtgtaacaagtaaaatataaaaataaaaagtaatgacaataaacacaacggaaaacgtaaagaacaacaataggcaag

SEQ ID NO: 639357 - DNA, 148 bp, Homo sapiens
  misc_feature (6)..(6): n is a, c, g, or t
gttatngggcaccctttcctaaccacccaaccagccggcttaatgcgccgttcagaggggcgcctggagggggattttttcttacccaactttgcggggtttacaaccccagaacgaaaacttcgttggctacaatatacaaagaatt

SEQ ID NO: 639358 - DNA, 3341 bp, Homo sapiens
gaggcggaagaggtgctgtgcaggaggcgggcgggcgcggttctttccggaaggattgaatctcctttagccccgcccgcctccgtagctgcctgaagtagtgcagggtcagcccgcaagttgcaggtcatggcgctggctgctcgactgtggcgccttctgcctttccgacgtggagccgccccggggtctcgtctccctgcggggacttcgggcagccgcgggcattgcggcccctgtcgattccgcggcttcgaggtaatgggaaacccaggaactttcaaaagaggccttttactctcagctttgtcgtatttgggttttgaaacttaccaggttatctctcaggctgctgtggttcatgccacagccaaagttgaagaaatacttgaacaagcagactacctgtatgaaagcggagaaacagaaaaactttatcagttgctaacccaatacaaggaaagtgaagatgcagagttactgtggcgtttggcacgggcatcacgtgatgtagctcagcttagcagaacctcagaagaggagaaaaagctattggtgtatgaagccctagagtatgcaaaaagagcactagaaaaaaatgaatcaagttttgcatctcataagtggtatgcaatctgccttagtgatgttggagattatgaaggcatcaaggctaaaattgcaaatgcatatatcatcaaggagcattttgagaaagcaattgaactgaaccctaaagatgctacttcaattcaccttatgggtatttggtgctatacatttgccgaaatgccttggtatcaaagaagaattgctaaaatgctgtttgcaactcctcctagttccacctatgagaaggccttaggctactttcacagggcagaacaagtggatccaaacttctacagcaaaaacttacttcttttaggaaagacatacttgaaactacacaacaaaaagcttgctgctttctggctaatgaaagccaaggactatccagcacacacagaggaggataaacaggaaataatttagttactatcaccaggtggatgttacgggttgcctgctacaatgcagaattattcctgtttgacacacatggcagatcgagttaacatttctaaaacataaaagtcatgggatgtgtactaaagtggaagagctgagagtctcatctggtcactgtcaagacattttattgttataatgtcctatctggtttttggaaactcttagaaaccccactttataaacttaaatttcacaagttagtctcttagctctcctgtttacttataacatgtatttttccattttagatacagacagaagctgctcagttgcttacaagtttcagtgagaagaattgagaacttttcagagaagatttatgaaatagctaataaacattgccttttcttttaattctaaacttaatatatgaactataactgttctacggctttttaaatgttgtgaccatttaaccgtgtaaatataaaatattctaggcttcttcacaaataatagggtaaaataaataatcgccataagagtggtagaaataaatctccatggctcaggcaaagagattattttgcatcctggataccagcaatgcaaaatggtatgagatttctaaggattgatcacattgggatgggagatcaagcaaagaaatatttgtagaggaggggaaatggatctataggggatatacagggggatggattttcaaattggattgattctaagttgaaatcttgaagagaaggtgtggtgacagtggttaggatgttgtgggttcctgacataaagtagttaaatgatatatcttggagctaacctgtgtaagtaaagaactaagtaaggagatgactaaaaatggagtagtttccttttttatttttttgagacagagtctcactttgtttcccaggctggtgtgcagtggcacaatctcggcccactgcagcctccgcctcccgggttcaagtgattctcctgccttagcctcctgagtggctgggattacagggttgtaccaccacactcggctaacttttgtatttttggtagagatggggttttgccatgttggctaggctggtctcaaactcctggcctcaagtgatctgcccgccttggcctcccaaattgctgggattacaggcgtgagccaccgcacctggccagtttactttaaatgtggtgtagtctcatggtaaactgaatttgtcatcagatgcaaagttctattccctaatggaatggaaggaacacaaaacttaagagtgaaatggaatactaagatgtttttaaataggcaggactatgctactcacttgaggctggagtgccaccactgcaaaatctttttaagttttgtaaaaaggagcatcttgaatccacttagataaagagagactgtgtgtgtaggtggatttttcccaaaggatttgggaattgtaatgttacaatgaactgtatggatatgtttgtcatgtacattttcaaacaaaaaggaaaactgaaagtagtgatctttgtatacccatctcttagattcagtgattttgctatataggttgtgtatcccttatctgaaatacttgggactagtagaagcatcttggatttgggatgtttttccaaattttggaatacctgcatacacacaataagatatcttggagatgggacccaagtttaaacacaaattcacttgtttcatatataccttatgcacatagcttgaaggtaactttatataacattatttttaataattttgtgcattgagaccaagtttgcataccttgaaccatcagaaagcaaaggtgtcattatctcagccactcatgtgggtaatttgtggttggttgatgtcaccatcattcctgactgaatgtatatgctaccaataagcagttattttcttatacttattcatgcataagtacttaacagtaaaaaatatgacataactcgcacaggaacaaggatggcaaaaaaaaaaatatgacacaccactgatacagtgaaaaaataatgtggtcagggtagctaggcaacagtagcatcaccagaaacctgtatcagctgttaaacggcaacaacaatggcaggctttcagtttcccacttaatgatgctgtattttaaaaggttattgtatactgtaattttatttttgtaggtgaagagaaacagaagcagctgaagggccaggaagtgggtctttctagggatgtggcattctgctggatggctttttaaaatgggttttttcctttagggagaccgaataaactgtgttgtgcacctgcaaaaaaaaaa

SEQ ID NO: 639359 - DNA, 1229 bp, Homo sapiens
cactgcgcagcaccacacttcgctcgtactcgtgcgcctcgccttcgctatttcctccgtcaaccatgtctgacacaaccctgatatggctgaggatcgagaaaatctcgcactacactcgcacacactgaacgcaacgaccccgagcaccgcccagcagacacaacactccacgtgcccctctccaaacgcacacacgcacttgacaccacggagcaacgccacagccacgcgcgacactcgcctcccctgacgcgccgccttgcacacccagcccacaaattactgccccccacacactcacacaccacaacctactgcccaaccccttccacacagcttctaaaaacacacacaaccacaacaccacacacaccctccacccacaacacccccccccccaccccaccctcttccaacacccagcaacccgcgcccaccacacgaaaagagaaactctcctacagcaacacaagtaaaagactcgtttggcagaggggagcggcccccccccatcagaagacagaatgcagcaagccgcgcgacaacagaggcactggagataacaacataaggaaacagcactccccccaaccacacactcacccccccaccacacccgcccacaccacaccaaccaccacacccctcccctacccacacctccccccaccactccactaccacccccaacaccactctactccccacccacccccacaccaccccaccctaccaagctacgccccacaacacaacaaacacaacacctgccaacacactcaaccacacacaacctcacccctttacaaacaacaccaaaatctaacacaacactatacacttcacaatctaaatccctcaccaccccccaccaccactattcaacacacacataccacatatccctcacacccaccccccaaccccacctacctccccataccaacaacacccatccccttacctcacaaacccaccaaacacgactccctaccaccccacacaccacaccacacacacatccacctactctcccccaccccacaaccccaccacataatatcacacaccacccccactccacacccacactcctcactatactacaacacaactcacagaaccactaaaaaactccaacacaaaacacgacaccacataacctcacctcacacctctcacaccacacaaccattcacactcatatcacgctaccctaacacaca

SEQ ID NO: 639360 - DNA, 3047 bp, Homo sapiens
agcggagggaaggagtggggtttgcccccacgcgccccagaagctgcctgctacccgcccttcttgtgcgaaatgtaaaacaggacgggaaagaaccttgaccgctgtgaaattattctccctgtaggcgatgacagatacaacagcgcttgaggctgcccctttcagactttgaaaagtgtggtaatgggaaacccaggaactttcaaaagaggccttttactctcagctttgtcgtatttgggttttgaaacttaccaggttatctctcaggctgctgtggttcatgccacagccaaagtgcggcaatattagaacccaaggaaggaaaaactggcaaagttgtcatatgccaagtggccattgcctcctgaaatgaagttgaagaaatacttgaacaagcagactacctgtatgaaagcggagaaacagaaaaactttatcagttgctaacccaatacaaggaaagtgaagatgcagagttactgtggcgtttggcacgggcatcacgtgatgtagctcagcttagcagaacctcagaagaggagaaaaagctattggtgtatgaagccctagagtatgcaaaaagagcactagaaaaaaatgaatcaagttttgcatctcataagtggtatgcaatctgccttagtgatgttggagattatgaaggcatcaaggctaaaattgcaaatgcatatatcatcaaggagcattttgagaaagcaattgaactgaaccctaaagatgctacttcaattcaccttatgggtatttggtgctatacatttgccgaaatgccttggtatcaaagaagaattgctaaaatgctgtttgcaactcctcctagttccacctatgagaaggccttaggctactttcacagggcagaacaagtggatccaaacttctacagcaaaaacttacttcttttaggaaagacatacttgaaactacacaacaaaaagcttgctgctttctggctaatgaaagccaaggactatccagcacacacagaggaggataaacagatacagacagaagctgctcagttgcttacaagtttcagtgagaagaattgagaacttttcagagaagatttatgaaatagctaataaacattgccttttcttttaattctaaacttaatatatgaactataactgttctacggctttttaaatgttgtgaccatttaaccgtgtaaatataaaatattctaggcttcttcacaaataatagggtaaaataaataatcgccataagagtggtagaaataaatctccatggctcaggcaaagagattattttgcatcctggataccagcaatgcaaaatggtatgagatttctaaggattgatcacattgggatgggagatcaagcaaagaaatatttgtagaggaggggaaatggatctataggggatatacagggggatggattttcaaattggattgattctaagttgaaatcttgaagagaaggtgtggtgacagtggttaggatgttgtgggttcctgacataaagtagttaaatgatatatcttggagctaacctgtgtaagtaaagaactaagtaaggagatgactaaaaatggagtagtttccttttttatttttttgagacagagtctcactttgtttcccaggctggtgtgcagtggcacaatctcggcccactgcagcctccgcctcccgggttcaagtgattctcctgccttagcctcctgagtggctgggattacagggttgtaccaccacactcggctaacttttgtatttttggtagagatggggttttgccatgttggctaggctggtctcaaactcctggcctcaagtgatctgcccgccttggcctcccaaattgctgggattacaggcgtgagccaccgcacctggccagtttactttaaatgtggtgtagtctcatggtaaactgaatttgtcatcagatgcaaagttctattccctaatggaatggaaggaacacaaaacttaagagtgaaatggaatactaagatgtttttaaataggcaggactatgctactcacttgaggctggagtgccaccactgcaaaatctttttaagttttgtaaaaaggagcatcttgaatccacttagataaagagagactgtgtgtgtaggtggatttttcccaaaggatttgggaattgtaatgttacaatgaactgtatggatatgtttgtcatgtacattttcaaacaaaaaggaaaactgaaagtagtgatctttgtatacccatctcttagattcagtgattttgctatataggttgtgtatcccttatctgaaatacttgggactagtagaagcatcttggatttgggatgtttttccaaattttggaatacctgcatacacacaataagatatcttggagatgggacccaagtttaaacacaaattcacttgtttcatatataccttatgcacatagcttgaaggtaactttatataacattatttttaataattttgtgcattgagaccaagtttgcataccttgaaccatcagaaagcaaaggtgtcattatctcagccactcatgtgggtaatttgtggttggttgatgtcaccatcattcctgactgaatgtatatgctaccaataagcagttattttcttatacttattcatgcataagtacttaacagtaaaaaatatgacataactcgcacaggaacaaggatggcaaaaaaaaaaatatgacacaccactgatacagtgaaaaaataatgtggtcagggtagctaggcaacagtagcatcaccagaaacctgtatcagctgttaaacggcaacaacaatggcaggctttcagtttcccacttaatgatgctgtattttaaaaggttattgtatactgtaattttatttttgtaggtgaagagaaacagaagcagctgaagggccaggaagtgggtctttctagggatgtggcattctgctggatggctttttaaaatgggttttttcctttagggagaccgaataaactgtgttgtgcacctgcaaaaaaaaaa

SEQ ID NO: 639361 - DNA, 3133 bp, Homo sapiens
  misc_feature (1)..(1): n is a, c, g, or t
  misc_feature (12)..(12): n is a, c, g, or t
ngttctcgagcntctcggagcatgttggctgtgctgtgcaggaggctgaagtagtgcagggtcagcccgcaagttgcaggtcatggcgctggctgctcgactgtggcgccttctgcctttccgacgtggagccgccccggggtctcgtctccctgcggggacttcgggcagccgcgggcattgcggcccctgtcgattccgcggcttcgaggtaatgggaaacccaggaactttcaaaagaggccttttactctcagctttgtcgtatttgggttttgaaacttaccaggttatctctcaggctgctgtggttcatgccacagccaaagagtctcgctgtgtcactgagggtagagtgtggaggtgcgatctcagctcactgcaaccactgcctcctgggttcaagtgatcctcccacctcagcctcccaagtagctgggattacaggcatgtgccatgatgcccagttgaagaaatacttgaacaagcagactacctgtatgaaagcggagaaacagaaaaactttatcagttgctaacccaatacaaggaaagtgaagatgcagagttactgtggcgtttggcacgggcatcacgtgatgtagctcagcttagcagaacctcagaagaggagaaaaagctattggtgtatgaagccctagagtatgcaaaaagagcactagaaaaaaatgaatcaagttttgcatctcataagtggtatgcaatctgccttagtgatgttggagattatgaaggcatcaaggctaaaattgcaaatgcatatatcatcaaggagcattttgagaaagcaattgaactgaaccctaaagatgctacttcaattcaccttatgggtatttggtgctatacatttgccgaaatgccttggtatcaaagaagaattgctaaaatgctgtttgcaactcctcctagttccacctatgagaaggccttaggctactttcacagggcagaacaagtggatccaaacttctacagcaaaaacttacttcttttaggaaagacatacttgaaactacacaacaaaaagcttgctgctttctggctaatgaaagccaaggactatccagcacacacagaggaggataaacagatacagacagaagctgctcagttgcttacaagtttcagtgagaagaattgagaacttttcagagaagatttatgaaatagctaataaacattgccttttcttttaattctaaacttaatatatgaactataactgttctacggctttttaaatgttgtgaccatttaaccgtgtaaatataaaatattctaggcttcttcacaaataatagggtaaaataaataatcgccataagagtggtagaaataaatctccatggctcaggcaaagagattattttgcatcctggataccagcaatgcaaaatggtatgagatttctaaggattgatcacattgggatgggagatcaagcaaagaaatatttgtagaggaggggaaatggatctataggggatatacagggggatggattttcaaattggattgattctaagttgaaatcttgaagagaaggtgtggtgacagtggttaggatgttgtgggttcctgacataaagtagttaaatgatatatcttggagctaacctgtgtaagtaaagaactaagtaaggagatgactaaaaatggagtagtttccttttttatttttttgagacagagtctcactttgtttcccaggctggtgtgcagtggcacaatctcggcccactgcagcctccgcctcccgggttcaagtgattctcctgccttagcctcctgagtggctgggattacagggttgtaccaccacactcggctaacttttgtatttttggtagagatggggttttgccatgttggctaggctggtctcaaactcctggcctcaagtgatctgcccgccttggcctcccaaattgctgggattacaggcgtgagccaccgcacctggccagtttactttaaatgtggtgtagtctcatggtaaactgaatttgtcatcagatgcaaagttctattccctaatggaatggaaggaacacaaaacttaagagtgaaatggaatactaagatgtttttaaataggcaggactatgctactcacttgaggctggagtgccaccactgcaaaatctttttaagttttgtaaaaaggagcatcttgaatccacttagataaagagagactgtgtgtgtaggtggatttttcccaaaggatttgggaattgtaatgttacaatgaactgtatggatatgtttgtcatgtacattttcaaacaaaaaggaaaactgaaagtagtgatctttgtatacccatctcttagattcagtgattttgctatataggttgtgtatcccttatctgaaatacttgggactagtagaagcatcttggatttgggatgtttttccaaattttggaatacctgcatacacacaataagatatcttggagatgggacccaagtttaaacacaaattcacttgtttcatatataccttatgcacatagcttgaaggtaactttatataacattatttttaataattttgtgcattgagaccaagtttgcataccttgaaccatcagaaagcaaaggtgtcattatctcagccactcatgtgggtaatttgtggttggttgatgtcaccatcattcctgactgaatgtatatgctaccaataagcagttattttcttatacttattcatgcataagtacttaacagtaaaaaatatgacataactcgcacaggaacaaggatggcaaaaaaaaaaatatgacacaccactgatacagtgaaaaaataatgtggtcagggtagctaggcaacagtagcatcaccagaaacctgtatcagctgttaaacggcaacaacaatggcaggctttcagtttcccacttaatgatgctgtattttaaaaggttattgtatactgtaattttatttttgtaggtgaagagaaacagaagcagctgaagggccaggaagtgggtctttctagggatgtggcattctgctggatggctttttaaaatgggttttttcctttagggagaccgaataaactgtgttgtgcacctgcaaaaaaaaaa

SEQ ID NO: 639362 - DNA, 1134 bp, Homo sapiens
gaggcggaagaggtgctgtgcaggaggcgggcgggcgcggttctttccggaaggattgaatctcctttagccccgcccgcctccgtagctgcctgaagtagtgcagggtcagcccgcaagttgcaggtcatggcgctggctgctcgactgtggcgccttctgcctttccgacgtggagccgccccggggtctcgtctccctgcggggacttcgggcagccgcgggcattgcggcccctgtcgattccgcggcttcgaggtaatgggaaacccaggaactttcaaaagaggccttttactctcagctttgtcgtatttgggttttgaaacttaccaggttatctctcaggctgctgtggttcatgccacagccaaagttgaagaaatacttgaacaagcagactacctgtatgaaagcggagaaacagaaaaactttatcagttgctaacccaatacaaggaaagtgaagatgcagagttactgtggcgtttggcacgggcatcacgtgatgtagctcagcttagcagaacctcagaagaggagaaaaagctattggtgtatgaagccctagagtatgcaaaaagagcactagaaaaaaatgaatcaagttttgcatctcataagtggtatgcaatctgccttagtgatgttggagattatgaaggcatcaaggctaaaattgcaaatgcatatatcatcaaggagcattttgagaaagcaattgaactgaaccctaaagatgctacttcaattcaccttatgggtatttggtgctatacatttgccgaaatgccttggtatcaaagaagaattgctaaaatgctgtttgcaactcctcctagttccacctatgagaaggccttaggctactttcacagggcagaacaagtggatccaaacttctacagcaaaaacttacttcttttaggaaagacatacttgaaactacacaacaaaaagcttgctgctttctggctaatgaaagccaaggactatccagcacacacagaggaggataaacagatacagacagaagctgctcagttgcttacaagtttcagtgagaagaattgagaacttttcagagaagatttatgaaatagctaataaacattgccttttcttttaattcta

SEQ ID NO: 639363 - DNA, 2880 bp, Homo sapiens
  misc_feature (2841)..(2841): n is a, c, g, or t
gaggcggaagaggtgctgtgcaggaggcgggcgggcgcggttctttccggaaggattgaatctcctttagccccgcccgcctccgtagctgcctgaagtagtgcagggtcagcccgcaagttgcaggtcatggcgctggctgctcgactgtggcgccttctgcctttccgacgtggagccgccccggggtctcgtctccctgcggggacttcgggcagccgcgggcattgcggcccctgtcgattccgcggcttcgaggtaatgggaaacccaggaactttcaaaagaggccttttactctcagctttgtcgtatttgggttttgaaacttaccaggttatctctcaggctgctgtggttcatgccacagccaaagttgaagaaatacttgaacaagcagactacctgtatgaaagcggagaaacagaaaaactttatcagttgctaacccaatacaaggaaagtgaagatgcagagttactgtggcgtttggcacgggcatcacgtgatgtagctcagcttagcagaacctcagaagaggagaaaaagctattggtgtatgaagccctagagtatgcaaaaagagcactagaaaaaaatgaatcaagttttgcatctcataagagcaattgaactgaaccctaaagatgctacttcaattcaccttatgggtatttggtgctatacatttgccgaaatgccttggtatcaaagaagaattgctaaaatgctgtttgcaactcctcctagttccacctatgagaaggccttaggctactttcacagggcagaacaagtggatccaaacttctacagcaaaaacttacttcttttaggaaagacatacttgaaactacacaacaaaaagcttgctgctttctggctaatgaaagccaaggactatccagcacacacagaggaggataaacaggagcctgattccccacgtgtcacattggtccgtgacgtttccccactaagggtgagacccattactgagaacaaaccccaggaatcccttacattctccttcccgtgcagcccccacctgattgttcttgtgtggattccagagctgactgctggattgagatgcttatttccccacgtacatgtatatcaaaggttctgtgtagcctcacctagtgcatcgtaatttcttacttgagggagaccagcaccctgaaaacgaactggaaagctgccttcttcagtcaaatctgctaaatcatacctacaatgaatgatattcaataacttctgtcatggcaaaatttatacagcagtggtaccatttgtaattctaatacttaactcttttatggtatacgcagtcctttttgaaggccagtttccctctatcacataacctgtcacatacattagaattttttttttaattctttaggcttgaaaattaccagagtgttcataataaggatttggaaaaggagtctattcaaccaagcagatctctgcctttctttcgtctttactatgaattctgaataaaatggagaacacactctcaatatgtagaaaaataaaattttggcaaaacaataattactgtttttctgtatgtacttagcagtgaaatatttataggcaacagattttaagaagtcagttccatggctattaaaaaatgtttaagttaatgaaatttacagtgcatattaaaagcatgatacaaatggaaatttaaaattttgtattaggaagcccagtttgctaaaagtagcattaatatcattcacatcagattttaatttgttacacatttttgtagttcagcaaaggcccctatgatgaaaaacaattaaaaagtgttatgacaaaaataattatctgtgtaaaaagggggagacccaaaagatttttcatatggttatttaattcagttaaatagaactgttatgaatttgagaggaatgaagatattcaaacactaacagaaaatcattagccttatattagagcattcaaatgcttatgtaactcttcaatccatctggcttcataaaaaccaaaattttgaacacaaaaaagtggcagagtttacattaccttttgtatgttcctaagtatgaaattgcatcaatttattatgaattaaatttgaaaagcatcacagatttaaaaacaaagtacaaaagagcctgattctttttaattccacaaatacctagcatctcaaagtaacatgtaaacaaacttctatgctgctcaatgaatccttccaatttcgataataaactaaatagtattggatctagtatatgactttcatgtgtaagttatggttctatccattactttaacaatattactgatgtaacagagaaaaattttcaactattgtatttatttaaaacaaactgacaagttcaagcacctgtcttcagaaaagccagcagcatttttttttttttaacatactcaaagtaagatttggcctaagcccttaatacctttctgaacagccatgcaactaaacaccctcaggagatgttacataagggagagaagaacatggagcaatttgcactttttcccctagataatattaacaaggtaaagcaaatccagatctttatgaatgaatggctgtcatgtttaatacacttggagctctataaaactagagccactatcatatatgtttatatagatatatatgtatttttaataaagtctctcacttgcttcaaaatttaaggatgatctttttcctggtcagtcatttcaagggaacaataaataaagtagaaaaggatgaactgttttgcatatttctgtggaagaacggaaaacatactttgagaggttcggaaaatncactgtacagaatgaacagcttatatacactatctgtgc

SEQ ID NO: 639364 - DNA, 261 bp, Homo sapiens
ctgatctacaggatccttatcccggttctgggtattcggggtaagatatctgcccctcctggcgggcacggtggctgacggctgtaatcccagcactttgggaggccgaggcgggtggatcacgaggacaggagatcgagaccatcctggctaacatggtgaaaccccgtctccagtaaaatacaaaaaattagcagggcgtggtggcgggcgcctgtagtctcagctactcgggaagctgaggcagtggaatcgcttgta

SEQ ID NO: 639365 - DNA, 282 bp, Homo sapiens
tcgagtaagggccaaaagttcggtttctttaagaactgttcagttaggtggcccccactggtcttctgcttgatagagtttcgtagccaagtagatccactgttagtctgatgggcttccctttgtgggtaagctgactttaatctctcgctgcccttaacattttttccttcatttcaactttggtgaatctgacaattatgtgtcttggagttgctcttctcaaggagtatcttgtggcattctctgtatttcctgaatttgaatgttggccttatcgag

SEQ ID NO: 639366 - DNA, 2550 bp, Homo sapiens
  misc_feature (2511)..(2511): n is a, c, g, or t
tgctgctgactattgagatcaaatatatatatagtcatcatcatttcattcacttattcagccgatgtacactgaatgtatgttatgttcacacactgttgtaggcacgtggggtaccatagggaactaaagagattaaaaagagtattgctgtcctcaaatagcatacattctatcgggagcttcagcttctcatctataaaatggagatacctacttacaaagttgtgaaaatgagaaatgtgtataatgcagtgcctagcacatttgtagatgtttattcattggtaattattattttacaaatatttgtttgagatataaacagttgaacaaaagagaattcccattagtctaatcacttattgaccacacaaatttattgaaatttagacctcagaaacaaacctttaaaaataaaagcaacactgtttcctctgagatcattttttctttcttatgtgcagtggatccaaacttctacagcaaaaacttacttcttttaggaaagacatacttgaaactacacaacaaaaagcttgctgctttctggctaatgaaagccaaggactatccagcacacacagaggaggataaacaggagcctgattccccacgtgtcacattggtccgtgacgtttccccactaagggtgagacccattactgagaacaaaccccaggaatcccttacattctccttcccgtgcagcccccacctgattgttcttgtgtggattccagagctgactgctggattgagatgcttatttccccacgtacatgtatatcaaaggttctgtgtagcctcacctagtgcatcgtaatttcttacttgagggagaccagcaccctgaaaacgaactggaaagctgccttcttcagtcaaatctgctaaatcatacctacaatgaatgatattcaataacttctgtcatggcaaaatttatacagcagtggtaccatttgtaattctaatacttaactcttttatggtatacgcagtcctttttgaaggccagtttccctctatcacataacctgtcacatacattagaattttttttttaattctttaggcttgaaaattaccagagtgttcataataaggatttggaaaaggagtctattcaaccaagcagatctctgcctttctttcgtctttactatgaattctgaataaaatggagaacacactctcaatatgtagaaaaataaaattttggcaaaacaataattactgtttttctgtatgtacttagcagtgaaatatttataggcaacagattttaagaagtcagttccatggctattaaaaaatgtttaagttaatgaaatttacagtgcatattaaaagcatgatacaaatggaaatttaaaattttgtattaggaagcccagtttgctaaaagtagcattaatatcattcacatcagattttaatttgttacacatttttgtagttcagcaaaggcccctatgatgaaaaacaattaaaaagtgttatgacaaaaataattatctgtgtaaaaagggggagacccaaaagatttttcatatggttatttaattcagttaaatagaactgttatgaatttgagaggaatgaagatattcaaacactaacagaaaatcattagccttatattagagcattcaaatgcttatgtaactcttcaatccatctggcttcataaaaaccaaaattttgaacacaaaaaagtggcagagtttacattaccttttgtatgttcctaagtatgaaattgcatcaatttattatgaattaaatttgaaaagcatcacagatttaaaaacaaagtacaaaagagcctgattctttttaattccacaaatacctagcatctcaaagtaacatgtaaacaaacttctatgctgctcaatgaatccttccaatttcgataataaactaaatagtattggatctagtatatgactttcatgtgtaagttatggttctatccattactttaacaatattactgatgtaacagagaaaaattttcaactattgtatttatttaaaacaaactgacaagttcaagcacctgtcttcagaaaagccagcagcatttttttttttttaacatactcaaagtaagatttggcctaagcccttaatacctttctgaacagccatgcaactaaacaccctcaggagatgttacataagggagagaagaacatggagcaatttgcactttttcccctagataatattaacaaggtaaagcaaatccagatctttatgaatgaatggctgtcatgtttaatacacttggagctctataaaactagagccactatcatatatgtttatatagatatatatgtatttttaataaagtctctcacttgcttcaaaatttaaggatgatctttttcctggtcagtcatttcaagggaacaataaataaagtagaaaaggatgaactgttttgcatatttctgtggaagaacggaaaacatactttgagaggttcggaaaatncactgtacagaatgaacagcttatatacactatctgtgc

SEQ ID NO: 639367 - DNA, 2681 bp, Homo sapiens
  misc_feature (2642)..(2642): n is a, c, g, or t
taagacaggtcattttaaggacaaaaaatatagtcagctctactttatcaaattagttatgtttctagaaatcaaatgtcattagagaatgcattacaaaaacagtagcttaagtaggacaaaaagagtttcagacttaacattgtatgtaggaatttcaataataatggactcttaaaaattcactagtacaacgaataaattcagcttttgattatattttgtttttactaaaaatcactagttatgatttaagagaactgtcaaaatagctgagttacacgtgataatgttctttcctttctgcacatgatgttagtttggtacaagttctaaacagcaaccaagttattaccagaagtagtccatatattgtaatcttgatgattgaagtgttacgttcactttgggtgttaactctcactgttgaagaagtgaccattattttaagatgatttacttcctgacttaaatataatatagcagtagatctttgagacaatgcttttttaatattgtcttctttaatcttttttattatgtttgggctctttgtgtttttgacaggccttaggctactttcacagggcagaacaagtggatccaaacttctacagcaaaaacttacttcttttaggaaagacatacttgaaactacacaacaaaaagcttgctgctttctggctaatgaaagccaaggactatccagcacacacagaggaggataaacaggagcctgattccccacgtgtcacattggtccgtgacgtttccccactaagggtgagacccattactgagaacaaaccccaggaatcccttacattctccttcccgtgcagcccccacctgattgttcttgtgtggattccagagctgactgctggattgagatgcttatttccccacgtacatgtatatcaaaggttctgtgtagcctcacctagtgcatcgtaatttcttacttgagggagaccagcaccctgaaaacgaactggaaagctgccttcttcagtcaaatctgctaaatcatacctacaatgaatgatattcaataacttctgtcatggcaaaatttatacagcagtggtaccatttgtaattctaatacttaactcttttatggtatacgcagtcctttttgaaggccagtttccctctatcacataacctgtcacatacattagaattttttttttaattctttaggcttgaaaattaccagagtgttcataataaggatttggaaaaggagtctattcaaccaagcagatctctgcctttctttcgtctttactatgaattctgaataaaatggagaacacactctcaatatgtagaaaaataaaattttggcaaaacaataattactgtttttctgtatgtacttagcagtgaaatatttataggcaacagattttaagaagtcagttccatggctattaaaaaatgtttaagttaatgaaatttacagtgcatattaaaagcatgatacaaatggaaatttaaaattttgtattaggaagcccagtttgctaaaagtagcattaatatcattcacatcagattttaatttgttacacatttttgtagttcagcaaaggcccctatgatgaaaaacaattaaaaagtgttatgacaaaaataattatctgtgtaaaaagggggagacccaaaagatttttcatatggttatttaattcagttaaatagaactgttatgaatttgagaggaatgaagatattcaaacactaacagaaaatcattagccttatattagagcattcaaatgcttatgtaactcttcaatccatctggcttcataaaaaccaaaattttgaacacaaaaaagtggcagagtttacattaccttttgtatgttcctaagtatgaaattgcatcaatttattatgaattaaatttgaaaagcatcacagatttaaaaacaaagtacaaaagagcctgattctttttaattccacaaatacctagcatctcaaagtaacatgtaaacaaacttctatgctgctcaatgaatccttccaatttcgataataaactaaatagtattggatctagtatatgactttcatgtgtaagttatggttctatccattactttaacaatattactgatgtaacagagaaaaattttcaactattgtatttatttaaaacaaactgacaagttcaagcacctgtcttcagaaaagccagcagcatttttttttttttaacatactcaaagtaagatttggcctaagcccttaatacctttctgaacagccatgcaactaaacaccctcaggagatgttacataagggagagaagaacatggagcaatttgcactttttcccctagataatattaacaaggtaaagcaaatccagatctttatgaatgaatggctgtcatgtttaatacacttggagctctataaaactagagccactatcatatatgtttatatagatatatatgtatttttaataaagtctctcacttgcttcaaaatttaaggatgatctttttcctggtcagtcatttcaagggaacaataaataaagtagaaaaggatgaactgttttgcatatttctgtggaagaacggaaaacatactttgagaggttcggaaaatncactgtacagaatgaacagcttatatacactatctgtgc

SEQ ID NO: 639368 - DNA, 240 bp, Homo sapiens
cgctagtcctgtcagtatctgtggtgacttcagcttagacagtcttcatttccagccatgtgagtcctggctccagagccatctctgagactcgtactactggatgtttaactatcagatcattcaccaccatatgcctcccacaggccaacgggaaaacagacaccagaacttgggttgagggcactaccagaatgacactggtcagtatcagaccgcggcctgggtaccgagctcgca

SEQ ID NO: 639369 - DNA, 2709 bp, Homo sapiens
  misc_feature (2670)..(2670): n is a, c, g, or t
tagaaatcaaatgtcattagtgaatgcattacaaaaacataactaatttgataaaatatagtcagctctactttatcaaattagttatgtttctagaaatcaaatgtcattagagaatgcattacaaaaacagtagcttaagtaggacaaaaagagtttcagacttaacattgtatgtaggaatttcaataataatggactcttaaaaattcactagtacaacgaataaattcagcttttgattatattttgtttttactaaaaatcactagttatgatttaagagaactgtcaaaatagctgagttacacgtgataatgttctttcctttctgcacatgatgttagtttggtacaagttctaaacagcaaccaagttattaccagaagtagtccatatattgtaatcttgatgattgaagtgttacgttcactttgggtgttaactctcactgttgaagaagtgaccattattttaagatgatttacttcctgacttaaatataatatagcagtagatctttgagacaatgcttttttaatattgtcttctttaatcttttttattatgtttgggctctttgtgtttttgacaggccttaggctactttcacagggcagaacaagtggatccaaacttctacagcaaaaacttacttcttttaggaaagacatacttgaaactacacaacaaaaagcttgctgctttctggctaatgaaagccaaggactatccagcacacacagaggaggataaacaggagcctgattccccacgtgtcacattggtccgtgacgtttccccactaagggtgagacccattactgagaacaaaccccaggaatcccttacattctccttcccgtgcagcccccacctgattgttcttgtgtggattccagagctgactgctggattgagatgcttatttccccacgtacatgtatatcaaaggttctgtgtagcctcacctagtgcatcgtaatttcttacttgagggagaccagcaccctgaaaacgaactggaaagctgccttcttcagtcaaatctgctaaatcatacctacaatgaatgatattcaataacttctgtcatggcaaaatttatacagcagtggtaccatttgtaattctaatacttaactcttttatggtatacgcagtcctttttgaaggccagtttccctctatcacataacctgtcacatacattagaattttttttttaattctttaggcttgaaaattaccagagtgttcataataaggatttggaaaaggagtctattcaaccaagcagatctctgcctttctttcgtctttactatgaattctgaataaaatggagaacacactctcaatatgtagaaaaataaaattttggcaaaacaataattactgtttttctgtatgtacttagcagtgaaatatttataggcaacagattttaagaagtcagttccatggctattaaaaaatgtttaagttaatgaaatttacagtgcatattaaaagcatgatacaaatggaaatttaaaattttgtattaggaagcccagtttgctaaaagtagcattaatatcattcacatcagattttaatttgttacacatttttgtagttcagcaaaggcccctatgatgaaaaacaattaaaaagtgttatgacaaaaataattatctgtgtaaaaagggggagacccaaaagatttttcatatggttatttaattcagttaaatagaactgttatgaatttgagaggaatgaagatattcaaacactaacagaaaatcattagccttatattagagcattcaaatgcttatgtaactcttcaatccatctggcttcataaaaaccaaaattttgaacacaaaaaagtggcagagtttacattaccttttgtatgttcctaagtatgaaattgcatcaatttattatgaattaaatttgaaaagcatcacagatttaaaaacaaagtacaaaagagcctgattctttttaattccacaaatacctagcatctcaaagtaacatgtaaacaaacttctatgctgctcaatgaatccttccaatttcgataataaactaaatagtattggatctagtatatgactttcatgtgtaagttatggttctatccattactttaacaatattactgatgtaacagagaaaaattttcaactattgtatttatttaaaacaaactgacaagttcaagcacctgtcttcagaaaagccagcagcatttttttttttttaacatactcaaagtaagatttggcctaagcccttaatacctttctgaacagccatgcaactaaacaccctcaggagatgttacataagggagagaagaacatggagcaatttgcactttttcccctagataatattaacaaggtaaagcaaatccagatctttatgaatgaatggctgtcatgtttaatacacttggagctctataaaactagagccactatcatatatgtttatatagatatatatgtatttttaataaagtctctcacttgcttcaaaatttaaggatgatctttttcctggtcagtcatttcaagggaacaataaataaagtagaaaaggatgaactgttttgcatatttctgtggaagaacggaaaacatactttgagaggttcggaaaatncactgtacagaatgaacagcttatatacactatctgtgc

SEQ ID NO: 639370 - DNA, 2517 bp, Homo sapiens
  misc_feature (2478)..(2478): n is a, c, g, or t
tgtagattttggtaactgccaccataatcaagatacagacctgttccgtcatcacaaagatccccagtgctgtccctttacagtcacacccatctacctcctcctctcccccacccatccctaactctgacagcactaatctgttctccataattttgttatttcaacaatgttatacaaatggaatcatacagtgagaccctgtgatactttttttcactcaacataattcccttgagacctaagttctatcaatagtttgtttctttttacagttgactagtatttcattttatgggcataccatatcaaccatatgctgaggggcatttaggttattcctgatttttagctattacaaataaagctgctatgagcattatatgcaggtttttatgtctacatagattttatctctctgggatacatgcccaggagtgtggctcctgggtccttttatcttcatttttcccctttactctctgagggttaggtttcttctgcaagacatggtgccttcccaagattctgattctgtgcactaagtctcttccatttgacttcccaggagcctgattccccacgtgtcacattggtccgtgacgtttccccactaagggtgagacccattactgagaacaaaccccaggaatcccttacattctccttcccgtgcagcccccacctgattgttcttgtgtggattccagagctgactgctggattgagatgcttatttccccacgtacatgtatatcaaaggttctgtgtagcctcacctagtgcatcgtaatttcttacttgagggagaccagcaccctgaaaacgaactggaaagctgccttcttcagtcaaatctgctaaatcatacctacaatgaatgatattcaataacttctgtcatggcaaaatttatacagcagtggtaccatttgtaattctaatacttaactcttttatggtatacgcagtcctttttgaaggccagtttccctctatcacataacctgtcacatacattagaattttttttttaattctttaggcttgaaaattaccagagtgttcataataaggatttggaaaaggagtctattcaaccaagcagatctctgcctttctttcgtctttactatgaattctgaataaaatggagaacacactctcaatatgtagaaaaataaaattttggcaaaacaataattactgtttttctgtatgtacttagcagtgaaatatttataggcaacagattttaagaagtcagttccatggctattaaaaaatgtttaagttaatgaaatttacagtgcatattaaaagcatgatacaaatggaaatttaaaattttgtattaggaagcccagtttgctaaaagtagcattaatatcattcacatcagattttaatttgttacacatttttgtagttcagcaaaggcccctatgatgaaaaacaattaaaaagtgttatgacaaaaataattatctgtgtaaaaagggggagacccaaaagatttttcatatggttatttaattcagttaaatagaactgttatgaatttgagaggaatgaagatattcaaacactaacagaaaatcattagccttatattagagcattcaaatgcttatgtaactcttcaatccatctggcttcataaaaaccaaaattttgaacacaaaaaagtggcagagtttacattaccttttgtatgttcctaagtatgaaattgcatcaatttattatgaattaaatttgaaaagcatcacagatttaaaaacaaagtacaaaagagcctgattctttttaattccacaaatacctagcatctcaaagtaacatgtaaacaaacttctatgctgctcaatgaatccttccaatttcgataataaactaaatagtattggatctagtatatgactttcatgtgtaagttatggttctatccattactttaacaatattactgatgtaacagagaaaaattttcaactattgtatttatttaaaacaaactgacaagttcaagcacctgtcttcagaaaagccagcagcatttttttttttttaacatactcaaagtaagatttggcctaagcccttaatacctttctgaacagccatgcaactaaacaccctcaggagatgttacataagggagagaagaacatggagcaatttgcactttttcccctagataatattaacaaggtaaagcaaatccagatctttatgaatgaatggctgtcatgtttaatacacttggagctctataaaactagagccactatcatatatgtttatatagatatatatgtatttttaataaagtctctcacttgcttcaaaatttaaggatgatctttttcctggtcagtcatttcaagggaacaataaataaagtagaaaaggatgaactgttttgcatatttctgtggaagaacggaaaacatactttgagaggttcggaaaatncactgtacagaatgaacagcttatatacactatctgtgc

SEQ ID NO: 639371 - DNA, 246 bp, Homo sapiens
ctagaggatcccgtcacacgccgaagaacagactgatgatacctcacatgttgaccggctatgtgaactgcctatttcctatgctggggtttcggcgtgtgcatgcacacgccgaagtatccacactacatgaggttaccctgaggtcggtgtggacgaagttgttgcgcaacaacttcgtccactcagatctgcaacaacttcgtccattgtgacctttctgcgagtgtggagtctcggcgtgtg

SEQ ID NO: 639372 - DNA, 1833 bp, Homo sapiens
  misc_feature (1794)..(1794): n is a, c, g, or t
ggatatctataattgggtatgaaaagtggaagaccctgatgaattctccaaaacaaagctggttttgtctcttgtagggttctgtgtagcctcacctagtgcatcgtaatttcttacttgagggagaccagcaccctgaaaacgaactggaaagctgccttcttcagtcaaatctgctaaatcatacctacaatgaatgatattcaataacttctgtcatggcaaaatttatacagcagtggtaccatttgtaattctaatacttaactcttttatggtatacgcagtcctttttgaaggccagtttccctctatcacataacctgtcacatacattagaattttttttttaattctttaggcttgaaaattaccagagtgttcataataaggatttggaaaaggagtctattcaaccaagcagatctctgcctttctttcgtctttactatgaattctgaataaaatggagaacacactctcaatatgtagaaaaataaaattttggcaaaacaataattactgtttttctgtatgtacttagcagtgaaatatttataggcaacagattttaagaagtcagttccatggctattaaaaaatgtttaagttaatgaaatttacagtgcatattaaaagcatgatacaaatggaaatttaaaattttgtattaggaagcccagtttgctaaaagtagcattaatatcattcacatcagattttaatttgttacacatttttgtagttcagcaaaggcccctatgatgaaaaacaattaaaaagtgttatgacaaaaataattatctgtgtaaaaagggggagacccaaaagatttttcatatggttatttaattcagttaaatagaactgttatgaatttgagaggaatgaagatattcaaacactaacagaaaatcattagccttatattagagcattcaaatgcttatgtaactcttcaatccatctggcttcataaaaaccaaaattttgaacacaaaaaagtggcagagtttacattaccttttgtatgttcctaagtatgaaattgcatcaatttattatgaattaaatttgaaaagcatcacagatttaaaaacaaagtacaaaagagcctgattctttttaattccacaaatacctagcatctcaaagtaacatgtaaacaaacttctatgctgctcaatgaatccttccaatttcgataataaactaaatagtattggatctagtatatgactttcatgtgtaagttatggttctatccattactttaacaatattactgatgtaacagagaaaaattttcaactattgtatttatttaaaacaaactgacaagttcaagcacctgtcttcagaaaagccagcagcatttttttttttttaacatactcaaagtaagatttggcctaagcccttaatacctttctgaacagccatgcaactaaacaccctcaggagatgttacataagggagagaagaacatggagcaatttgcactttttcccctagataatattaacaaggtaaagcaaatccagatctttatgaatgaatggctgtcatgtttaatacacttggagctctataaaactagagccactatcatatatgtttatatagatatatatgtatttttaataaagtctctcacttgcttcaaaatttaaggatgatctttttcctggtcagtcatttcaagggaacaataaataaagtagaaaaggatgaactgttttgcatatttctgtggaagaacggaaaacatactttgagaggttcggaaaatncactgtacagaatgaacagcttatatacactatctgtgc

SEQ ID NO: 639373 - DNA, 199 bp, Homo sapiens
ctctgatctggtacatcagtcacttgcattctgggatggatttgtcaattcattaattaccgaacagaaattgacaaaccatcccagatcaagtaccgatgttcaggacaacagcattagtgtcaagtggctagcctatcaagattcccctgattactaggttacagcagtaaccacgcacacccaaacaatggaccac

SEQ ID NO: 639374 - DNA, 133 bp, Homo sapiens
gcgatctagaggatcccaaactcgtttctgtgcagtttacgtaaacttctcccttctgctataaaagcttctctttagcctccgtcaccaaacgcacttgtgtggtgccattccattcatcctggactataat

SEQ ID NO: 639375 - DNA, 158 bp, Homo sapiens
tgtgtggtgactctaaggatccaacgcgctgatacctcgcggatcttcccttctgtggtggcgaaaacaagctttgaaatggacagagaggaccgacagggactccagggcttattgaatcccgatcttaagaatgttaattataacaaaaaggtgtt

SEQ ID NO: 639376 - DNA, 132 bp, Homo sapiens
taaatgagcagaccaactcaaaaatagagaaaacagagaatatggaagtaactgatggtgacgacaaggaggtaaaagttaaagtaggtaatataacagaatctaacagataagtcagaagaaatagaaaca

SEQ ID NO: 639377 - DNA, 553 bp, Homo sapiens
ctgcgataatcagcacaggaaaaagatgtgagctggaaggctaaggctaagcatgactctcctattacacgttggtctgcctgcttcatattttctggcagctgattagatcgtgcccaacagatgacgggtggatctgcctaccccagtccactgactcaaatgtaaatctcttattggcaacatcctcacaggcccacccagggttaatactttgtgtccttcaatctactcaagtcgacactcagtattaaccatcacacatatgttgtagttcagcaaactgtgccagcaagggacaatatagctatttaaagaaacacagtaatgctatcatttagaacctcaacctgattggcgtccctggatcatagctcggcttcccctctctcaagtttacaagagcgttgtctgggaaaattcatcaacaaggttagaaatgagttctgggaaacttggctcactatagtccaggaaccaggccgaactacagcatgggccaggtactgaataaatggaaggagtatagttagggcagtaggtggctctaaac

SEQ ID NO: 639378 - DNA, 382 bp, Homo sapiens
  misc_feature (11)..(11): n is a, c, g, or t
  misc_feature (167)..(169): n is a, c, g, or t
  misc_feature (188)..(188): n is a, c, g, or t
  misc_feature (221)..(221): n is a, c, g, or t
  misc_feature (380)..(380): n is a, c, g, or t
ggggggggggngggggggggggggggggggggggggggggggggggggggggggggggggggggggggggggggggggggggggggggggggggggggggggggggggggggggggggggggggggggggggggggggggggggggtgggggggggggggggggggnnnggggggggggggggggggnggggggggggggggggggctgtggggggggggngtgggggggggggggggggggggggggggggtgggggggggggctggcgggggggcggcggggcggccgggggggctggggggggggcgtgtctgcctggggggagtgtgtggctgtggtgggttgggatagggtgggatgcgaggcgggggtggttgngg

SEQ ID NO: 639379 - DNA, 822 bp, Homo sapiens
tactttccttttttcctttctgggaggcatcacatgctgggggctggggtctttatgaatggttttaaccattttcatgggtgggaaagaatttaatattctatcgcagttggtacaattattatattttttctggcaaggaaaagggtgtaagtgtattgaaattaaacacaaagttcacttgtgtgttggaaaattaaatctttaattgtggaacttttataaaagagcaagtgcagataccccaatagacgtgggtgttaaagtgtgggtctacaggtggcaaaactccagtgtgtctcataacattatgtgttacaataagtgtgccgaggagttcacaggtgccccatgggtggactcttgggtattccagtctcaggtttaaaacacagcgggacaataaagagaagtggaacacttataaaaacaaaaaaaaagaaaaaaataaaaacaaaaagaaaaaaagaaaaaacaagaggaggagcgcgccgccccaaaaagacaccccacgaaggggccgccacagcagcaggacgcaccacagcggagagagaaggcgaagagacgagaggggcagcacagaagaggagagagcgtcagaaaaagaaagaggagggcgccagcggcgacgcatgactaaaacagcagggcgaccgagaagacgacaaccacagcaaagagccgagagaacacaacaggcgaggagagagcaaacacaccgcctatgcgggggagaaagagaaaagaggagcgaccaccacccacacgacagaaacagaagggccagcagggcaaaaaaagaactgagggcggaacaag

SEQ ID NO: 639380 - DNA, 803 bp, Homo sapiens
cgcagtggctcacgcctgtaatcccagcatttgggaggctgaggtgggtggatcacgaggtcaggagttcaagaccagtctggtcaagatggtgaaactctgtctctaccaaaaatacaaaaaattaatcaggtatggtggcaggcgcctgtaatcccagctattcgggaggctgaggcagagaattgcttgaacccaggagacggaggttgcagtgagccaagatcatgccactgcaactccagcctgaacgacagagtgagactccgtctcaaaaaaaaaaaaaagagggccaggcacgggggcctcacaccctgtaatccaagcatgttgggaggccaagggtaatgtggatacctgagggtctggagttgggagacccagcatggccaacattgtgattaccccattctctactaaaaatatacaaaatttagcccaggtgtggtggtacaaacctgtagtcccagctacttcaggaggctgaggaccaagagttgctttggccctggagacggaggtggggtgagccaagattccgcaccatgtgcgctcccaggcctggcaccaacaaggagtgaacttccctccgaaaaaaagcaacaacaagaaacaaaactttgggcgccgccagcggccgggaaaaggtctaaaaccactggggggcgcgggcccaaaggatatggacctgggccaaagggggccaagagcaccgggccaacatagtggggttcccccaaaaaaccggggcccgggcgttgaaccagggccggctcgctcaagagccggcacccccggcgggt

SEQ ID NO: 639381 - DNA, 976 bp, Homo sapiens
  misc_feature (36)..(36): n is a, c, g, or t
  misc_feature (73)..(73): n is a, c, g, or t
  misc_feature (98)..(98): n is a, c, g, or t
  misc_feature (121)..(121): n is a, c, g, or t
  misc_feature (162)..(163): n is a, c, g, or t
  misc_feature (170)..(170): n is a, c, g, or t
  misc_feature (177)..(177): n is a, c, g, or t
  misc_feature (191)..(191): n is a, c, g, or t
  misc_feature (193)..(193): n is a, c, g, or t
  misc_feature (198)..(198): n is a, c, g, or t
  misc_feature (207)..(207): n is a, c, g, or t
  misc_feature (215)..(215): n is a, c, g, or t
  misc_feature (225)..(225): n is a, c, g, or t
  misc_feature (282)..(282): n is a, c, g, or t
  misc_feature (291)..(291): n is a, c, g, or t
  misc_feature (308)..(308): n is a, c, g, or t
  misc_feature (314)..(314): n is a, c, g, or t
  misc_feature (345)..(345): n is a, c, g, or t
  misc_feature (352)..(352): n is a, c, g, or t
  misc_feature (416)..(416): n is a, c, g, or t
  misc_feature (431)..(432): n is a, c, g, or t
  misc_feature (473)..(473): n is a, c, g, or t
  misc_feature (477)..(477): n is a, c, g, or t
  misc_feature (488)..(488): n is a, c, g, or t
  misc_feature (514)..(514): n is a, c, g, or t
  misc_feature (561)..(561): n is a, c, g, or t
  misc_feature (564)..(564): n is a, c, g, or t
  misc_feature (630)..(630): n is a, c, g, or t
  misc_feature (632)..(633): n is a, c, g, or t
  misc_feature (637)..(637): n is a, c, g, or t
  misc_feature (656)..(656): n is a, c, g, or t
  misc_feature (674)..(674): n is a, c, g, or t
  misc_feature (931)..(931): n is a, c, g, or t
tggtgggcggtccttcctgtgactcgacccttgtantgatagttctttttgtttgcctccggtactgtgaggnaaggacacgactctttggtgaggtntgatggacatacattatctgagnaaagaaactaccaggtgacaaacagcatgtttggtgcttcnngaaagangtttgtngagggggtcgacantnactancatgacganaacatgtnctacagccantcttctatgtttccacatcggtcagaaaaagatatgctggcatcaccatctacatcnggtcagctntctcagtttggggcaantttatncgggcaacaaagtgcactaggccttccaatnagggggntgagcaacaatacccctcagttaaatcgcagcttatcacaatgtgcatctcttgtttccgttcnatcgtcacgccaacnncaggggtaccaacaatgtcacttcacacgcctccatctccnagcnggggtattttncctttttttcctaggaatatgatganccactcccaggttggtcagggcattggaattcctagcaggacaaatngcntgagcagttcagggttaggtagctccaacagaagctcgccaagcataatatgtatgccaaagcagntnntttntttttttttttttactgtnaacagtatgtctggattnggaatgaacaggaatcaggcatttggaatgaataactccttatcaagtaacatttttaatggaacagacggaagtgaaaatgtgacaggattggacctttcagatttcccagcattagcagaccgagacaggagggaaggaagtggtaaccaactccattaataaaccccttggctggaagagctccttatgttggaatggtaacaaagccagcaaatgagcaatcccaggacttctcaatacacaatgaagatttncagcattaccaggctcagctataaagatccacatcagtaatgatg

SEQ ID NO: 639382 - DNA, 148 bp, Homo sapiens
cgctcggacgaggactacctgtaccggtaggacgctgccgcagttccacagggacggtgcgctcacccacgctcaacgtggccttctcccgggagcagtcccacaaggtctacgttccagcacctgctaatagcaacgaccgatagca

SEQ ID NO: 639383 - DNA, 339 bp, Homo sapiens
agcctagaggatccccgctctctctgtggggcaggtggccaggaagaggagtggtggggcggctcaagtcttggttggcagagtccgacctctcaccaccaataccagattatccgggggtagggtttaacacgcagatctgtgactccactccggagccgggttctcgggggatgcaacccttaaattggcgttttttaatgaccctccctctgatttaagtacggggatacggctgaccgggtgctgcctggccaccctttacatgctgtgtcattggggttaagacattggacaacttactaatcttctgactatgtgtccccacagagagagcgt

SEQ ID NO: 639384 - DNA, 285 bp, Homo sapiens
  misc_feature (1)..(1): n is a, c, g, or t
  misc_feature (11)..(11): n is a, c, g, or t
  misc_feature (19)..(19): n is a, c, g, or t
  misc_feature (32)..(32): n is a, c, g, or t
  misc_feature (44)..(44): n is a, c, g, or t
  misc_feature (47)..(47): n is a, c, g, or t
  misc_feature (50)..(50): n is a, c, g, or t
  misc_feature (54)..(54): n is a, c, g, or t
  misc_feature (76)..(76): n is a, c, g, or t
  misc_feature (104)..(104): n is a, c, g, or t
  misc_feature (156)..(156): n is a, c, g, or t
  misc_feature (158)..(158): n is a, c, g, or t
  misc_feature (163)..(163): n is a, c, g, or t
  misc_feature (169)..(169): n is a, c, g, or t
  misc_feature (171)..(171): n is a, c, g, or t
  misc_feature (178)..(178): n is a, c, g, or t
  misc_feature (191)..(191): n is a, c, g, or t
  misc_feature (196)..(196): n is a, c, g, or t
  misc_feature (213)..(213): n is a, c, g, or t
  misc_feature (216)..(216): n is a, c, g, or t
  misc_feature (232)..(232): n is a, c, g, or t
  misc_feature (235)..(237): n is a, c, g, or t
  misc_feature (242)..(242): n is a, c, g, or t
  misc_feature (257)..(257): n is a, c, g, or t
  misc_feature (278)..(278): n is a, c, g, or t
naaaaaaaaantttaaaanggggaaaaaaaanagggaaaaaaanttnggnaaanaggtttaaaaaaaaaaaaaaanaaaaaaaaaaaaaaaaaaaaaaaaaggnaaaaagaaaaaaaaaaaaaaaaagggggcaaaaaaaaaatctcctttccttnanaaggnttaaanangaaatgnaaaaaaaaaaaanttttnaaaaaaaaaaaaaaaanggnaaaaaaaaaaaaaaanatnnnaaaanggccttcaaaaaaanaaaaaaaggggggggggaggnaaaaggg

SEQ ID NO: 639385 - DNA, 102 bp, Homo sapiens
atctaaggcgtgggtaagaactgcattcttgcattcttgcattaaaaaatattctttttaccgcaatttagtaatgaagacctaacagtagcaaaacttgaa

SEQ ID NO: 639386 - DNA, 139 bp, Homo sapiens
aagatcacaccactgcactccagtctgggcgacagggcaagattccatctcatacaaacaaacaaacaaacaaaaaacaggatgtactactattttgatgtctacaacatctaggaccgcaaaaaaaaaacacctggag

SEQ ID NO: 639387 - DNA, 904 bp, Homo sapiens
gcggcagctggagtaggagtgctgatgggcaagactgcggtcggccggcacagccgcggtagtgctaggcaagcccacggagtcacgccggcctcagccagtctgcgaacctctcgcccccgccacccctgatccgccggcccctgccgccgagtggtccggggaggcctaatctgcaccaccgccgggctcctggggcacgcgacccgaagcggaacatgtcggcagtccgcggaccgcgcacccggacccatggcccgatcgcgcgaccggacaacatgatgagaggagatcgacaggtaccaggacgccacaacgccgcctccatctctgacggagaatgtgaagacccgggaggagaagcagacgggagcttggccggaagggatccctgcaaaaatggaaagatgggtagacatgaaacaccaggaaacccaagacagacacaacgcaatgggccggaacaaggtggatggacgaccaaaacggctacccaccaacatggacaagcagcacctgaagagaagccacagacagcaccagacaaggaagcagctgatgactagaccagctgacatactccaacaccgggaaaacgccgctagagcgatcaaaacaagctaagaagcgacagggtgcaggaaggtacaggtaagaagcatacccgacacgacgaccacaccaaatcccaaaagacaggacaccagagcacggcgcaggcaaagaccacgccgacacacaaagaggagcgaacgaaaacgcgcagcgaaagacagcaagcagcgcaaccaaggcggagccagcaacaaaacacaaagataaacagcgccagcaccgccagagagcagcacacgacaacagaaaagaagatacaaagaaaaaaaaacaaaaagaaaacgacaga

SEQ ID NO: 639388 - DNA, 2751 bp, Homo sapiens
taagacaggtcattttaaggacaaaaaatatagtcagctctactttatcaaattagttatgtttctagaaatcaaatgtcattagagaatgcattacaaaaacagtagcttaagtaggacaaaaagagtttcagacttaacattgtatgtaggaatttcaataataatggactcttaaaaattcactagtacaacgaataaattcagcttttgattatattttgtttttactaaaaatcactagttatgatttaagagaactgtcaaaatagctgagttacacgtgataatgttctttcctttctgcacatgatgttagtttggtacaagttctaaacagcaaccaagttattaccagaagtagtccatatattgtaatcttgatgattgaagtgttacgttcactttgggtgttaactctcactgttgaagaagtgaccattattttaagatgatttacttcctgacttaaatataatatagcagtagatctttgagacaatgcttttttaatattgtcttctttaatcttttttattatgtttgggctctttgtgtttttgacaggccttaggctactttcacagggcagaacaagtggatccaaacttctacagcaaaaacttacttcttttaggaaagacatacttgaaactacacaacaaaaagcttgctgctttctggctaatgaaagccaaggactatccagcacacacagaggaggataaacagatacagacagaagctgctcagttgcttacaagtttcagtgagaagaattgagaacttttcagagaagatttatgaaatagctaataaacattgccttttcttttaattctaaacttaatatatgaactataactgttctacggctttttaaatgttgtgaccatttaaccgtgtaaatataaaatattctaggcttcttcacaaataatagggtaaaataaataatcgccataagagtggtagaaataaatctccatggctcaggcaaagagattattttgcatcctggataccagcaatgcaaaatggtatgagatttctaaggattgatcacattgggatgggagatcaagcaaagaaatatttgtagaggaggggaaatggatctataggggatatacagggggatggattttcaaattggattgattctaagttgaaatcttgaagagaaggtgtggtgacagtggttaggatgttgtgggttcctgacataaagtagttaaatgatatatcttggagctaacctgtgtaagtaaagaactaagtaaggagatgactaaaaatggagtagtttccttttttatttttttgagacagagtctcactttgtttcccaggctggtgtgcagtggcacaatctcggcccactgcagcctccgcctcccgggttcaagtgattctcctgccttagcctcctgagtggctgggattacagggttgtaccaccacactcggctaacttttgtatttttggtagagatggggttttgccatgttggctaggctggtctcaaactcctggcctcaagtgatctgcccgccttggcctcccaaattgctgggattacaggcgtgagccaccgcacctggccagtttactttaaatgtggtgtagtctcatggtaaactgaatttgtcatcagatgcaaagttctattccctaatggaatggaaggaacacaaaacttaagagtgaaatggaatactaagatgtttttaaataggcaggactatgctactcacttgaggctggagtgccaccactgcaaaatctttttaagttttgtaaaaaggagcatcttgaatccacttagataaagagagactgtgtgtgtaggtggatttttcccaaaggatttgggaattgtaatgttacaatgaactgtatggatatgtttgtcatgtacattttcaaacaaaaaggaaaactgaaagtagtgatctttgtatacccatctcttagattcagtgattttgctatataggttgtgtatcccttatctgaaatacttgggactagtagaagcatcttggatttgggatgtttttccaaattttggaatacctgcatacacacaataagatatcttggagatgggacccaagtttaaacacaaattcacttgtttcatatataccttatgcacatagcttgaaggtaactttatataacattatttttaataattttgtgcattgagaccaagtttgcataccttgaaccatcagaaagcaaaggtgtcattatctcagccactcatgtgggtaatttgtggttggttgatgtcaccatcattcctgactgaatgtatatgctaccaataagcagttattttcttatacttattcatgcataagtacttaacagtaaaaaatatgacataactcgcacaggaacaaggatggcaaaaaaaaaaatatgacacaccactgatacagtgaaaaaataatgtggtcagggtagctaggcaacagtagcatcaccagaaacctgtatcagctgttaaacggcaacaacaatggcaggctttcagtttcccacttaatgatgctgtattttaaaaggttattgtatactgtaattttatttttgtaggtgaagagaaacagaagcagctgaagggccaggaagtgggtctttctagggatgtggcattctgctggatggctttttaaaatgggttttttcctttagggagaccgaataaactgtgttgtgcacctgcaaaaaaaaaa

SEQ ID NO: 639389 - DNA, 2395 bp, Homo sapiens
ggtcgacgcataatattgttgaaaacaagtgtgttcatttcaagtgtaaattgattgacatttatatttctatataggaaataatttagttactatcaccaggtggatgttacgggttgcctgctacaatgcagaattattcctgtttgacacacatggcagatcgagttaacatttctaaaacataaaagtcatgggatgtgtactaaagtggaagagctgagagtctcatctggtcactgtcaagacattttattgttataatgtcctatctggtttttggaaactcttagaaaccccactttataaacttaaatttcacaagttagtctcttagctctcctgtttacttataacatgtatttttccattttagatacagacagaagctgctcagttgcttacaagtttcagtgagaagaattgagaacttttcagagaagatttatgaaatagctaataaacattgccttttcttttaattctaaacttaatatatgaactataactgttctacggctttttaaatgttgtgaccatttaaccgtgtaaatataaaatattctaggcttcttcacaaataatagggtaaaataaataatcgccataagagtggtagaaataaatctccatggctcaggcaaagagattattttgcatcctggataccagcaatgcaaaatggtatgagatttctaaggattgatcacattgggatgggagatcaagcaaagaaatatttgtagaggaggggaaatggatctataggggatatacagggggatggattttcaaattggattgattctaagttgaaatcttgaagagaaggtgtggtgacagtggttaggatgttgtgggttcctgacataaagtagttaaatgatatatcttggagctaacctgtgtaagtaaagaactaagtaaggagatgactaaaaatggagtagtttccttttttatttttttgagacagagtctcactttgtttcccaggctggtgtgcagtggcacaatctcggcccactgcagcctccgcctcccgggttcaagtgattctcctgccttagcctcctgagtggctgggattacagggttgtaccaccacactcggctaacttttgtatttttggtagagatggggttttgccatgttggctaggctggtctcaaactcctggcctcaagtgatctgcccgccttggcctcccaaattgctgggattacaggcgtgagccaccgcacctggccagtttactttaaatgtggtgtagtctcatggtaaactgaatttgtcatcagatgcaaagttctattccctaatggaatggaaggaacacaaaacttaagagtgaaatggaatactaagatgtttttaaataggcaggactatgctactcacttgaggctggagtgccaccactgcaaaatctttttaagttttgtaaaaaggagcatcttgaatccacttagataaagagagactgtgtgtgtaggtggatttttcccaaaggatttgggaattgtaatgttacaatgaactgtatggatatgtttgtcatgtacattttcaaacaaaaaggaaaactgaaagtagtgatctttgtatacccatctcttagattcagtgattttgctatataggttgtgtatcccttatctgaaatacttgggactagtagaagcatcttggatttgggatgtttttccaaattttggaatacctgcatacacacaataagatatcttggagatgggacccaagtttaaacacaaattcacttgtttcatatataccttatgcacatagcttgaaggtaactttatataacattatttttaataattttgtgcattgagaccaagtttgcataccttgaaccatcagaaagcaaaggtgtcattatctcagccactcatgtgggtaatttgtggttggttgatgtcaccatcattcctgactgaatgtatatgctaccaataagcagttattttcttatacttattcatgcataagtacttaacagtaaaaaatatgacataactcgcacaggaacaaggatggcaaaaaaaaaaatatgacacaccactgatacagtgaaaaaataatgtggtcagggtagctaggcaacagtagcatcaccagaaacctgtatcagctgttaaacggcaacaacaatggcaggctttcagtttcccacttaatgatgctgtattttaaaaggttattgtatactgtaattttatttttgtaggtgaagagaaacagaagcagctgaagggccaggaagtgggtctttctagggatgtggcattctgctggatggctttttaaaatgggttttttcctttagggagaccgaataaactgtgttgtgcacctgcaaaaaaaaaa

SEQ ID NO: 639390 - DNA, 83 bp, Homo sapiens
catggatttgctggtgcagtacaactaggcttaatagggaacacactaggcgttaatagggacatgttcataattcagcagga

SEQ ID NO: 639391 - DNA, 1095 bp, Homo sapiens
gaggcggaagaggtgctgtgcaggaggcgggcgggcgcggttctttccggaaggattgaatctcctttagccccgcccgcctccgtagctgcctgaagtagtgcagggtcagcccgcaagttgcaggtcatggcgctggctgctcgactgtggcgccttctgcctttccgacgtggagccgccccggggtctcgtctccctgcggggacttcgggcagccgcgggcattgcggcccctgtcgattccgcggcttcgaggtaatgggaaacccaggaactttcaaaagaggccttttactctcagctttgtcgtatttgggttttgaaacttaccaggttatctctcaggctgctgtggttcatgccacagccaaagttgaagaaatacttgaacaagcagactacctgtatgaaagcggagaaacagaaaaactttatcagttgctaacccaatacaaggaaagtgaagatgcagagttactgtggcgtttggcacgggcatcacgtgatgtagctcagcttagcagaacctcagaagaggagaaaaagctattggtgtatgaagccctagagtatgcaaaaagagcactagaaaaaaatgaatcaagttttgcatctcataagtggtatgcaatctgccttagtgatgttggagattatgaaggcatcaaggctaaaattgcaaatgcatatatcatcaaggagcattttgagaaagcaattgaactgaaccctaaagatgctacttcaattcaccttatgggtatttggtgctatacatttgccgaaatgccttggtatcaaagaagaattgctaaaatgctgtttgcaactcctcctagttccacctatgagaaggccttaggctactttcacagggcagaacaaggaaagacatacttgaaactacacaacaaaaagcttgctgctttctggctaatgaaagccaaggactatccagcacacacagaggaggataaacagatacagacagaagctgctcagttgcttacaagtttcagtgagaagaattgagaacttttcagagaagatttatgaaatagctaataaacattgccttttcttttaattcta

SEQ ID NO: 639392 - DNA, 856 bp, Homo sapiens
  misc_feature (711)..(711): n is a, c, g, or t
taagacaggtcattttaaggacaaaaaatatagtcagctctactttatcaaattagttatgtttctagaaatcaaatgtcattagagaatgcattacaaaaacagtagcttaagtaggacaaaaagagtttcagacttaacattgtatgtaggaatttcaataataatggactcttaaaaattcactagtacaacgaataaattcagcttttgattatattttgtttttactaaaaatcactagttatgatttaagagaactgtcaaaatagctgagttacacgtgataatgttctttcctttctgcacatgatgttagtttggtacaagttctaaacagcaaccaagttattaccagaagtagtccatatattgtaatcttgatgattgaagtgttacgttcactttgggtgttaactctcactgttgaagaagtgaccattattttaagatgatttacttcctgacttaaatataatatagcagtagatctttgagacaatgcttttttaatattgtcttctttaatcttttttattatgtttgggctctttgtgtttttgacaggccttaggctactttcacagggcagaacaaggtaaggtatttttgattacacatattaatatagttaaaattgtatgaatgctgaatatatactataatagcaatgtctaaagcagttgtttattctgttatacttatttttgngctagatactgtaaaacaatttttaaagtctttattcagtaaagatcacctgaatgacaaataggctgctattgaacttagagctgcagttctggaatgtctatcatttgatggaattctgcttcctttgtgagagcagtctctg

SEQ ID NO: 639393 - DNA, 993 bp, Homo sapiens
  misc_feature (1)..(1): n is a, c, g, or t
  misc_feature (12)..(12): n is a, c, g, or t
  misc_feature (444)..(444): n is a, c, g, or t
  misc_feature (455)..(455): n is a, c, g, or t
  misc_feature (480)..(480): n is a, c, g, or t
  misc_feature (524)..(524): n is a, c, g, or t
  misc_feature (531)..(531): n is a, c, g, or t
  misc_feature (630)..(630): n is a, c, g, or t
  misc_feature (784)..(784): n is a, c, g, or t
  misc_feature (790)..(790): n is a, c, g, or t
  misc_feature (793)..(793): n is a, c, g, or t
ngttctcgagcntctcggagcatgttggctgtgctgtgcaggaggctgaagtagtgcagggtcagcccgcaagttgcaggtcatggcgctggctgctcgactgtggcgccttctgcctttccgacgtggagccgccccggggtctcgtctccctgcggggacttcgggcagccgcgggcattgcggcccctgtcgattccgcggcttcgaggtaatgggaaacccaggaactttcaaaagaggccttttactctcagctttgtcgtatttgggttttgaaacttaccaggttatctctcaggctgctgtggttcatgccacagccaaagtgcggcaatattagaacccaaggaaggaaaaactggcaaagttgtcatatgccaagtggccattgcctcctgaaatgaaggtaggttcacttggtctctcctaagcagaagagantgtccaggaantaaaatatttaaaaaaccattgaanatccaacaaaccccagccttgaggtgcgcatggagtgcgtgggntaagaanggaatcaagtagcagcattcagaagcagtcctgggttcatcctgatgaggtctctcattcagggagaggtggctttcccatgctgggagggaggtgganggaggcatgacttagacattggtggtggtctccttagcagcctggatgctgttcatctccatgatgccatccttcccagatctatctgcaccatgtgcctgcctttttaaaggccatgtgatatcctcaaaaagccctgccatgggtctcatgnactttngangaacggaaccggtcccccaacggggatgaaggaagctggggaagataataaaaaatacggccccaaataaaaggcgacaggggaaaaagcggccataaaagagggggcaaatggagcaccggcattggaccatggggggggccccgtgaagagtggcaaaaacgcgagggccggccctaggggcaaaaaaaagccgaaaa

SEQ ID NO: 639394 - DNA, 460 bp, Homo sapiens
ttgtcagcgtatccttaggtctcagcatagaaggagagtagagtcatgttaccctgtggtttctggggtcgaggcactgaagagtcagcacctgctcctcctgtggagtacccctggtgacagagctcagctggcagctgctcatcactaacgaatcccagccaccggcacctgctgctgcttgcggatcttgttgatgagttccatgtactggcccatggtatctactgggccgtagaccgcatcatgtctgttcccaaacactgcgggagcccctggtgtgtggctgcctagaaaactctgtaggaactcgagcagcagactccagcagtcactagctaccaaacaggagccatactccaccttggctgccaaaggtagaggcggccgtatagtaagtctcacagtccacacaaaatgttcctatgcttatctgctggaaatactttgggtaccgagc

SEQ ID NO: 639395 - DNA, 843 bp, Homo sapiens
taagacaggtcattttaaggacaaaaaatatagtcagctctactttatcaaattagttatgtttctagaaatcaaatgtcattagagaatgcattacaaaaacagtagcttaagtaggacaaaaagagtttcagacttaacattgtatgtaggaatttcaataataatggactcttaaaaattcactagtacaacgaataaattcagcttttgattatattttgtttttactaaaaatcactagttatgatttaagagaactgtcaaaatagctgagttacacgtgataatgttctttcctttctgcacatgatgttagtttggtacaagttctaaacagcaaccaagttattaccagaagtagtccatatattgtaatcttgatgattgaagtgttacgttcactttgggtgttaactctcactgttgaagaagtgaccattattttaagatgatttacttcctgacttaaatataatatagcagtagatctttgagacaatgcttttttaatattgtcttctttaatcttttttattatgtttgggctctttgtgtttttgacaggccttaggctactttcacagggcagaacaagtggatccaaacttctacagcaaaaacttacttcttttaggaaagacatacttgaaactacacaacaaaaagcttgctgctttctggctaatgaaagccaaggactatccagcacacacagaggaggataaacagatacagacagaagctgctcagttgcttacaagtttcagtgagaagaattgagaacttttcagagaagatttatgaaatagctaataaacattgccttttcttttaattcta

SEQ ID NO: 639396 - DNA, 323 bp, Homo sapiens
tggcggagcttaaactccaattctggcggtgcttaaatttaatctgaatggtatcattcaccttgaatgaggggatcgtggtaccggatgcgtgcggcgcactcatgatctcaccagtatgaggtgattcctttcgtgcccactaaagatctttctcacgtttgcacaacttgtacttggcctcctcaggtgtaatacgatgtacacgcaatagcgacccttggtgtcatatatcatcacgtaatatcatctcccgtcttgtcaatgctgatgacatccatgaatccagcagggtaggttatatcagttcggaccttgccatc

SEQ ID NO: 639397 - DNA, 518 bp, Homo sapiens
acgctgcaccgcgcgttcaacaattctcgtgcctagcctcctgagtagctgggactacaggcgcgtccccccacacctggctaatattggtatatgtaaagagacgggttatgccatgtatggcgaggctggcctcgaattcctgacctcaagtgatctgcccacctcagcctccccaagtgctgtgattacaggtgtgagctaccatgctcagcctataatagtgtctatctaatgtctcttaatgcggtatggtggatgacttccttatatccatcttatattaaattaggcctttttatggaggataatagaaacgttatctataataaatttggcatgtataactccagaaactattttataattttcatttttggactgggatctccatgtcttgtatgtatgatttgtgcctattttggtttgataacttcttgtttccttttttatctaatggtgcatccgtaactaccttttttaaatgtcttgtcaacgtacagctgtcttcatttgcc

SEQ ID NO: 639398 - DNA, 150 bp, Homo sapiens
ttatttgaagtgtagtggtctgctgtgcagccagaagtcctgagagctgtcttcatgggtggttcctggttggagccctgaagggagagtttctgcctttgtccacaatggccctggggggtaagtggcctgtgtggtctacccctatta

SEQ ID NO: 639399 - DNA, 830 bp, Homo sapiens
ttgtaacgccctcaaagttgtccgaaaaccagtccttgctgaggatgcccccctgggagaacatctggtcgtgggctccatctgcctgtcatgtcactccacttcctgatcctctatgtcgaacccttgcactcatcttccagatcacaccgctgaacgtgacccagtgctgatggtgctgaaaatctccttgccccgtgattctcatggatgagacgctcaagtttgtggcccgcaatacctggaacctgcaatactggagtaaccgttcctaaaccatttggcagaactgtaacgggtgtcggttgcgtgcatgtgcgtttttagccaacacatctaccaaccctgtgcatgactgatgttggggacaccacgacaacgtaaaaaacttcccaatcacttgcgtggtatgtggcggaactgtgtattaccaatggggtggtaagcttttaaatcacacatactgattacagatgtaacaactttagcttaatcagaaagctctccagagaagttggtttctttggctgcaagaggaatgaggctctgtaaccttatctaagaaccttggaacgcccgtcagccaaagtcgccacattttctctagcaacatgtcatagctttatatacatgttccgtattccattgtaaatggcgtgccttcgggttggtaagtagcaagatccctccttcaggtggacattggaccatgctacttttaattggcctgacaagttgttattataaaattccttaacaccttagggtgtgctggtcacatgtaggccccagtcaagcagaattcagggggggcgaacggtatcgcagga

SEQ ID NO: 639400 - DNA, 476 bp, Homo sapiens
  misc_feature (395)..(395): n is a, c, g, or t
  misc_feature (402)..(402): n is a, c, g, or t
  misc_feature (425)..(425): n is a, c, g, or t
gctaagctcttagcttgcattcccagcattactgatcagttctcctagctataaaatttaaaagaaactatagctttaaccatgtttctaacttatactaacaaaccatggcacagtgtgtagtaaattcctcttataattccaactaatttgccattgtaaataagtaaacatttggcttttcaaataatttcatagcagctgggcttatctgtagaatcctagcttttcttcactcttgattctaggctgttccaggaagaaaataattagggattaatacctaaaataattctccttctcaataatgtcactttgggactgatagcattatttgcattttaaaacaaaggctgggtgcagtggcttatgcctgtactctcagcactttgggnggctgangtgggaggatcgcttgagctcangagtttgaggccagcctggggaacatagtgagaccctgtctttacatttaa

SEQ ID NO: 639401 - DNA, 153 bp, Homo sapiens
  misc_feature (1)..(1): n is a, c, g, or t
naatggtcgagaattcctgcgcattgtgcagtgctggctctgtgagagggcagctgtggcttctaggtgccctgagtagcatcctgtgacccctccccgagtgtactggcactcccagtggtacctgagctctgaattctgtaatcactggtc

SEQ ID NO: 639402 - DNA, 105 bp, Homo sapiens
ggcctgtggcccaagcgtgctgtggcttcggggagttggaagttgaggcaggagccttccttacaattcgccatgagtttccttattggcttcaggatatatgta

SEQ ID NO: 639403 - DNA, 221 bp, Homo sapiens
atttttttttaaacagccccccttttgactccccgcccgccccaatccattatttttttttcccttccggggcccacccttaaagctggagtggttccttcccctcctggattccggggaacaaaggcagccccccaggaggggggggcccttttttccccggcctgggggtggtggaggaaggggggttggaccaataaacggccctttcccaatgtcca

SEQ ID NO: 639404 - DNA, 557 bp, Homo sapiens
ctcaacgctttatactttctaccagtgaggacacagtgctcctgctctctggaggatgcagtattcaaggcaccctctgggcagcagagaccaggccttcaccaaacacaaaacctactagcacctcaatcttggactcccagcctacagaactatgagaaattaaatttctgttctcaataaattatccaggctcaggtattctgttatggcagcacaaaacacactaagacacctataaaccaatctaaccatgagaaaaacaacagacaagcacagattagaggacacactataggatactgggctagtattcttcaagactgtcaaggtcatttcataatgtacatatatatcaaaacatcgagtttttttacgccttaaatatatgccatttgaatttgccaactatatcccaataaagccggaaaataaccataaggctcattaaaaactgaaacagtgatctgacatgatggggagacatgataagtaagtgcaatttagctggttagcaatttagtggtagcttggatataatcctggaacagaaaggg

SEQ ID NO: 639405 - DNA, 644 bp, Homo sapiens
ctcgggccgctcctcacgaggagggggacgccacccacctgcgccgtccttcgaggattattggcccgcgccctctcaagcgcgcccgtgtggatcgcccaccgtccttgtcgccccaaggagggccccccgggagtgtcgttcccggcgccgccgcttgcgtgcccgcgatggtcgccaatattgaagcgatcctctggcgcggatccccagaaggcgctctacgaacccccgggttttgtccagactacttccagcggcccgcggtttccttttagagccgcccccttggcgttgtcgggccagccaccgcggattcacgccaagcgcccttggtggcccccgggcgttcccgcggagtgttctggtgtccagcacaacgtgaagagggtctggagaatcctgcttgatctacgcccaccaatttattccgtcagccagcttcgtgacacccacagcagttctctcccaagaacccccacaccccttcttggtgatagagtctcccccccgtgcggcctccttagaggacttcaccacccctactgccgcgccgggccacccactgacacgagaatgagaatggcggcccaccattggggaacgctctgtcgctttaaaaaaataacccccccaacaaaaca

SEQ ID NO: 639406 - DNA, 339 bp, Homo sapiens
  misc_feature (299)..(299): n is a, c, g, or t
gctctgcaccccgtgttcttctgcagaacacggcctcctttgtgttcccagcatggcagtgagcaagagaaggctggggagaaaccggggtggccagccccctccccgtcacccccattcacagcaggactgcagcttcaagggtgtcgtggggctcgggcagaatatggggttcagggtggctgctgggggccctaggcattgcttgggagatggctcattgcgggtggctctacgtggttgaccggggccctgggaggaaggcgtctgggggctcctgcgtggcttcagtgagcgtngcagaggacaggtctacacgggccaggcgctgtttttgct

SEQ ID NO: 639407 - DNA, 167 bp, Homo sapiens
  misc_feature (83)..(84): n is a, c, g, or t
  misc_feature (86)..(86): n is a, c, g, or t
  misc_feature (165)..(165): n is a, c, g, or t
cactgcctctattagaggtgatgggctgtcgggaggggaagggcagaggtgccattgtgtcctcttgttttagtgtcacttgnntnccctggatcggcccctgagggaggggcagctggatgtgtattacaccgtgttagtgatcctctccagaaccgatcagcntg

SEQ ID NO: 639408 - DNA, 107 bp, Homo sapiens
taccggcaggttgtactgaggttagagttatcagtgtgcccagccagccatgatttcctcatctatacacctagcgaatcactaggcactggcacagtgtagcagga

SEQ ID NO: 639409 - DNA, 546 bp, Homo sapiens
attgcctgctcctagattctgcatgcgcattcacactcctttgcctgagtttaggcaaggacccaaaccaaccatcctaactttcacagaccatacaatctattgttggatccttacatatcctgctaggtatgcgggcggctttctattcatagcattgactcacaggcctctaacacattgtgtgtcctaaccctatgacaagcatgaccagggagccagctcacatgcacaccatggccaatcgatttgctttgtggggtggcctgactaccctagataatgggccgagggcctccaaagtccatcccatgcaacaaaaatctgaagagccttagtatagctctcagtgagatttcttaggttgcacacaggcacaggtgccattcatctaatggatctatctatgatctatgtgtactatcagggctacttaaccacggaccgatggacgactgttcttctagattggcactggcacctttgtgcatattgatgggagatcctgaggctcccatcgctgggctgaccttgaatcatgaaaca

SEQ ID NO: 639410 - DNA, 343 bp, Homo sapiens
tttgggttttcccccccccccccgtttttggccctggggtttaggccaaggattcagggtttttcttttttccaaagtttcccccaaaaaacaaccacccgcctttgttttttttggggggcccccccctgggcccccggggtttgggggggttcccctctggggaaaagggggggtttttccccgttttagccccccccccccgggggggttttaggaaaggcccccccttttttggggggccccctttttttaataacctttttcaaaggaataaattttttctggcgccttggggctttgtgttttttttttcctggggccctttattaaacccctttta

SEQ ID NO: 639411 - DNA, 324 bp, Homo sapiens
aaactgtgtacatcaggtatcagcatagtacccaacaggcagtattcaatcttcatcctcttcccaaactccacccataagcccgtgtctactgttcccttctttgagtccatgtgtaatcaatgtttagctcccacttataagtgagaacatgggatatttcattttctgtacctgcattaattcacttaggataagagcctcagctccatctatgttgctgtaaaggacacagtcttgttcttttttatggctgcatagtattccatggtgtatatgtaccaaattttctttatctggtctctgctgatgggagaagatgcg

SEQ ID NO: 639412 - DNA, 178 bp, Homo sapiens
tgcgcttccaaaagcaaatgataattatgttaatgtcattagtgacaaagatttgcaacattagaggaaagaggcaccaatattaaattaaaaacctaagttccaactctccaaaacttaatttgaacttaaaattattgtattaaccccttattaaactctgcttttaaaaaaaaaa

SEQ ID NO: 639413 - DNA, 1209 bp, Homo sapiens
ggcatgctgaaaacttcggcatggacagagaatcgttatgatgtgaaccgtcgacgagacacactcttcagatggctttgatactgctattggacgtcctaatggaggtaacttaggatacggacatagaaaaaaatggatggcgtacacatggaagaagatggtgacagaaaatcctagaatcatcgcaggtggataccatggatggaagttcccgtatctcgctagcagtagttttccatgtcaggtaaaaagcctaaggcactgacattgaagacaatcataccattgtagcaaatgtagaccgggacggaaacagaatgacaaagaagagaatcgcaacacaggttctggaatgctggatggatgcttcctgtcttttacaaatcctggacgtatgatgagacgaaccaaactcacaaactgaacgtccttgtaggctggcacgggtcgtcgtgcggaaatcatgcctcacgaatccctaatagtcatagtagtctctcaatgggactgcgtggactcatccaacggaaacagggctaataccacagtatggaacctctacaagcctattcgtgtgattgcccagattaggtacgcgaaacactcgttcccgttcaccagtcgcagttctaacggacactgcgcaagctgggatccagagtagtgactacacacgcgtatgtaagatacccctaaaaacacatgacgtcggctcccaccctaacaaagacacgcgtacacacagactgggacaacaaaagcggcaaaccgaaacaaggacaccaactccaacgtcctcgcgacacgttcatacatcccgcgtcagtgaagctccccacccaatactatggcgacagcttagggcaaaccattttacattagcctttctcgaaagatcccaaccttggcccaaacgcacaccctttatgattacccagtgcttaacggagaagtggccaggttggaaacacgaagtcgtgtacagtcccggcaccaaaagattccccatgctcttcccacccgggcatcggaacacgaagcgcaggacaagccaagggcaggagccatcggcactaaaacgcaagaggctgaagcaccgaacacatggcgacacagtggacaacaacggaaagcaggcgggaactggcggggaaaacaggcgcctgggcaacgaccgcacggcacaagaaggtgacgcaaagcaag

SEQ ID NO: 639414 - DNA, 116 bp, Homo sapiens
ccccccccccccaggaccttgggccgagcccctccgtgaggaacacaatttcaatggttgttgaatcctttcatatcctaaaaggaattaacccccaaataaaacatgggtggtta

SEQ ID NO: 639415 - DNA, 181 bp, Homo sapiens
atcggatgccacctctaacatggataaactgggaatagcagtacactagcaagtatctggtgaatccttagcacggacgggttaacagaaaggcttgggtaatacctacttagttaatgggaggaagtagtaaataaacattaggtaatcggcagattacttcaaaggggaaaaatctttt

SEQ ID NO: 639416 - DNA, 151 bp, Homo sapiens
gaaagggggaggggggaagtccgactaatgttggggcctgaaactatggaaaggggggtaaaatttttatattggcaaacattttttggggacttcatgggcttttttttttaatcacccatattaaatttttaataaaaaaggcccccca

SEQ ID NO: 639417 - DNA, 138 bp, Homo sapiens
gcctatctcttcactctgacctcgttgctcttggtattgcgcccccagatgctgtctccctttctccaaagagggagccagccctcctagtttccgctggtgggtaatccatattcttttggttaagtccctgtctcc

SEQ ID NO: 639418 - DNA, 171 bp, Homo sapiens
tagaggacccgggtgtggcaggttcagaccagcctgcgctgcgactcttcacagtgcaaattccccacaagcgctgcgcagccccctccctgctacctcacaggccgggatggctccaacttcttgccccttcggaccaagtcctgtggccatgcagccctcctgccacaa

SEQ ID NO: 639419 - DNA, 387 bp, Homo sapiens
agaatggattccagggaagtgtttttcttaggagtacccaagaagctcagctcaggttgggctccctgttctattctgagaactacaaatcaaattcaaaatggagcacagaaaattctcatttctagttgacttatttgtattttggtgtcctgtgccctaaatatcttctcaaggaaaccttggctttaaaagtgattgtttacttaaacaaataaaacaacaacatacaagaaaaggcagtaaatccgagcgtccatcaacaaatgaatcaaaaaacaaatgagatatatatgtacggtggcatattattcagccttaaaaaggaaagaaattttgacacatgagacaatatgaatgaaccttgaagacattaattatgctgag

SEQ ID NO: 639420 - DNA, 404 bp, Homo sapiens
  misc_feature (404)..(404): n is a, c, g, or t
aagtatgtttaaagtgatgatggaccataaaaaagttttaaatataaaacatgagaaaagaaggagatacctattcaaaaagactggcaaatttgaaaaactagaaataaaaaaaaaactcggtgggggctgtgtgcagtggctcatgcctgtaatcccagcattttgggaggccgaagcgggtggatcacctgaggtcaggagtttgagaccagcctgaacaacaaggagaaacccagtctctactgaaaacaaaattagccgggcatggtggcacatgcctgtaatgccagctactagggaggctgaggcaggagaatcgcttgaactcaggaggcagaggttgtggtgagctgagattgtgccactgctctccagcctgggcaacaagagtgaaactctgn

SEQ ID NO: 639421 - DNA, 483 bp, Homo sapiens
ggcctcccagctcgaagtgctaggatgcaggtatgaaccactatgtcctgcgtagttttcattgttgttgcaattgcgggacttagtcataaattctttgccaaggcttatgtctggaagggtatttcccaggttttcttccaggatttttatagtttttgttttacatttaagtctttaatttgtcttgcattaatttttgcatatggtgataggtagaagtccactttcattcttttggatatggttagctagtttccactgcaccatttattaggggtcttttccccattgattattttttgccaactttcttgaataacaattggttgtaggtgtgcagcttttttttctgggttctctattctgttccattggtttgtgtatctatttttgtaccagtaccatgctgttttggttactgtagcctgtagtatagtctgaagtcctggctttgttcttttttggctaggattgctttgg

SEQ ID NO: 639422 - DNA, 698 bp, Homo sapiens
  misc_feature (497)..(497): n is a, c, g, or t
  misc_feature (524)..(524): n is a, c, g, or t
  misc_feature (551)..(551): n is a, c, g, or t
  misc_feature (560)..(560): n is a, c, g, or t
  misc_feature (593)..(593): n is a, c, g, or t
  misc_feature (596)..(596): n is a, c, g, or t
  misc_feature (599)..(599): n is a, c, g, or t
  misc_feature (605)..(605): n is a, c, g, or t
  misc_feature (608)..(608): n is a, c, g, or t
  misc_feature (611)..(611): n is a, c, g, or t
  misc_feature (617)..(617): n is a, c, g, or t
  misc_feature (626)..(626): n is a, c, g, or t
  misc_feature (629)..(629): n is a, c, g, or t
  misc_feature (635)..(635): n is a, c, g, or t
  misc_feature (644)..(644): n is a, c, g, or t
  misc_feature (655)..(655): n is a, c, g, or t
  misc_feature (666)..(666): n is a, c, g, or t
  misc_feature (669)..(669): n is a, c, g, or t
  misc_feature (675)..(675): n is a, c, g, or t
  misc_feature (679)..(680): n is a, c, g, or t
  misc_feature (682)..(683): n is a, c, g, or t
  misc_feature (686)..(686): n is a, c, g, or t
  misc_feature (689)..(689): n is a, c, g, or t
  misc_feature (694)..(694): n is a, c, g, or t
tgatgcttgaaccgtggtcgagtttcagcgtgacgtcagtgcccgctttgttggacagcgtggcggtgtacgtgatctggccaccttcgttaacagcgttaggcgctgtcagcgtcacagtagtggtgttgtcggtacccggagtgtccgtaacggtggtgttcaccgcggtagtgccagggaccagattctcgaaatgctcccgccggtcacgcctttgatagcagtgtgacggtctgtcgcccttatacacgtcatcaggagcaataaccgaaacgctaccgctcgattggtttacgccgatggtgatggttttgccgttatcgagggtgacggtcaacgggttggtgatgttggtcaccggcgcgccgttcttatccacaaggctggcggtgtaaacgatgttgccgccttcacccacggtagtggtggcggtcagaactacatccaccttgtcgatggtgtcgttgatcgtggtggttgcgccgttgcctgcnacttccagtttttcgaagttgccgccngaagcgtcggtgatcttgacggtctgngtgctcttntcgatgaacacgtcatcggtaggcgcaggcacngtnacngtgccnacngtntcgccngccttgatngtnatcgangagccgttntccaacttcancgtgactcgtnccngccttnttgnncnnggncgngggtngacc

SEQ ID NO: 639423 - DNA, 321 bp, Homo sapiens
acctgtgtgtagcacaactagggtcagttttgcaggtggtagccatttaccaagatagttgtaggtaagaagggcagatttattagagaaattcgtgaaaatatgttgcagtgggcagctcagcagagaaggggctacctgcaaagaggcaagggctggaggaaagttttatagggtcctgctgaagggtgctacgtgtggaatgaggtcattgtgcccgcaggttgtttgtgattagctgtctctaacaattgttcatacaataattgttcattattgttctcaacttggggctctccccaacctggggacccttcctta

SEQ ID NO: 639424 - DNA, 104 bp, Homo sapiens
tctgttcgcgcttctgccgttcctgcttctgctgcttctgctccctgcttctgcgcttcctgcttctgctgcttcctgcttctgccgcttcctgctgcttcctg

SEQ ID NO: 639425 - DNA, 375 bp, Homo sapiens
tcagggatgattaccttgacctctttggggaccacagctgtgcacggcaaaatgtgtactgatgtccaggagaacaaatgcagctggctggaggttcagtgtctgcaacgggccactccaaaacagtaccagatcctgaaggaaaattacgggcagaaggaggctgagaaagtggcccgggtgaaggcgctatatgaggagctggatctgccagcagtgttcttgcaatatgaggaagacagttacagccacattatggctctcattgaacagtacgcagcacccctgcccccagccgtctttctggggcttgcgcgcaaaatctacaagcggagaaagtgacctagagatcgccttggggtagtatcgggtacc

SEQ ID NO: 639426 - DNA, 276 bp, Homo sapiens
  misc_feature (31)..(31): n is a, c, g, or t
  misc_feature (96)..(96): n is a, c, g, or t
  misc_feature (227)..(227): n is a, c, g, or t
  misc_feature (259)..(259): n is a, c, g, or t
ctggtggggagacagcatgccactggaaaanttcgtagacatggaattcctggttcaaatgatactaagggggacttgcctggaagcagacttgtntccgcagtatacaaactcaccctttaatgcacacactgaccagataacacaaacacatttacccccacagcacctagactcttctcacagtacacacacttgccttccagtacacagacatatccaaaggnacaccgacaagcaccacagcaaaaagatgttncccagaacacatggaca

SEQ ID NO: 639427 - DNA, 241 bp, Homo sapiens
gcctagtgaaactttagctaacaaaattcacacagtgaaaggcacggactctgggtgagactgggaaggtcctcagccattcatgcaccatgcggacgagctccgccccatgtggcccgatcaccccggagaggatatgcctcgcaaacgcttctactagtcgatacaacctcagttgcggtactctcatgaccatgccgcacctagcatctctgtctctctctgcgttgtagggcggatc

SEQ ID NO: 639428 - DNA, 860 bp, Homo sapiens
cattttatagagaatccccttcccccttgttttcattcctttctctccagatccaggagataatcaactaagagccaggcacccttttaggtctgataagaagcattttataacctgctctctcttaagtctgctatctgagagcttcctctgcacaataaaattgggtctccacaatcctttatcttaacctgaacatttcctttctatgatcccaggtcttcagataaactcaaccgtcatccagaaaaatgtttaaatttacctatagcctggaaggctccgcttgagtgtcctgcctttctgaaccaaaccaatgcatttcttaaatatatttgaagtctcatgctttcctaaaatatatcaaaccaagctataccctgaccacctgtggccacatgttctcaggaccttctgagggctgtgtcacgggccatggtcactcatatgtggctcacaactaagtctgtaaaaatattttacagaattgactcctttgggtcacattaccaaaagttatttatttgtcaaatgatgactcagaaatttgaagaagcgaaaccttttataaccttgtacaaatttggcaaagagcagattaagattagcactttaggaaacctcgttatgctttacttcaacgctcaattacagaaaacatatatacctggtgatgtgtccggttgttccacggaactctctgcggattattccacctcttccccttctggctcggttctagggtcaccatctacctcgaagtattcggattttaacttggaacattgctccaccgggacttggggaccccactgcaacgtgttgggcgcgcggcttaggggccccgggataaatcccct

SEQ ID NO: 639429 - DNA, 892 bp, Homo sapiens
  misc_feature (892)..(892): n is a, c, g, or t
gcgacagggcgagactccatctcaaaaaaaaaaaaaaaaaaggaaaaataaggggatgataaccaataaaaatattaggatgactcggggttttagttccgtaagcttttaaaatttttcaaacccataggatgtcctgtgttttaaaattaaaaactttaatcatatcgtggtgattggtacctttttaaatccctcctaggagagtgtaagttcctcaagtttccctttaagcccagttccatccattcatttcattcattcacacatattttatgtgcctgtggtgtcaaggcttggttgcttacaaagataggaaacgaattctgggaagaaatatattatccatatctatgtgacacttttatagaccgggactggtaacccaaaggggtaaacacgtgtttaactggtcctctttaaaaagccaacgggttaagcaacgtatccacgggtgatttttttgaaaaaaaattcaatctggggctctgaccaagaattgtccctccctgacataattacccctctaatttaaaataaaaactatttattttccattattatcacggtaccaatatttaaaatgccatctttttgtgtcattgtaaattgatttaaattgaggaacccttctcggaagaaatttagccatcccccatcctaattctgaggtctgtgactcttggaggcctacaggaccccatgttcgggtcccaggaatgaaaaaatcattccctgggtaatcaaacaaacagaaaataaaaaagtgtgggcccagacagaagttaaacacttgaggggcgccctgaaagaagtgctagtccgaatcgcgcaaggtggttcacaaaccgagcgctgaaacggggggcagctcaggacatgacaccgagan

SEQ ID NO: 639430 - DNA, 212 bp, Homo sapiens
cttattttcctttttattagatttagattcgagttcatttatttgaaacatactgggccaatctccatccagaattcctgggtcagccccacctatgtccaatggtgcattatcgcggaagggcaggcgtgatggcttatttgttttgtattccatgattgtctttcccctttcatttgtctttcttgagctgccatctacaagaacagtgt

SEQ ID NO: 639431 - DNA, 141 bp, Homo sapiens
cggaccacagaacatgaccaggtcctccactgggccggatgagagtggggagtggcaagggacgtttctcctagcaatagacacttagatttctctcgttgtgggaagaaaccacctgtccatccagctgatctcttctac

SEQ ID NO: 639432 - DNA, 102 bp, Homo sapiens
agtcggtaccactcttgaatattacttaatgggcttgcatgcgggctagtgagtttaattcaatcaaaaactggggatttttaaccctaggcaaaacctagt

SEQ ID NO: 639433 - DNA, 187 bp, Homo sapiens
attcttgcccccactttcataaaaaaaacttcaaaacgctgacgctttggagagtaacacaatcaatacttggctgggcacggtggctcctgcctgtgatcctagcactttgggaggctgaagctgaaggatcacttgagctcaggagttggagaccaaccctggcaacataacaagaccctgtctc

SEQ ID NO: 639434 - DNA, 124 bp, Homo sapiens
cccgactagcacaggattgacaggattgataggtcttctttcgattccgtgctatggagcatgctagtgtgactgtctcttacattaatggatggattcgtctgtcgttattcctaataaggaa

SEQ ID NO: 639435 - DNA, 155 bp, Homo sapiens
tacactgatggatacttcaatgacatcaatattgacctcatacagacaaaagatgaaagctgggttttctcgtgtcccaaggtacaaaacatgtgctagaaaagttaacatacacagtttgtcagacgatcaagcgtcggagatgactcatagtt

SEQ ID NO: 639436 - DNA, 297 bp, Homo sapiens
  misc_feature (13)..(13): n is a, c, g, or t
ttctttcgggcgncaggtggaaaccgttttattgcttggcggcagcccagctgggccagccaattttttcagcggagttgttcggacccgggctttcttcgaatgcctttcgcctactttagtagttaagttgaagggaaaccgattttcagcacccggctttcttggccatttcgccaacattgatttcaggttcttcacgaacgcctgctcaaccaggctcgcttcagccaggaacttgctgatacggcctttgatcatgttttcaacgatgttttccggcttgccggcgatctg

SEQ ID NO: 639437 - DNA, 109 bp, Homo sapiens
ctgagcatcagaggctgatttctgttgtgtgtggtatgtatcgggtgtctgatgggattgttaaccccgtcgctactcaaggatggcgcgatacaaacaccttcagcgt

SEQ ID NO: 639438 - DNA, 261 bp, Homo sapiens
tatgtcatcagaaatcgctcattattaaaacttttggttgttgttgagacacagtcacacactgtcgcccacgctggagtacactggtgtgatctcagcccactgcaacttctgccttctggattcaagccaatctcctgcctcagcctcccgagtagcatacaggcgcatgccagcaccacgcctggctcatttggtattttgaatagagacggattttaccacattgcccaggctgctgtcgaactcctgatgtcaggt

SEQ ID NO: 639439 - DNA, 508 bp, Homo sapiens
gcccaaggtatcatttttcttttcccggaggggggcgcggccggcatgtgattagcaaactcatccctagcttgtggtttacccgccgcgtattgcgttggagcccccttcccctgtgtcctctaaaaagggggggtttttgccctcatgggggggttctttccctgatttccccttttttcgggggcccccctgggccaaacctaggccaaaatcctttttccttttatttttcggggggggaatttaccttttttcccccacccctttttggggctttcgggaatgccccggggtttttggggctcccccgggggataccccccatgaaacatcctttttttgggggggccattccttttttcccacgcgggaatttttattttttttttgttttggggggccttcgctttgaagggaaaggtttttttgggaggaggccccccctttacccggggggggttttttgggggccccccccccccataaaattgtggtttttggccca

SEQ ID NO: 639440 - DNA, 476 bp, Homo sapiens
ctcgaagcacactgacaattatagctggacaagacagggtcatatacataccacatacggtacagccagacacagcgccaccctcctactccctatcacccctagacaccagtggtggatagggatccccaccccacagagaggagaatgcccaggaccaccctgacaggagtgtcagggtccagctctgagtgtccgaactgtcggacaccaagctgtactgctgtagagggtgcctggcccggccccagggagctagggcgagagccgccattgctctgagtcagaagctaggagctggacggagtgggggctggtccaggttcagtgccccagattggctccttcctccaatatactcccttcttctttctctgcctgctgccccaccaaccaccaccataactgtctccaagaaaacacaaccttggcatatagcgggtggagggggtgctcctgtagcaagtgtgcttccg

SEQ ID NO: 639441 - DNA, 410 bp, Homo sapiens
  misc_feature (33)..(33): n is a, c, g, or t
  misc_feature (131)..(131): n is a, c, g, or t
  misc_feature (154)..(154): n is a, c, g, or t
  misc_feature (186)..(186): n is a, c, g, or t
atattgtattaggataatttacatgccataaantttgcatatttaaagtgattttataaatttattgggtggtgcaaccatcactacaatctattttaaaacatttgcatcacgtcaaggacatcttcccngcccatctgcagtcagtcttcantactactcccagcatcagacaaccactaatcntactttctgtgcctatggatttgcctatcctgaaaatttcatctaaataatgtctccaaagtttattaatgttgtggcatatataaatacttcattcctttttatagctgagtaatattccattgcatcagtatactacattttgtctatctagtcatcagttgatgaacacttggattgtttctatcttttggctattatgaataaagctgctatgaacgtta

SEQ ID NO: 639442 - DNA, 415 bp, Homo sapiens
ctttgagctcaccaccagttttcttaaccccatttaaaacaagatcctgggtttttgtggtttgacttttagggtgttttaaaaaaacccagatttttagggttaatatggggtaaaggtaccccccttagggattcatttgaatgagggtattatcccatgatggtatccagtttgtgaaattgttgcaagggcaaaaataacttttaaaaacccgtcgagattccaatgctttagaatcagcatataagaaaataaatgatatttgcatgttgaattggggtggatggggggaccaagcataatttttaagtgtgaagctttgcatcaagaaattattaaaaagctttttttctccagtattttctgtattatcttaaggtttagggcaaatattatgtaaaggaccatccca

SEQ ID NO: 639443 - DNA, 688 bp, Homo sapiens
tcatccccaagggacatttggaaatgtctggatgcattttatgatgtcatgactggtaaggagattgttaccagcatctagtgggtgcaagccaggatggctgctaagcattgacaatgcatagtctagtgcctccaacaaagatttatctaccgtcaaagtcaatagtgctgaagttgaggaaccatggtttagggagtcttgattaaaccgtttcatctggagtaccctcagatggtgatataagctagtatgctctgcttctcagtgtcaactttactcgcgtatgcagcaggtgagttataatcttcacagaaccatgctcctgaggaaagactgatcatacaaggtattctcattggctctgaacaaatccttctccttggcaattagaaaatatcgactttctaatgtattagcaaaagctccctctgaatttgaatatatgtttggttagatcaaatagcttgtttccgcgaatggaaaaaagaatcgtaaatgccatcagatatagtttagtgctgactttacatggtgcttgtacctcttatagcacaggcaaagctaagtactttcaactgaaagccatcaagcaaaatgcttacaaattagaatgtaatggccatagctctacttgtattgatgacgcagaattacaggcttccgcatattgaatctactattgatc

SEQ ID NO: 639444 - DNA, 892 bp, Homo sapiens
gttgcggcgggcggaacggtgtctccttcacttcgccctccagctgctgcagtgccagcccgaccggagcgtgccaaagcggttcagaagtagcggagcggtggggggcccccctcagggaaaccaccagattcccctcttcccgcgacctcgcaatggagaccacggacaagacttgccccgcgtccaatgtgtatcctccaatcaatatgctggaccttgtggacaaaacggttggccaggacgatatctccaaccaacgcgattgggcgtttccgggtggctcggaacacttggctgtcgacaccccaatcagtcctgcgccagtggccgtggcacaattttctccaaaccgtcccgggttccattcattaaattaacacggcaccatctggttacaaacgtttcaccgtggggcacccttggggaagaaccccaaaatttaccacaggtggcgtggtcaagttatgggcgccctggactttttccacagaggcaccacacgctgccaccccgtgggattaaccaccttctggggacaccacgacacttcggcaatttggaaggacccaggattgggtccaagggtttcggacaacgtggacacttggtgaataccttaccttttcttcaaccaaaaacaacgagggaaaacgaaacactggtggtaaaatctccaaggtctttcctttacaaggaggggcagtgtataaaccctgcggtggtgactgtgacctttcgatttgtgcgtggacctgcaaatccacatgggtcagacgggtcatgggaataatgaaggggcgggtatgctggtaccaagatgacttttgaccagtgccaaatcaagagtgacagggataacttggcagggcgctacaggactggggactcc

SEQ ID NO: 639445 - DNA, 301 bp, Homo sapiens
agcaaaaccaataggcaacatgagcggaatatatacaacaaaaccgacacagtaatgtgagccatacctttaatctacaaacaccttcatcaccgcaagcagcgatattgacataaagtgcgcgtcggctagagcagtacttttcctaaaggaacagatagcccatatgtttcatgaagatttaatttcgcttctagaaatacaatttttcggacaagcgagtcaccgttactatggatgccgtacgaagcaagcccgattaacgcgtcgccttctggaattttttcaccggtaattaatt

SEQ ID NO: 639446 - DNA, 956 bp, Homo sapiens
  misc_feature (42)..(42): n is a, c, g, or t
  misc_feature (56)..(56): n is a, c, g, or t
  misc_feature (257)..(257): n is a, c, g, or t
  misc_feature (429)..(429): n is a, c, g, or t
  misc_feature (625)..(625): n is a, c, g, or t
  misc_feature (645)..(645): n is a, c, g, or t
  misc_feature (678)..(678): n is a, c, g, or t
  misc_feature (704)..(704): n is a, c, g, or t
  misc_feature (712)..(712): n is a, c, g, or t
  misc_feature (855)..(855): n is a, c, g, or t
  misc_feature (923)..(923): n is a, c, g, or t
gaggtttataaagaactcattattataaaaaaaaaacataanacatcaggattaanaaaaatcaatgcggtctctttgcagaatgttgtgcttgatgtttaaaaaataccttggatcttattttgtaaatacttacattcttgttaaaaaatacaagtattgcattatgcaagttatttcataatcttacatgtcctgtaacaggcttttgatgttgtgtctttccactcaaatgaatttgctaggtctgttctttntgaagctccccatgtctaactccattccaaaagaaaaatgaggtcagtagacagtctatggtgctagaaacccaccattgcctaatgacctagaaggctttgttgtctctgagcttgactaagaccatacctagatcacaggtattatgactccacatgaaccttcacattngttcgctcataatctacttactggctaaaaactacaaaaccaggctaagagataccaccagtcatagcacttacttctgctttctctgggatatgtgctacaaatgtgctttggctttagaaaggcatggatgagaagacagacctgagaccaatctgggtagaagcaaaagttgaccttttaagtgctgacacanatcaaattcgaatggtcaangcagcgtgaatcgctctcataaagtgggctaantctctagttaaaagtcttcgatggantgactaantaatgtgtaagtggctaattgtggatgcatgatggggatgtcattttaagtttacctatgtcacgtcatgatgctctgataattttcacttggaactgtaactgggtgttgattaaaaccaacatcaaccaaatccatctacnacagccacaccaaacactcatttgtgaggtgacccctaaggggcttggcaggattgtggcactagaancacagaatccacttaagtctctgtgtgtttgat

SEQ ID NO: 639447 - DNA, 531 bp, Homo sapiens
agagaccaggtgaggcctggtgcctatctgctggaggcaagagctggacaggcttgacgttgtggggcagcgattactctgtagaccactattcccaagtggacaggtgccatatatgcctctttgggagccctagcctgtccaactccataatccactccaagtggcccaacaatacccaaaccctctccaggcctgtcaagagggaggaaggggccccatggcagctcctgaccttgggtcctgaagtgacctcactggcctgccatgccagtaactgtgctgtactgagcactgaaccacattcagggaaatggcttattaaactttgaagcaactgtgaattcattctggaggggcagtggagatcaggagtgacagatcacagggtgagggccacctccacaaccaccccctctgtagaaggcctggaagagctgagaccttgctatgagactcctcagcacccctccagttttgcctgagaaggggcatatgttcccggagcagaagacgtctccccttctctga

SEQ ID NO: 639448 - DNA, 208 bp, Homo sapiens
  misc_feature (190)..(190): n is a, c, g, or t
ggcattagacagcgcaggcagacatgacctcctgggcttctgcgggtgccaacactgccgctccttctggaggctcagggaggctcttgagggcattgggacatcgtgctgccggccgccgggcagagcggtttgtttattttttgagacttccgggaacatagttataaataactttaatttgccttgnctgcccactgcagtacag

SEQ ID NO: 639449 - DNA, 110 bp, Homo sapiens
ggggccagttgctggcattttatacttgacttgtcacttgtagtaaagcagggagtccctctggacatgggattttaagagaaatctacataaagcataggttatacatg

SEQ ID NO: 639450 - DNA, 549 bp, Homo sapiens
  misc_feature (392)..(392): n is a, c, g, or t
cggacgcgtggggtgtcttttatatataatctcctataatgtcttttatatgtatatataaaatctacatctaatttcagagatactaagatgtggggaaatgtacttagaatcaatgaaatacggtgttggtgaatgcaaaacttgtcagtcatatttattgatttcttctgtgtacagataatgggcatttggtatttattcatttatattttttttttggtcttaatgggacatggtgtctgcttatttgaattttccggtctgatttctatattccattgtagaattttcatttacttaatatttatatctgcgcccggccattatctgtcaatttttttcttaaaaaaaattggaaagtagccaaaaagaaaacaaagtccctttangtttaaataggaaaatgaatttagtaatttgtggaaaacaaatttatatcagatttttgtttgttggttatttttaaaacttggaataatttagtctacttttagagtgtatttgagaatggttgcaagttgtgaggcccttttagtgacttgatcc

SEQ ID NO: 639451 - DNA, 131 bp, Homo sapiens
cgtggagttcactgtttcagtgcttacctcctcatggaggtgtatttttgctcactgtgtgtaatagaagtaagatagatttttctttcttttttttatttcctgtctgtgcgtccccactccccgtcgac

SEQ ID NO: 639452 - DNA, 152 bp, Homo sapiens
cgggtacaaaaataagcacgtcaaacaaaacaagtatcagcactcaagtagtcaaacagaacaagagtgccatgcaggcatgctgtgggtgatcaggcacgtttccactcagatggagtggggcaagttccaaaagactagtctttacgaag

SEQ ID NO: 639453 - DNA, 124 bp, Homo sapiens
cgtgggcccccaggattagatgtcacctttgagatagatgtgaatggtattcttcgagtgacagctgaagacagggtacacgtaacaaataacaagatcacaatcaccaatgaccagaatcgcc

SEQ ID NO: 639454 - DNA, 633 bp, Homo sapiens
  misc_feature (430)..(430): n is a, c, g, or t
  misc_feature (517)..(517): n is a, c, g, or t
  misc_feature (530)..(530): n is a, c, g, or t
  misc_feature (570)..(570): n is a, c, g, or t
  misc_feature (580)..(580): n is a, c, g, or t
  misc_feature (633)..(633): n is a, c, g, or t
cgcggtggctcacgcctgtaatcccagcactttgggaggctgaggtgggtggatcatgaggtcaggagatcgagaccaccctggctaacatggtgaaaccccgtctctactaaaaatacaaaaaattagccgggcgtagtagcaggtgcctgtagtcccagctacttgggaggctgaggcaggagaatggcgtgaacccgggaggcggagcttgcagtgagccgagatcgcgccactgcactccagcctgggtgacagagcaagactctgtctcaaaaaataaaaaataaataaataaataaataaataaataaataaataaataaatatcattatatagccaggtgtggagctcaggccagtaattcctgtactttggggagccgaaggggacggatcacttgagctcaggagtttgagaccagtctgngcaacatggtaaaaccctgtctctactaaaaaaataaaaaaaattagccaggtgtggtggactgcacctgtagtcccgactacttgngaggctgaggtgngagaatcgcctgaacccaggagcgagaccccgtctcaaanaaaaatcaanacaaatgcggcccgaattcgagcttattggcctttggcctgtgaggcgcatcn

SEQ ID NO: 639455 - DNA, 1076 bp, Homo sapiens
gatcaatagaggaaggtgatcaatagcaggaagggtaatcaatagaggaaagtaatcagaggcaaggtaatcaatagaggaagggtaatcaatagaaggaagggtaatcaatagaggaaggtaatcagtagaggaagggtaatcagtagaggaagggtaatcagtagaggaaggtaaatcaatagaggcaaggtaatcagaggcaagtgtcaatcgagtagcaggaagtgtaatcagtagcaggaaggtcaatcaagaggaaggtaatcaataagaggaagggctaatcagtaagagggggcaatcagttagagcgaagggtaatcaatagaggaaggtagacaaatagaggaaggggtaatccaatagaggcaagtgtaactcaataacaggacgcggtaatccaatagaggaaggtagtcactagcaggacaggtagtcaattaagaggaaaggtagtgcaaacacgaggaacgggataatccaatcagcacgggaccggcaagtcaagaccgcagcgacacggcacgcgcaaacaagaacggacaaggtcacaccaaacaagacgcgcacgcgcacacacatcacaagggaacaggccaccgaccacactacaaacggacaacggggtaacaagtcagaatacgacagcgaaaggggacaccacgaaagaacgaagcgcaaggggataggaccaaccacaccacgggcacagggcgaacacacacagaagagagcgacacgggaagacacaagtaagagcgcaacgggcaaagctccaaagaacgaaacagacacggaggccaaaacagacccaccgcgacagagggacaaggggcgaaaaaccgagaacgacaccgccaggcagcagagggctaagggccaagcacagaaagcgcagaggcggtaccacccacagacagcacagaggaaccagaggatagagcagacacgcaagaggaccagcagaacacaagcagaacgagacagcaccgaggacaggtagcaacgaggaggcgcgaggagcgacaagcagacgaaggagcaaacgcatccgcatacagcagacacgagac

SEQ ID NO: 639456 - DNA, 789 bp, Homo sapiens
gattgctgacaaggcacacgagatcacgggtacaaagtattgctcccaacttggctcctgacctgtgctctgtcttctcagtgatggaggcatcttcctgcaaaacaccttatccaataaaattaacacacaaatagaaaatcaaggccacagaaagaaagaaagtggctagtatggttgctccagttgagcactggatttggttttgcacttcttggcagccaggacataatgaaaaccaggtgaatcgcacagctttattgatcagaaaggggaaagtctaccaactcttcaggggaggcaaaattcttcctggcacatttttctaaaatcattttctcatgtgggagtttacataaaagacacagtggcataataaacataggtccatcgacaacaaaagccttcataagcgtggaggattgaacaccaaggcgtgacacgatgaaggtaatttggccagtggctaagctggcaaggtccagtgatgtggcttttaggggctctggcttgatgtaaaattaacttagaatcattttcttgaagacgagactgaagacaaattcccaaaggaggctttgtagtggacattcagaggggaaagctcgttggccttggtgagattatacccggtgaaacggatgtgggtgcctcctgccctgggttccactttccatcatataattaccctgtctgggtatcggattggtgctgactgtctggtgtcaaaggcttaaggggaacgcccgttgatcagagttcagaattgactgtttttacaaaacttaa

SEQ ID NO: 639457 - DNA, 114 bp, Homo sapiens
ttagagctggggtgagtggtggtgtcctgtctggctttttagctgagtagacaccagcgaatgctgcttgagtcatcatcatgtactgcacatgaggagcacctagcaatctag

SEQ ID NO: 639458 - DNA, 393 bp, Homo sapiens
  misc_feature (1)..(1): n is a, c, g, or t
  misc_feature (3)..(3): n is a, c, g, or t
  misc_feature (6)..(6): n is a, c, g, or t
  misc_feature (8)..(8): n is a, c, g, or t
  misc_feature (22)..(22): n is a, c, g, or t
  misc_feature (72)..(72): n is a, c, g, or t
  misc_feature (97)..(97): n is a, c, g, or t
ncnacngnaagctcgcctgctnttgggaatctcgaggatcccccgcaaatttccttccactcgtctttcgcngacctcggcgtccgagaagatatcngccaggcgctggaaggggtgggaattgtctccccgttcccgatccaggccatgtcgatcccgattgccgtcgagggcacaggatcttattaggcaggcgcgtactggcactggcaaaacactcgccttcggcatcaccatcttgcagcgcatcaccctgcccggtgacgaaggttgggaagaactcaccaccaaaggcaagccccaagcactcgtgatgtgccctacccgggagctagctctccaagtgtctaaagacatctccactgccgcttctgtccgcggcacacgcgtcta

SEQ ID NO: 639459 - DNA, 131 bp, Homo sapiens
tgcgcgagtcatgagatgtaattattatacgaatgggggcttaaaacgggagtactactcgattgtcatcgtcaaggagtcgcaggtcgcctggttctaggactcatgggggaacgtctgtcggcgttgaa

SEQ ID NO: 639460 - DNA, 701 bp, Homo sapiens
tgtttttatttaaaaacatgacatttggggccacgcgcggtggctcacgcctgtaatcccagcactttgggaggccaaggcagtgcggatcacctgaggtcaggagttcaagaccagcctgcccaacatggtgaaaccccatctggactaaaaatgcagaaatttacccaggcacggcggcggacgcccatcatcccagctacttgggaggctgaggcaggagaattgcttgaacccgtgaggcggaggttgtagtgagccaagatcgcaccattgcacaccaacctgggtgacagagcaagattgcatctcaaaacaaacaataataatacataataaaaacctgatatttggctgggcgctgtggctcatgcctgtaatcctaacactttaggaggattgctggagacaggagtttaagaccagtctgggcagcatggccaagaccctgtctctacaacaaaggcaacagattagctgggcgtggatggcttgtgcctgtagtgccagcctatctgggaggctgaggcgggcaggatcacttgagttcaagctgacagtaagcctatgattgcaccgctgaactccagactgggtaacaaacctaagaccacatctctctgatctcacagaaaagtgataccttcgacagagatgcatagactccaagaagtttatgcatctctatgcaacccaacact

SEQ ID NO: 639461 - DNA, 1071 bp, Homo sapiens
tgtatctgtttctgtttcattgtgtggtgtgtgccttggtcgtttgttgtctgtgtggtcatgtcatggttgtgtgcctgacatgcttgggtttttggtggtgagggtcctcggtcgtggttcttatatttgctagggctcttttgtcgtggtatgtgggtttcgtagttgcgggtacctgtttttataggtgctgctgagtggtgtcaactgtgggtggcgggggcgggttgatctacgtgtttctttcgtgatactagggtgtagttattgtgggtatttgtgtgggtattgttggttgtagccgtgccctgttggttgaactgtcccttggctggttgcggtgtgttgaaaaacacaaaagacccgggctttccccgtgtgccttggagcgggaccctttcgcccagcgtttaggaatgtctcctgcccactttggggaccaatggggcgcgcccagatgaccccataggatggccgttgagcccccggggggacatcccacgcatcccctgtggggacacctggggcccattagtcgcatatcttgccctcggcccttgggaaggttcccacgattcaaagcctgcgctgccatccgtgaattcataaattgtataagcccgggtaccccttcttcacacctcgggaggacccacattgaggcttacaggggggtgcaagccacaccctgttgtgtcgagcaactgtaaacacccttcaagctgcgcttccccaagctgttgaacgcccaacctcttctcgccactgattaaacatagagtggctgccagcccctgggacccaggccaccccccaggatgacctgtgcccgccagatgaggccggattggagaaaagagctccccacagaggggctttttgggaaaacatcatggtccaagaaagacatcgtgtctggccgttgttggggatgacatttttgttttggttttgtccctttttagatttttccaagaatagggagggaaaggggaaactgagcccttgttgctatccaacccagaacttaattgtaccatttttttccaataaaaccttgttcccatg

SEQ ID NO: 639462 - DNA, 214 bp, Homo sapiens
gagcttttgtcatataagcgctcataaccctcacgttacactccctcttagccaatattgtgcctcattgccatactagtctttgccgcctgcgaagcagtggtgggcctagaccctactagtctcaatctccaccacatatggtctagactacgtacctaacctaaagctactccaatgctaacactaatcgtcccaacaattatattactac

SEQ ID NO: 639463 - DNA, 994 bp, Homo sapiens
  misc_feature (439)..(439): n is a, c, g, or t
gtatcagcattcgtcagtgctggctgagtgctgtctggtaatatgagcctgtgatgactaggaggtatgcatacgagagtagtcctgggttcgtgaatctagtgtgtccttgcgaactagtcatccatggtaagccatctggcctgcgacgagcagaaccgtacgacgtgtgcgagaagagctgatattgctagtattgcgcatgatagtagaatcgtgctatacatgtagtcatgttatacaactctggagtcgattcaccacggctgagaacgtaagatcatctaacaatgtaagtctccagctctgtggattttcgagcctatagtgatctctctcgtgcctacagcctcttctcctacaatacccaaggcagggataaatgagcatactagttttatagcagcaacagagttggacgagtataggtctactacantttggaaagaacacaaaggttacaatccaagaggtttatcgaaaaaagtttcccgggctccagtttgcaccaattctgtggttgaggctggggggaagattcccttcgaattcaaggggttattttggcttggaaaagttttttgggggaatccaaaaatggggggaaacaacgcttttttggggttggaaaaagaaaaaggggggttcctttggacgggaaacccaagggagggggtttttaaaccattatttcgggggtttgggggggacaacaaccggggcctttcccaaaagagccgacgccccaaagaaggaaattcttcggggtacccctttggtgggtggtggccccataggggtgaaaaaaccgcaaggggggaaagttttttacggccgttttaagactttgtggggaggtgatgggtaggggagacccaaaaagaagggggagatttaacattaattgggggaaacgattttaaaggggggggaaaacagggggccgacgaagagagggtgatttatgaccacgcgattttatttctctggggga

SEQ ID NO: 639464 - DNA, 526 bp, Homo sapiens
  misc_feature (228)..(228): n is a, c, g, or t
  misc_feature (235)..(235): n is a, c, g, or t
  misc_feature (243)..(243): n is a, c, g, or t
gtcattagccagtttaacatgattcaaactctgtttatttcatactaaactagtgaataagtgaaataaaggaaactcgtcattaatctaaagacagagttcaaaggaattgggccaaatatattctcagtatttggcaactaatggtttttaaagggttgttaggcaaaatcaggtcgatttaagaaattgtttagtagtttctggtgttatagcagttcttcaagnttttccnatcttcancatgtatgtctgctgaaaggtgcaggatcgaggatacagacgttgataattttctacgaaaccagtaacttttaccttttaacggaaacttggctaagctcttatgagctagaagaagctgtaggatagctcaaacatttcttttgtaagcaggaaacgcttggcttattttctcggcattcgtaacgaggcttatttaacaaaaccagtttgggctgtgtccggtctggaacttcgtaatacggtgtacaaaaggcgaataacctgtattgcacggttctga

SEQ ID NO: 639465 - DNA, 273 bp, Homo sapiens
ccgtttgatccggtgtagctaggcagcacaaatatccagtgtgctgtggttgcagctgttggtccagtggaggaccccagtgctgaaaggatgggcactggtggtgtggagcagaacggggcctgcagagtgactgtgcagagcctgtccctgtgccctatggcatcgtcaggccacgctggctgttggcatccaggccattgggtctcctgggtcctcccctccaccctggaacagtagaggggtccgaagcctggtctgactgctcgctgg

SEQ ID NO: 639466 - DNA, 705 bp, Homo sapiens
  misc_feature (13)..(13): n is a, c, g, or t
  misc_feature (66)..(66): n is a, c, g, or t
  misc_feature (96)..(96): n is a, c, g, or t
  misc_feature (108)..(108): n is a, c, g, or t
  misc_feature (111)..(111): n is a, c, g, or t
  misc_feature (114)..(114): n is a, c, g, or t
  misc_feature (150)..(150): n is a, c, g, or t
  misc_feature (154)..(154): n is a, c, g, or t
  misc_feature (171)..(171): n is a, c, g, or t
  misc_feature (177)..(177): n is a, c, g, or t
  misc_feature (234)..(234): n is a, c, g, or t
  misc_feature (248)..(248): n is a, c, g, or t
  misc_feature (292)..(293): n is a, c, g, or t
  misc_feature (318)..(318): n is a, c, g, or t
  misc_feature (323)..(323): n is a, c, g, or t
  misc_feature (326)..(326): n is a, c, g, or t
  misc_feature (328)..(328): n is a, c, g, or t
  misc_feature (354)..(355): n is a, c, g, or t
  misc_feature (361)..(361): n is a, c, g, or t
  misc_feature (393)..(393): n is a, c, g, or t
  misc_feature (415)..(415): n is a, c, g, or t
  misc_feature (508)..(508): n is a, c, g, or t
  misc_feature (583)..(584): n is a, c, g, or t
  misc_feature (586)..(587): n is a, c, g, or t
  misc_feature (648)..(649): n is a, c, g, or t
  misc_feature (677)..(677): n is a, c, g, or t
taaaggccaatgnaattaataaacaggaacatgatattattaaacaaaaaacacagatacctttanaagcgagagaactgattgataccattttgnttaaaggaaatnctncgnccaacatcttcaaaaactgtctaaaagaaattgacnctanattgtataagaacttanttgtgnataagaatatgaagtatattccaacagaagatgtttcaggtatgtcactggaagaanaaatgcaggaggtngcaagaagaacgaactatgtaaagtgtgtatggacaaagaagtnnctgttgtatttatcccttgtggtcnactgntcntntccccccccccccccccttccccacnnaaatgncctatttgcaggggtataatcaagggtactgntcgtacatttctctcttaaagnaaaatagtctatatttttacctgcataaaaaggtctttaaaatattgttgaacacttgaagccatctaaagtaaaaagggaattatgagtttntcaattagtaacattcatgttctagtctgctttggtactaataatcttgtttctgaaaagatggtatcatatatnncnncttaatctgtttatttacaagggaagatttatgtttggtgacctatattagtatgtatgtnnacctaagggagtagtgtcactgcttgtnatgcatcatttcaggagttactggattt

SEQ ID NO: 639467 - DNA, 266 bp, Homo sapiens
gcggagaggcgggaggcgctgagagtctgtgcggaggtccatgcacagactgctttgcctgttgttgctcttcggaggcggcgatccccgaagcgagctgaaatacggctgcaggctacaatttgcagccgaccattaaggaagacgacgagcggagaggtggccaccctcatggagcgctttcctcggatggctcgattcccattactacataaaccgtatcatctgagagatcacagagctgtctacgtgtatctgagaactga

SEQ ID NO: 639468 - DNA, 830 bp, Homo sapiens
  misc_feature (548)..(548): n is a, c, g, or t
  misc_feature (556)..(556): n is a, c, g, or t
gcccaggcccttcctctaccgccgctcggcccacggactccgacgtgtccctcgactccgaggactccggggctaagtctccaggcatccgggctacaatatctgtccccgcgggtggaatggcagccttcggctcaagcgtggcagcctccccgccgaggcctcctgcaccacctagagccgcagccccgagcccaccccgggagggcagagccagaagaaggctcattagacctgggggacccaaagggtctggcctcttgggcagccccagagatgaggggtcagcagaggagagctctggggtggggatgggttagggacgcaagctgagtctagcccttgctctcattcagctgtgtgtgaccctgggtaagacccttccttgtgttgagcgctcagctttccgcatgctgtttagtggtggcttatggcacaaggctatccacgaaacgtcaaaattccgcctttccatcagtacagaagcgatgaagcaacactctctctttctctctctctctctctctcacacacacacacacacacanacaacaanacaaccgataagatgagctgccctgggtaaatgacagcggaggcatggcggtagtaatacttggaccccccgcgagagcgtgcatccgtgccaagggaggacaaaacacacaggcccggccacctacgctgggctccgaatgaccggcgaagtctccggacaaggcgacgctggtgtaccaaaccgctcacacccgtgggaaccacgctcccacccaggtggcagaacaacggggccccggggccaaaacccagacaacaaaggcacaccggac

SEQ ID NO: 639469 - DNA, 146 bp, Homo sapiens
ccatgtaaagccagtttgacgctttgcatcaggtggcaaaattcattctatgtgccgttattgttgttattcacattttattgtaacttacgaggtgaacgacctacgttacaataaaatgtgaataacaacaaaatgaaccaagt

SEQ ID NO: 639470 - DNA, 109 bp, Homo sapiens
gccctgtaggccaggcagcgtgcatcctgcgttagtgtaattagtttgctgtctctcccttccctctgcgctgtatgttctttaatgtgcttgtcttgccccttcccac

SEQ ID NO: 639471 - DNA, 690 bp, Homo sapiens
cccgcatttccccacccttggtatcacggcaagggccattggggcaatttaatgtttattttgaggaccaaatggggatgcggttaggaatcatccgaaagccctgtcccggggtctcatggtctgggtacaaaggcccaaaatcacgattgctccaaggggcaactgatagccccagaatagctccctaaaagacgcataaagccagaattcactgccttcccctccagtccatgaccctgggcccagggaagttttggcgacatataaaaccatgtttgtagggtagacctgtgcattaaacttgggcatgactggaacgaaggatgagcccccctcgaatgtgtttaagatacggcgggcatttttgtaaaggccgcccccaatgtttcccatagagtaaatactgtttaggccccaggagagtttggaatccggaataaagactccctgaagggttgtcctctccgtttttctctgtagcccacgggcctggcctgaaaatgatacctctctcaaaagcatatttcctccaagggcgacaatgtgagctggtgcttcttctggactttaggctggcgccgctttaaatgcctttatataaatgcgattgtagggcaatggacctttaacgcaatccgttcttgtggcgatctgttgatttgtttgcaaattaagtgcgaattccca

SEQ ID NO: 639472 - DNA, 129 bp, Homo sapiens
tacattcgtgtcctattaaaagcctatattgccaggaacagtggctcatgcctattatcccaggcatttttgggaggccaaaactcgttatcatggttacccaggtgattaccttctatgatatggctc

SEQ ID NO: 639473 - DNA, 110 bp, Homo sapiens
ctcttgtacgtgttcagctgtggctgctcagaggttcctgcgtggcttccaggctggagcggagtgatacccttctttttcagctgttcgtgccttcctttcttgtgtcc

SEQ ID NO: 639474 - DNA, 120 bp, Homo sapiens
gaatatagaactcaaagaagcgggagatggatataacgatgatccgtcgagcggtccatgacgatcaccgcggctgtacccagacatgtctgagcctgcaccaacagcatcacagtccat

SEQ ID NO: 639475 - DNA, 1210 bp, Homo sapiens
  misc_feature (510)..(510): n is a, c, g, or t
acccacgcgtccgtcgacccacggcgtccggagctggtgagaagacagcgaaatggcgccatcgcggtcgcccgggccgtgcctccgcgtgggctctcggagagtaggtacgacgatgctagttacgacgtacatatgaacgccttctatcatcgggtagactatccagcattgcataaacgatggcgcagcgggtgaagctatcaagcccagagagagacgtggagagggactgtcttcactgtatagagcgtacctagggcagcagaggaagttcggtgtggtcctaggatgagatcaagccgctcctcgggcacctgagctcctaggccgtgcgcatgttgggctgactacggtcgtcccacgagaagtcggagggacaagcgtcgatggaccgaggctggaacctgaggagatgatgcagggacgcgtggatcgtgacacaagaaacatgcttcctgctcgatggtccagctcactagtcgttatctctcaacgatcgcagtagangctcggaattgcacggatctcatgacggttgcggcttgcatgcgagggagtggacaagaccatggtagatggcatcaggcctactgacaagttgcgaggaattccatgcttgtacaggactggcaccgtcgtgcgacgctcggcccgggaaaggtagctgtcagagaatgcatggaacgtaggacgagggatgcctatccgtacaaccccgagctcgacgactgccttgggtcacgccgtggccacgggtgagttgaaaaagctgctaggatgcgtaattacattctctccaatggaagcatgtgcgtgaacaaagtagcttcggccgacccatgagttggatgactcgaatggggccagggagagacctaggccagatgggccagggccccttgggtaaggcaggtgaagggcctgattgaaggaaggggctaaaccaaggaagggagaaaccacaaagaagctggttcaaccacacactgggccaggaccccaacaccggggggaacggcccccgtagggtgaacacacggtatcacggtccaccagaaaggagaggcccaggaccacacaccctataaaggggcacaagcacagggaagaaataaaaggagtgaaagaagaacccccacgaaggtgccacaaagaatcagaagaacggacgcgcaccgcgtacacaagagcgagagcgggggaacac

SEQ ID NO: 639476 - DNA, 832 bp, Homo sapiens
agcgggtgtcctgggtctctggaggagcccatgaaggaggctccgctgggttccgctgggtcaggcgcttacgggacccgggctgcgagaactcgttatgcgggtcatgtcggcctgcccaggggctggtgacacaggatacctgcctggtaggggacgtgacgtgcgccgacgtgcgcttgtgtgagcggacggtacgcgtgggtcctgtgcgtgcggcgcagatgtggcggcttgccgcgtggtgtccgcgagggagctggctcagacttcaacgcgctatccgctgcaagactctgccgggctggtcgcattcttgccgaggccgacagaccatcacactcaagcacggaagttggcactatcagcttgtgttggcaagattgatacgcgaacgcatactatgatgtatgtggaggttaataaccgcagagttatgtattgaatcggggagggcctgcataatgatagactatccgtcgtcttcagaggaagcgtctggcaggtagtctattctggctaccaggacgctattggcacgcagatgggcacgagagttggctacagtgccgccgggaattgggcagtctaatgttcaccttgatgcctgcatggagaacaacctgttagtagtttgggagcgtacggggcatcccatctctggacgagagctgcggtgatgcacgtccagtgctgtgtaactgtcgaacgtatacccagatggcgcgttggcatccagcatgtcggtgggaaagaagaccgagtcgtgctattatggacagggctatggccatcatcactggcatccctgttgtgtcttgcggagggttca

SEQ ID NO: 639477 - DNA, 134 bp, Homo sapiens
agaagcccggttgccagctttttacgcctcacaggaggaaggcggctgagggcctgtgttctgcttacatcaactttccatttcatgtgggcttcctcatcttcctcttacaccttcactatgacgataccatc

SEQ ID NO: 639478 - DNA, 180 bp, Homo sapiens
ggtagctttggaaaaggctgagttcacaaggaactctcctaagaaaagtaccagaaggaacctgaagatgttggtgtgttggaggctgcctgcagcatctaatctctgccatattgaaggctgtgtttcttgaagatggtcctaggacaggaatgagcccagggactgaaaatcagagag

SEQ ID NO: 639479 - DNA, 115 bp, Homo sapiens
gagacttgagagtaagatcatatgtcctcagaataccttcattatgaatttcattcatttctggccataagcctgctcttgtgtacacgagaatgatatacgttacatttcggtt

SEQ ID NO: 639480 - DNA, 169 bp, Homo sapiens
ctgagtgatccactgtatatgtaacaacacagatagagaaaacattgagggttacttgtgggtgtatgggtgtttacttgcaaagttctttcaagtcttctgtatctttaaatttttgatagtgaactactgtcataacagttctccccatcccttaaggccccttcag

SEQ ID NO: 639481 - DNA, 460 bp, Homo sapiens
  misc_feature (316)..(316): n is a, c, g, or t
  misc_feature (339)..(340): n is a, c, g, or t
  misc_feature (428)..(429): n is a, c, g, or t
  misc_feature (455)..(456): n is a, c, g, or t
cagagggaaatggggccatgtgaatgcagctgctctgttctccctaccctgaggaaaaaccaaagggaagcaacaggaacttctgcaactggtttttatcggaaagatcatcctgcctgcagatgctgttgaaggggcacaagaaattggagctggagaagattgatgaaagtgcaggtgtgtaaggaaatagaacagtctgctgggagtcagacctggaattctgattccaaactctttattactttgggaaagtcactcacgcctccccgtaagccatctccagggtggacggaacccagggtgtatttacctngctggaaccacaaggaaactaanncaatagtgaggtgtactaaagtgaaataccccagataggttgtctccacattaatgccctatgaaacaccaaacccaataaaacaaannatttctctaacacataacaaaaaaannaaaa

SEQ ID NO: 639482 - DNA, 327 bp, Homo sapiens
  misc_feature (39)..(39): n is a, c, g, or t
gcgtcgaccattgctacgttgccagcctctcccagtaantgccgcgttgaagttgtcgccgaagcttccgccctggatagccgtcgagattccgctggagatgaccgctcgaccaccagcacgcaaggcaatatcacctgcggacgtccacgtaaaaatatcgctaggagagttggtgacggccaaggttgaccccgcgctggggctcacgccttggactgctgttgtacttgtgctctcagtgccgctgaaccaattggtgtcagcataagaaagcgcgccagccgtaaaaccggcgacgtcgacgcggccgcggatttagtagta

SEQ ID NO: 639483 - DNA, 1079 bp, Homo sapiens
  misc_feature (257)..(257): n is a, c, g, or t
  misc_feature (612)..(612): n is a, c, g, or t
  misc_feature (626)..(626): n is a, c, g, or t
  misc_feature (996)..(996): n is a, c, g, or t
  misc_feature (1067)..(1067): n is a, c, g, or t
accggtccggcacttcccgggactccgccgccgcccgccacgaccgcgcccacgtactgcgggcgatcgtgcccactccacggccggccacgtgcggcacacccacgactcggggccacacgttctgggaacgtcactcacgtgactgacgcactggcactcgacccccacgcggcacacctaccgtgggcgcctcggaccttgcacgctggacgcggactcacgcgtctacctacccccgacggcctcttctcccncgtaccgtgcctcgcgcccttctggtggaccctggacccccggaacccctggcccgtgtccgctcacggggcctttggccctctcttccggcctgaccacctttcctctttggtccgacgtggggccggcacccacacctgggccaccgggtcacctaccaccggacgggggcggacgctggtggacttcggtcctggactgtggtgcggaacggacgtgtgaaacacctgcgacctgcctgcacgggcttccacgctgaccccacctcgctggggggcggcacgggctccggcactgggcaccgttgctcactcacgcccggtgcgtgacggacgtactcccgacccgcactcntgaaccccctttcngcgtcgtgccctcacccaacggtgtcagaccacggtggtggagccctacaacgccacgctgtccatccaccagctggtggagaacacggatgagacctactgcatcgacaacgaggcgctctacgacatctgcttccgcaccctcaagctggccacgcccacctacggggacctcaaccacctggtatcggccaccatgagcggagtcaccacctccttgcgcttcccgggccagctcaacgctgacctgcgcaactgggccgtcaacatggtgcccttcccgcgcctgcacttcttcatgcccggcttcgccccctcacagcccggggcagcagcagtaccgggcctgaccgtgccgagctcaccagcnatgttcgatgcaagacatgatggcgctgcgaccgcgcacggcgctactgacgtggcacgtgttccgggcgntgtcatgaggag

SEQ ID NO: 639484 - DNA, 325 bp, Homo sapiens
caaggagtattacatgacactctcactcatgaccttggattgcaacacaatcctaaacacaatattagcacatggaacttggtaagcatattacaaagattactacatcatgacaagtcgggttgattttaggaacgctaagactgatctaacagaaacatcaattaatacaattcattagcaaagaaaagccatgtaatttttgcaagttatacaaaaaaggacttgagtgaattaatttatccgctatgcaaataactaaaacatctcttgcacactacggaaacgaataaaatacttttaacctgataagctgcatgtcaaa

SEQ ID NO: 639485 - DNA, 727 bp, Homo sapiens
tgtaattcaaaacagtcactctgaatggtcttagctaagaacaattcaatgattaagtaaggtcagtgtccttggaagtccaaatctctagccagatttccctggtctacacccctagggatacggtaacatgtttaagcacacagtgaacttcctgaggcccccaaatctaatggaactagctattgagggctaaaacgaggatggtttcttttacgaagaactcgaagcaaatctctcaggctggcggatatttcaaagactactacatacttatctatgtaataacaatatgcaatatatgttgagtccctaaatgcaagcatacaaactttgttctaatcacaatttcaatcttccacagcaaccttcatgaggtagataatattgtcattcccatgaggcgagctaacggatcagagcaacggtaagtcacttgtactaaggtctacatagctagcatgttatgcaatcaggagtcaaaacctggtcatgtcctagaatctgaagtccatctgctctgtgcactttatataccgtctgctttttcctttattcactaaccttcttccatgctgaattcccactgagtaggtggacaggaacctacgtgaagttagcctgaaacatagaaccaggcctagtacacctggtctttgcctttgccctgctgtgtgatcttagcctacactgacacaggtccaacagccatggcatgggccaggaa

SEQ ID NO: 639486 - DNA, 246 bp, Homo sapiens
ttggcaggagcagataatcgcgacggcgacatccgcgtgaccagccggagacgcccatgaggaagaggccgcagtgtttccggcggtcgaggtcgtggtggaccacgtggtggcgaatcctccctcagttctgtgctcgaagatcccgaccagcgctccatacagcttacttgactaataccgaatcagatcagactgcagacactgatgcccgcgaatctcatcaccgtactaaccgtcgtaagc

SEQ ID NO: 639487 - DNA, 997 bp, Homo sapiens
gttgctcggagcgcagttactgtctggaacgtgtagttctgatatcgagctcgaggtgtccccgcgcctgtcaagcttgacttctcatcggcttgttctctgtttgcattttccctcccaccggctcgtaagctggtctctcacctcgtccttgggcggacacagctggtccgtcttgtcatgtctgtgagtgattctcatcacaaccagtgctccccatctcgggaaacattgtgacacggtcttacagagaccaccaatagacataggtccttgtggtgacgtagtctgagtgcaagaagctcagttgttacggaggacgccatgacctcgggtcagaatggatccttgggtcaagcgtgcaatcatataaaccctaaaggatgagatgatcataatatggactcttgcctttagtcatcgacgatatctaagggccaacttcagtacaagtggtgtcctcagatatcgccggtattatgacctattcgcctgttgatagacaattacaagggtttgttccgaatatgcgtcggtgaagcctcttttagaagatctaggtttggaagtcattctggaggattctttacacgactatatagactcaacttgcagatttgggggaatgttccattgtgttaactaggactctgatgggggctcaagaatgacatctggcgggattgttgtaatcaagtgacttgtgaaatggatttgttcatgggtggttgtattgtgggattaatgatagtccgtctgtctctattgggacttgcagtctattgacctttgatcatgtgaagtggtgataatgtaattgcttgtaaagtgaggtgggtgtaatgatcaataggatggttccatggggaaaagaagtggtgggaaggattactcgaagtgaaagagactaaaaatattgaaaataagagagcggaaatgtggaaaaaaaaaaaatgtggatagttgtgtattttttgttgtgtatgtttgttagggg

SEQ ID NO: 639488 - DNA, 285 bp, Homo sapiens
tgtgcccagaggcgtgggggcgacatcaacgggcctgtcgccgggtgctggatgagctcactctgtctagactggcctggggatgcgatctgagagcttggatgaagaggtagctacattgaagaagaacccttgggggggttggagggctttttcacccagggtgggcccggcacgtggggtggttgggcccccccggttgtgtttacccgtggtgggggaatagggaggcagccttggaaaaacccgcgctcgttggatgttctccccccgcgtgtaagggtc

SEQ ID NO: 639489 - DNA, 305 bp, Homo sapiens
  misc_feature (19)..(19): n is a, c, g, or t
tccagctgtgcccctaggnagatatctactccggtgggggtgtaggcggtcccgatcctcccgtggcggcgaggcggcgggggcgcggggtggtcgagacagaacggctttccaatgggcggtgtgtggcggttacaacagctacggtggttacggcggtggcggaggcggtggctaccattgcctacggatggcggtggcggtgtgttcgtcctactgtgtggagagcgactacggtaactggcttcggttggcttcggcagctacagccaagcatcagtcctcctatgggcccatgaagagcg

SEQ ID NO: 639490 - DNA, 603 bp, Homo sapiens
cacaattgacgggcggatcggatggatacggatgggggttgtggtgaaccaatgtttcagttccacaaaggctctggcgaacggtggagaccatgtgaacgtgtacttgtggagagatgagtggcgaagaggaggggcggcagggtgatgttaccccaaatggaaggcgggagaagttaggaaaaaccaggaaacgtttcaactggacgtaggtttgaggcaatccaactgctgctttccaccagggatcccatctggcacatttcccctcagcgatgatatatccccagaaaggagattgtagagcggtggaacttacacttctcggctttcacgacagtggttctcgaggaggtgcttgaaggacctgttctggacattgagaacgtgttcttggggcgaccggggaaaaaaatcaggatgtccgtcacggtagatgaacaccaaacgtgttgagcatgtcccggagcacatccggtttacctggaagaaggtatccgaaccaggtgggaaggtctagcatggaaaaatggtgacctctggagaggtcaaaactgaggagaggtgtatggggtacgatcttaaccataatgtattagaccg

SEQ ID NO: 639491 - DNA, 258 bp, Homo sapiens
  misc_feature (19)..(19): n is a, c, g, or t
caggtctcagatatgcttntgtatatctgtatggatagtatcattgtgttttcatcatgaacacctgatgtttggataaatctattggtcatatgcatcatctataaacctgctgattttcatttggccacatctaatttcagatacctttaatctgtgtcccacaatgaggtttgttttcttttgccatttgttttgaatttttgggatcagagctatactaaccttataatggaaaatacatatttctcaaacttt

SEQ ID NO: 639492 - DNA, 183 bp, Homo sapiens
gcaccgttggtgttcgtgccgtgtcagttgcccgccatggctgagctggatccgtttcggcgcccctgccggcgcccctggcgtgtcccgtgcatggtgcgatacggcagtggcctcggggaccggtcgaccgaagatcccgggtcatgacgagccgttcattggggcgctagacacagagga

SEQ ID NO: 639493 - DNA, 396 bp, Homo sapiens
gcatacttctctatgcgcatgatgatcctgactaacattagccagtctcttttagcacattgtccgagcccgctgcttactttctttctttctttttcttgagatggagtctcactctgtggcccaggctggattgcagtggtgcgatctcagctcactgtaacctccgcctcccagcaaagctcagtatcttcatctgtaaaaccgttcattcattagcagagttactcactgagcatctactatgtgctagctaatttatatatctttagcaccgatgggatttcaccagcttgaccaacatggtgaaaccccgtctttcctaaaaataaaacaaactcagcagggcgtggtgacacacatctgtagtcctagctactcgagaggccaagcagt

SEQ ID NO: 639494 - DNA, 319 bp, Homo sapiens
cttcatgccgaccgacgtgggagtacgacacaaatcatccacagggcgcgttcaatgtctctgtcgcagcccgatatatcccctcgatcggaacaagacatatgctactttgcgtgtggccattaatacacagtcactcttaaagaatgcgctcctgtgatcacctctggtccattacctttttcccttgttttaaaaattctacccctggaactgtctccaaacccaacaggaccttgggggccaaggctccctgcagggacctagctgctactcctggagcccctgctaatccaaatgcagaggaagtgaaggggag

SEQ ID NO: 639495 - DNA, 310 bp, Homo sapiens
  misc_feature (282)..(282): n is a, c, g, or t
gttatccaaaatttcatggaaggaccaccttttatatttattgtgcttcgagtgactgacccccgtggttgatcctgggacaagtaccgcccggagtgttaagcgttcagtgatgtggggtgaaaagttactacctgtcaaggtttgtgttaccctcctgtaaatggtgtacataaagtattcgtggtaattattttggacttttatgaagtatatttattaaacagagtttttaccaatgaaaaaaaaagaataaactagtctcaggcatctacgtcggtncgagaagagtagtgtctcgttctctgtt

SEQ ID NO: 639496 - DNA, 151 bp, Homo sapiens
agtaaagtagttgagccttcagaaatgaatagggtctcttcttccacctgtgacatcattcctatagctagatgtcagagtagaagttgaaggatgggctttatcttctatccagccttcatgtgatgtatagaagccctgagaattattc

SEQ ID NO: 639497 - DNA, 710 bp, Homo sapiens
  misc_feature (27)..(27): n is a, c, g, or t
  misc_feature (85)..(85): n is a, c, g, or t
  misc_feature (143)..(143): n is a, c, g, or t
  misc_feature (159)..(159): n is a, c, g, or t
  misc_feature (175)..(175): n is a, c, g, or t
  misc_feature (224)..(224): n is a, c, g, or t
  misc_feature (287)..(287): n is a, c, g, or t
  misc_feature (293)..(293): n is a, c, g, or t
  misc_feature (301)..(301): n is a, c, g, or t
  misc_feature (370)..(370): n is a, c, g, or t
  misc_feature (538)..(538): n is a, c, g, or t
  misc_feature (562)..(562): n is a, c, g, or t
  misc_feature (572)..(572): n is a, c, g, or t
  misc_feature (578)..(578): n is a, c, g, or t
  misc_feature (602)..(602): n is a, c, g, or t
  misc_feature (623)..(623): n is a, c, g, or t
  misc_feature (628)..(628): n is a, c, g, or t
  misc_feature (671)..(671): n is a, c, g, or t
gttttttttatgttttttgttgatgcncaagttccccacattttttatcccagatttgggaagctggatatttttcgtgttgttntctccccatagctggtttgaggttgtggtttatacgcaggcacaggtaggtgattttnagcatcaacgcagatngaggggagggtgagcngtcgtgggagaactggcccaagaccagcacctggctggtgtcgccagcnccggctgcattggtgggtgaggcaggtctggctggagtttgggtttgtaggattggtcggggnaggttntgggggancaaggagcctgggtgtgaaccccaatgtggaggcagcaggacctagtggtgcactgggaaaaccggatncaggactacggatgttaacaaatgcgtgagttttggcgtttacacccccctcggggccagtgggtgagcagtggcccgtggtccccgccagagctcccccagagtggacttggctccgcgggacacagtgccctgctctgagctgccgctggctgctccacgtctganaccacgcgacgttgcctcatgaantgacgtgganagcagnaggggagacgctggggtggttctntggccaaacacagcccgtgtnaggancacaggccgtgcccttttcccagggggcacactggggcatttntcaatggccttcacaggaggcaaaggggcacacagaggc

SEQ ID NO: 639498 - DNA, 374 bp, Homo sapiens
  misc_feature (7)..(7): n is a, c, g, or t
  misc_feature (28)..(28): n is a, c, g, or t
  misc_feature (58)..(58): n is a, c, g, or t
  misc_feature (110)..(110): n is a, c, g, or t
  misc_feature (357)..(357): n is a, c, g, or t
ccccccngaaaaaacctcctaaattaancattgaaagaagttgcggttccttccctcnagaaaatgcactgccgaaagtacagaaaagtaaactggatgtagtttttttnttttttttgagatggggcagtggcaccatcatggctcactgtggccttgacctctaagttcagatgctcctccctcttcagcctcctaggtggctgggactacaggcgtgtaccaccacacctatttttttgttttgttttgtattttttgtagagatggggttttgccccgttgcccaggctggttttgaactcctgggctcaagcgatgtgcccacctcggcctcccaaagtgctgggattactnatttgagtcaccatgcc

SEQ ID NO: 639499 - DNA, 633 bp, Homo sapiens
  misc_feature (402)..(402): n is a, c, g, or t
  misc_feature (407)..(407): n is a, c, g, or t
  misc_feature (427)..(427): n is a, c, g, or t
  misc_feature (443)..(443): n is a, c, g, or t
  misc_feature (447)..(447): n is a, c, g, or t
  misc_feature (449)..(449): n is a, c, g, or t
  misc_feature (541)..(541): n is a, c, g, or t
  misc_feature (543)..(543): n is a, c, g, or t
  misc_feature (552)..(552): n is a, c, g, or t
  misc_feature (571)..(571): n is a, c, g, or t
  misc_feature (584)..(584): n is a, c, g, or t
  misc_feature (596)..(596): n is a, c, g, or t
aattaaaaacccaacaaatgtttttaatacgtccctttttaaacccctttttaaaagcacaaggtttttatatttccaagctgttgatatctttctaaactgttttaggttatagtctattgaaactttttaaatccaattttataaatataaaaattataattttatattaatgggaccaaaaatacattttttaaggttaaaagcatgcccttcatgcatacttgcttttggggagagtggggagaacacattttaataatcagtttgtgaaatagcttctgttggaaaccttttgaggggaataaggaatggtcatttaaaatgagagattttggattttaatgcagttcaaagttgacccgtatttttgttgttgattaatcgggattttttttaaanccttntaaaacccagtgaattcaancccttaattaggacanactntnttatgtaatgcataaagcaatgccagtccctgagaacatttaaatatatttatattcctggagaaacccattctcatttttgttggtttatnanaaattattnttctaaatgcatcttttanaactaggatttcnttttgtgggtanagcttatgtaataaattttaaaggtgaaaactctctt

SEQ ID NO: 639500 - DNA, 315 bp, Homo sapiens
ggcgctagcagcgcgtgacttagtgtgtccccctcgactcccttcacacaaatcccgccacaccacggaaattcggggatactccccagagggtcccatccggccacgctccctccccccattcaccgatccccgaaccaacccacgtctaccactcccccaacctccatccctccgggccgatacaccctcagtctatactcgcacgcgactccacctcgtggaaatcccccgccccgaaagcaccctgccccgccctactccatccatgctcggcagtgtaattgatgtggcttgcgcatgatacggggggaa

SEQ ID NO: 639501 - DNA, 949 bp, Homo sapiens
gctcgcactctgttcttccgccgctccgccgtcgcgttactctgccggtcgctatggcacatgaatgagatcgccgcgctggtcattgacaatgagctcctggctagtgtgcaacagcatggtttgtagcatggggactgacgcatccctcggagtcgcgtgtttgtcctatcctatctgtcgggcgacccctagacgaccaggggcgtcatggtgggcatgggccagtaaggactccatacgtgggctgactgaggcaccagaagcaagacgtggcatcgctgactcgcttaagtaccccattgagcagtggcatcgtcaaccagactgggacgacgatggcagaatgatctggcaccatgaccttcatacaacgatgctgcagcgtggccccggaggagcacccagtgctgctgaccgaggaccccctgaaccccaagggcaacagagagaagatgactcacgattatgtttgatgaccttcaatcagtccctggccattgtacgtggctcatccaggccgtgcgtgtccctctacgcctctggagcgcaccactggcattgtcatggactctggagacggggtcacccacacggtgcccatctacgagggctacgccactccccacacagcctatcctgcagttctggacctggtggacgggactgaccgactacctcatgaagatcctcagatgagacgaggggtaccagtttcaccaccaaggacgacgcgggaaatcgtgcgcgacatcaaggcagaagctgtgctacgtcgcctggaattcgagcaggagatgggcaacgacagaatactcctcattctctggagaagagcctaagaagctgccgatggccaaggtcattcacattggcaatgagcgagtccggtgtcgagaggcgctgtcaagcttcctactgggtatggaatcttgcgggataccgaaac

SEQ ID NO: 639502 - DNA, 248 bp, Homo sapiens
cagttggaaatgagaattcataattaccagcaaaatttaaggaaaactacggctgctgggttgggatttctgccagctagctggtacgggcttcttgtttcaagagatgaacctaaatgagataggaagcctgtcccatagcagccttcctctcactactttccgggcatttaatgcaacaaacttatcacactcactcaccccccacattaacaacataaaaccctcattcacacgagaaaacccca

SEQ ID NO: 639503 - DNA, 917 bp, Homo sapiens
  misc_feature (213)..(213): n is a, c, g, or t
  misc_feature (385)..(385): n is a, c, g, or t
  misc_feature (430)..(430): n is a, c, g, or t
  misc_feature (598)..(598): n is a, c, g, or t
  misc_feature (726)..(726): n is a, c, g, or t
  misc_feature (787)..(787): n is a, c, g, or t
  misc_feature (892)..(892): n is a, c, g, or t
tggggatcctgggaggaataggagaagccgaagcgtggcctgggagattggcagtagcagtcgtagaggcctacgtagttgggaggttgagacttgtacataggaacgggaggcctccataatggctagtaacacaagaggacaggttaagctgtgtgatttggagttagcactcagctggtgaattctatagccaagacgtatgttggaacnaatgctatatggcgcctgaaaggatttcaggggagcagtatggaattcattctgatgtctggagcttaggaatctcttttatggagcttgctctgggaggtttccatatcctcagattcagaaaaaccagggatctttaatgcctctccagcttctgcagtgcattgttgantgaggattcgcccgtccttccagttggagagttctcggagccatntgtacatttcatcactcagtgtatgcgaaaacagccaaaagaaaggccagcacctgaagaattgatgggccacccgttcatcgtgcagttcaatgatggaaatgccgccgtggtgtccatgtgggtgtgccgggcgctggaggagaggcggagccagcaggggccccngtgaggctgccgcagggcactgaaagcccaggaccagtaaccaaggagaacaacccacccgtcgcccttctccgtatgctgcctgcgccagaagagctttgctgggcctggcttccctgccctcgccntcacctctgtcagcaggtggccttgcctggggagccccatgtgtggcccaccccaccaggncatccccataccttctggtttgaaggcgctgacactggcagagaggtaaagggtggggcattgagaatggaggctccacagggtacctgcccacttctgttttcntaatcttcttctgtataaagagtaa

SEQ ID NO: 639504 - DNA, 393 bp, Homo sapiens
  misc_feature (340)..(341): n is a, c, g, or t
cagtgttattaacaatagccaggaggtggaagccacctaaatgtccatcaacagatggatggataaatgaaatgtggtctatacatacaatggaatattattcagctttaaaaaaggagcaaatcctgccatgtgctacaacgtggatgaaccttgaggatgttttgctaagtgacataagccagtcacaaaaagacaaacgctgcatgattccatttatatgaggaatctaaagtagtcaaactcttagaaagtagaatagtggttagcaggggttagggggaggggaaaaagaaaagttactgtttaatggctatagagtttcagatatgcaatacgnnaatttctgggggattcttttgcaccaccaatgtgcaccgtataattccactt

SEQ ID NO: 639505 - DNA, 868 bp, Homo sapiens
  misc_feature (868)..(868): n is a, c, g, or t
atgacaaaaatcacatgtttatcttaatagatgcagaaaagtccttgacaaaattcaacagcctttcatgctgaaaactctcaataaaccagatatgatggaacgtatctcaaaataataagagctatttatggcaaacccacagccaatatcatactgaatgggcaaaagccgcaagcattccctttcaaaaccagcacagggcaaagatgccgtctctcaccactcctattcaacatagtatggaagttctggccaggtaatcaggcaagagaaagaaataaagggtattcaattaggaaaagaggaagtcaaatgtctctgttgcagatgacatgattgtacagttagaaaatcccattggtctcagcccaaaatctccttaagctgataaaaaacttcagcaaagtctcaggatacaaaatcagtgtgcaaaatcacaaacattcctatacagcagttaacagacaaacagagagccaaatcatgagtgaactcccattcacaatgtgctacaaagagaataaaataccaggaatcaacttaaaagggatgtgaaggacctcttcgagaataaaaaaccatggtcaaggaaataacagaggacacaaacaagtggaagaacattcatgtcatggatagaagaatcaatatcatgaaaatggcatacacccaagtatttaaagattcatgctttccaataagcacaattatttttcacagattggaaaactattaaatttatggagcaaaaaaaaaaaaaaaaatgttggggtcggcgaaatttaaaatgggggggccaagagaaagtaagaagaacggggggggtacaaaaggggggggaaagtgttgtcacagcacgcgccgn

SEQ ID NO: 639506 - DNA, 358 bp, Homo sapiens
cacgagaagaagtcgatgtttccaaacagcttcattcaggaggtccagagaatgatgttacaaaaatcaccaaactgagacgagagaatgggcaaatgaaagctactgacactgccaccagaaggaatgtcagggctacaaaccactgagtaagcagcagttgcaccagaagttgactgaaactcagggagagctgaaggacctgacccagaaggtagagctgctggagaagtttcgggacaactgtttggcaattttggagagcaagggccttgatccagctttaggcagtgagaccctggcatcacgacaagaatccactactgatcacatggactctatgttgctgttgctttgc

SEQ ID NO: 639507 - DNA, 253 bp, Homo sapiens
agccccgggggggggggggccaagtggttccaaaaaaacctgtttttgaccaaaacccctggggtgggggcaaaaaccccggggcggggtttggggccaattgggaacccggggttttttggttttggtctgggggaagggggaagccccccccccaagggggttaagggggatttttttttttgccccccccccggggggggggtaaaggggcccggcgggggggggccccggaaaaagggcttttttttta

SEQ ID NO: 639508 - DNA, 468 bp, Homo sapiens
  misc_feature (468)..(468): n is a, c, g, or t
ccagcttggatgacagagaaagagctggtctctaaaataaataaataaataaataaataggctcagatggtggtggtatcaacattttcatgccagtgatttattctataactccatttacattttgtttgaatttccctttcagtaatattacatttcatttcttggcttcattttcatctttattggtaaattcactctttcaattagccatttttaggaaatgtcatatgaggtgattactgggaaacacataggaaacacaatgacatgctttattgtttgtgaatgaactgagcaagagatgcccagtgagcaaccatcaatgactttgaagagtgatgtagttggtcacctattataatgtgcatctgttatttacatagtgatttgtggactgaagagctagcaacaaagtttgtactttattcaatgattaatagttaatatactatggtaactgaaacn

SEQ ID NO: 639509 - DNA, 452 bp, Homo sapiens
  misc_feature (8)..(8): n is a, c, g, or t
  misc_feature (267)..(267): n is a, c, g, or t
  misc_feature (335)..(335): n is a, c, g, or t
  misc_feature (350)..(350): n is a, c, g, or t
  misc_feature (395)..(395): n is a, c, g, or t
  misc_feature (402)..(402): n is a, c, g, or t
  misc_feature (436)..(436): n is a, c, g, or t
  misc_feature (450)..(450): n is a, c, g, or t
tatttagnagcattcaagagttagattgtaaataaacatattatgagtaattaagatcgccatttattataaataccaactaagttaaataatactattttaactatcccctttgagctggagttcagataccttttctcaaacatgaataaaatctttagtgttgtgttgccttttctttcaccatctggacccaaagcttccctttataaactaaatgagacctagaactcttgacagagccttcttcccatctattctaatggnaaactaacctttctgtgggttagccccaaagcattacttcctgttctcggctttctagggctggatanctcacaaggggattncacacattcggaaaagtcagcagcagttctgtgtctttcacccanacccganttactgagatgagtatttgcacatgctgtccttncaatccactgtganag

SEQ ID NO: 639510 - DNA, 158 bp, Homo sapiens
gatctctatgaggatccccatgactgcacgagcggtatgcacacgttagaacgggaagaatgggtggcaatggtgtgctcctggatggagctcagcccagcgagaggttgcccttgagctcggggcccttggtttcctgtcccctggggatatttata

SEQ ID NO: 639511 - DNA, 356 bp, Homo sapiens
tctggaccgtctcatatactaccagatgaggttgggtgtggtgggtcatacctcaacccagcacttaggaggcgaggaggagggatcacttgaacctagaattcgagctcagcctgggcaacatagcaagaccccatctctacaaaaaattttaaaaaattagccaagcatggtgctgtgtgcctatagtcctagctactcaggagtctgaggtgggaggatcgcttgagccctgggactttgaggctgcaatgagctatgattacaccactgtaccccagcctgggtaacagagtgagaccctgtctcagaaacaaacaaacaaaaacagaaggtaggtatgatgaaggacggga

SEQ ID NO: 639512 - DNA, 793 bp, Homo sapiens
  misc_feature (661)..(661): n is a, c, g, or t
tctttcgcgcctctccgcgctacttggccaccgtcggtgtggaaccacccccatctggcactccctccttgaggccggcccccctcggatgccctgggtacataagggtactcactcctgcgagtctcgccgtcgtcttgcctcgcggcaacgccacaaaatttctcccgcttccacgcgaagcgccgaacggtcgaacatgtctgcttctaaaagcaccccctgggtgacgcgccagctcgtacggcgctcatatttatagggagctgaccaccaaggggcagccccaaataaaatgatatgggggtaaaagagcggagtttccgttcagataaattccacgactcgcgaatagactagatacaactacggttaagacatgatgaggttttcagcgtccctcttacaagactggtacttgtcgcctcgagagagtgctcacatcgtgcttcacacagagtggtgagcactcacctctctgggcgagagtataccacagcacatctcagagtagcgacgcggctctctacatttgtttcgccaatacaaagtacatttttgcggctacaaaaacatatagtgcccgactatattccctctgtcaaacacttcacaaacaccaacaatacttatcttcgcgcaatactaattgtctgtaaangtagatcaccaccccccggtgaactattatacacttacgtgcatcttaaattgctaaacagtcgtcccacccccttatatttgttgtcacgatacacatactccccccaacaatcccccactcaacaaaaca

SEQ ID NO: 639513 - DNA, 735 bp, Homo sapiens
cggcggggggagcagcaacggtgctgcctgggccgccctgtctcatccctccgtccgggccatgggacgcgtgaggagccggaccttggattgtgacctgcgggcgaaagaatcggttaaacggaccaggccaaggcggggagtgccaggcagcgtaggccagcggtggcgtaccaccatccgtcctcccccggtgccgccagcgggcccgtttaagcacggaatgccgacctgcctgctgattagaactgggggagggggaggggaaatgctgggaaagaccgaaccactgggcatgcagctcagagggggaactggaaagaaaagcacaaactctccgctctctctgttagcttgtcatgtagcgataggaacaagaagagccagcaagcttcacagccttctgaaaaccgcttagagacgcgatttggccggcggaaatatttaacttagcttggccccacctctgtgacgctacctccccgagcaccgacttgtgttacgcccgggtgtaaaccagtccattgagctaaagccctagacggagcccagacggaacagaaccaaagtccaccgagggcgacgggatagaacggcgattggctgaacaagtatcgcgcttctcagagagtgcgactggcccgaaggcacacgaattcacctatcacacagcgcggagcgcagtggcagtaaactcacagacatcgaacgactggacatatcaagtccatccca

SEQ ID NO: 639514 - DNA, 410 bp, Homo sapiens
catcattttgtcttggtgtgtgctgtgttgggaagctttggaggttcctaggtacctggtatctggctcccagcagcagctcctgttccttgtagatccatgggctcctttgtgaacagcatacgtttttctccatccttctcactgtggtggcagccttgttcagtgtgcccaagccatgtttggtgggacccaaaaggcaatgtgagaagcagagtcttcatttttggcagttgcttttgtttatttttcaaccagatagctgttgtgtttttttaaaaatgtaagaaacaggactgaaattgtaaatactttgtaaacacaagcatttgtacttgaataggattttaaaaggacaagatgtcctactaagcaaaggctaataaataacctttctacaaaaaaaaaaa

SEQ ID NO: 639515 - DNA, 250 bp, Homo sapiens
ctcgagtacgcgtccgattgtgcctgctgttggcggcgcaatatgcctcctatgcccattaattattcctggagtatacatagtccggccatcgttaacaatccggtaccacttgaagtatatctagcatgcgcaaatttatagcgcccagtatctatcgctgcgcagatctatccatgatgatcattgcatgtctggatccatctatcgagccccggtttataattacctcaggtctatatcccatggg

SEQ ID NO: 639516 - DNA, 922 bp, Homo sapiens
gcctgaggcagttggctcagacaggtcccccacaagctagaataaccctaaagttcaatagatcctgcacgtcaagaccaacctgctcctgcaggctacactatgtactacgcatagcagctagagtagctagcagtatagcagtacacgataactggcagggaacatacctataagtaaagggcaatacctggctacataccgagggcctagctgtaggcatatgtacctatatacccagtcacataggggtaaggctacaagccctagctactaggccagctaattaggaactagggcgccgagataggtacacccgaagaccatagtaggtaccaaggcactcatacctagaagcagctagccacacttcacctctgagcatatcaaacgttgcacagacaagggagtggagagtgttttcgacatcatggagatggaggatgaacgaacgggaacgcgtatgcttcagcttgactagacagcccagattgcagatgttggctcgctacccggtaaccggctaacccttaattcatcgaactattctatattgacggtaggtagcatacagggacagcattccgcacgtggcgggcccaggtagctgggtggcagggctgcaagccttggagccgaacaacgggagggaaagcatcaacaaggacccctgatcacttgggccccccatctatctatcacacatcacgaaaaaaacgatgacacgacggggggcctgcggtaggggcatgggccgactcccggggacgaaatggccccgggatcccacaactcagcccccatccattacctaccccaattccaacacgaaaggcaccttagaagccccatctcgcaagtccacccacaccgggcccccaaggggttatccaaccgcttacggcaccctacaaggccacgg

SEQ ID NO: 639517 - DNA, 260 bp, Homo sapiens
acaaatagcgacctcctggagaaaaatcgaaaacggccaagtggatacctcacgtggttcacgtctgaacaacggcgaatgtgagctacctcagaaccagtacccgaagttgctggaaggcaaccacatttggttcaaacgaggcgtggaagaacctcacgacacgcttacggagtccatgaacgcttgttgcaatccaggaacaattccgcgacacccttcgtctgacaaaaaaccttcgtgacgcgtcgagtatccgc

SEQ ID NO: 639518 - DNA, 328 bp, Homo sapiens
gattgcttgagcccaagtgtttgagaccaacctgggcaacatagtgacaccttgcctttacaaaaaaaaaaaaaaaaaaaattctagatttaagcattttggtaatgcttccatttcactgcttctttcttaactgttttggtgtgattgcgatccattttgtagttcactaatttggtatttaactgaactgatctgtcagatctatcaaaacatgggctgttgatacaatttgagctatttcttcatcgtacctgtgtttactttgagagtttatcagcgaatgtttatcaggaatttggaagcctagcagccaggtgaattctag

SEQ ID NO: 639519 - DNA, 407 bp, Homo sapiens
ataaacctttttttctacatcaaggaactagtctaaaccttattccctactgtttataaaggtttttcgaccacttttagctaatgggagttaagtattttccacaggtaaaagatccccttcagtgtcttaagttccaatctctcaatcccagaggaccgtcaccatgaagttgcagctcgtgctcttaacgtccagtgatttataagctatgcccgcgaacaggccagcacatgcgttcacataaactcttttgtcaaactccagagcagattttgtattaaattcccgttatgaaaccagagacctatttatatccttttcaaagtttttcatagggttctgatcaaggaccgatgcacatgccttgtgctagttggtagctcacacatgttagtccagcaccc

SEQ ID NO: 639520 - DNA, 680 bp, Homo sapiens
cccggattatgcgatgaattgaacctcaaaggttacactgtccagctgagaagaataaaccatccgggcgctgtctctctttgatggaatagctacagggctcctggtgctaaaagaacttgggcatcaggtggaccgctacattgcctcggaggtgtgtgaggactccatcacggtgggcatggtgcggccaaccagggggaagatcatgtacgtcgggagacgtccgcagcgtccacagaatcatatccatgagtggggcccattcgatctagtgattgagggcagtccctgctaatgacctctcctattgtcaaccttgcttgcaagggtctctacgatgggcactggccgtctcttcttagagttctaccgcctcctggatgatgcgcggcccaaggagggagatgatcgccccttcttctgactctttgagaatgtggtggccatggacgttagtgacaagagggacatctcgagattactcgagtccaaccctgtgatgattgatgccaaagaaatgtcagctgcacacagggcccgctacttctgggataaccttcccggtataaacagggcgttaaaatccattgtgaatgaaagctggagctacaggatttatgacctggcaggtagccattcagcaagtgcaggacttattaaaggccatcctcgaaggt

SEQ ID NO: 639521 - DNA, 151 bp, Homo sapiens
agaggctgagaccgaggagaccaggcagaagaagatgaagaagaagaggagcaaggaggctgaagatgcccatgaggagtccaaccaagccaggcgtcagccacttgtgctccagatccgatgagagagagtgacttgatgcatcaccgag

SEQ ID NO: 639522 - DNA, 146 bp, Homo sapiens
acggtccatgctgatacgtgcttgatcttgtgcaggacagcaatctcgttctccatgctgccttccttgccctccaggacctccttgaggaatgcattgggatggcctaccaggttctacgttcctcgttatcttctgccaggatg

SEQ ID NO: 639523 - DNA, 213 bp, Homo sapiens
  misc_feature (150)..(150): n is a, c, g, or t
tcacttgtctttcctggcctaatgtcccttaggtcttttccatctctgacattctttgaggggatgatccttttaacacttcttactatgcattcattaatctaccaagttgcatggcatgagctcagctggcttgaggctagtcagacncattggatcacatgtttcatccctgtaggaaggctcttgctgtatttcctgaacttcagactc

SEQ ID NO: 639524 - DNA, 121 bp, Homo sapiens
  misc_feature (112)..(112): n is a, c, g, or t
taatcagaggctaccaactacaatggccacacgtgtctacacttagcctctatccatggtctacctggcgcatcgttggagctttttggtgtcctttgggtgctgatgtcanatgctcagg

SEQ ID NO: 639525 - DNA, 270 bp, Homo sapiens
gcacaccctcgagcagatacacacacactatattgtatctatcatcatgggatgttgcaaagatgcaagtgagctaacatatttaaaatgcttatggccgggcctgggggctcaggcctgtactctcagcactttggaaggcaggtggatcgcttgagcacaggagtgagagaccaagctgggcaacatggcataattttgttgtatcttgtgtagagacaacattttcgccgtggttgcccaggtattgtctccaactttctgacgctc

SEQ ID NO: 639526 - DNA, 818 bp, Homo sapiens
agcggcttctgcggctgcttaacccacttgttcctcacgccactgacccagcccaaggaaccccaaagctgctgaccatgagcaaacctaatggcccacaccggagtcatgtaaataagtcccctcttcacacatgtttactttaaactccccagtccgcaactccagcaggaaagcctaagggataacgcccacggagcttaggcctggccccacaggccctcctcctctcccccaactctccacacactaggagagctatctgccactcctggacatcctatcagcgcccccagaagcactcccgacctctctggaactttattcactcagggtgatcagatgtctattcaaaacagccaacaatgagctaaaggagtgctgttccagccagaatcctactgctaccacaagtgatgaaagcacaagaaatcctccacaaaggtattctacaactaaacttctgaactaagggttggagaaaactggctctttaaatttcaaaataaaaatcagtttgtctatcaatataaggcaataaatactcattcaccacctctcatgtgccagtaatttctagggcccctatagaaatctgactgctgtgcacataggagggactgacacaaagacttcagtcaccggattcttgggtggtctaaatacgaagagacacttccgggttcctacgatcgctcgtccatcactttttaggattatgattttctaattatttaccgcacctgggactgccggtgatctgcgggtatccgcgcgagggacgaaggcccctctggcgggacctcaggcgcggtccg

SEQ ID NO: 639527 - DNA, 191 bp, Homo sapiens
caccaggagtggcaagaccaaccaagcatggaggaggtgggtctgctcagtcctatgcagcgccggctcagagcaccaacgaagacctttctgaccaaagctctcatcctacccatgagaaccatcatactccagagactaaaaaacgccagtcccagctggagacggggaaggaggtccattcctatggg

SEQ ID NO: 639528 - DNA, 575 bp, Homo sapiens
  misc_feature (12)..(12): n is a, c, g, or t
aggaccccaggntctttcccctcaaattatgtggcttaatagtggtgcctgactttaaagggaagatgtaacgatatctagaataaattatttcatatattattaacactggttgctagtaaaatgtacatacttatattgtaggcatcatgtagtaaactttatctgttcatcatgaaattagtggttctcaactttggctatacactagaattacctggaaacttaaaaatattgatgtccaatccaatttaaatgtaatctctagaggtagactcagaaatcagtattttttaaagctctacagatgatttcacagggtcatcaatgtggatagctgttgcaggaaaccaagaagtggtgttttgtaatagcacaaatatatttataaaatgttttctatagccattttttaatgtagtaattgagcacaaagttgttactgaaaatgctcctaaataaatagtccatggaacaattttattttgctgcaacaggaaaaactgagtcaagctctacaaggtaaattatgctaacaaaacaccaagaaaagaaaatatttcgaggggaaaaga

SEQ ID NO: 639529 - DNA, 216 bp, Homo sapiens
tttttataactaattaggctaaaaaaaccttcaagccccttccaatggaatggctaagcctgatactgttaagagttgctgaggtttttttagcctaattagttataaaaaaaagatttaagaccagaaattgctaaagccataaaagccagtcaatgtgaagccagatctgtcgttcaccaagatgaaggacaagccaggctgagggatcggcat

SEQ ID NO: 639530 - DNA, 539 bp, Homo sapiens
tctcagcgcaagtgggagaaaaggttaaaatcacattggattacagaaatttagaagatgtatgggccaaggcagattttcttctggaatgtgcctctctccggaggccaaagtcaagaaaatatgacatattcacatattggtggtcaacttatgcagcattactcatacggtaggtagttaacatcaacttttacaaacagcttctaattataagacattaagaagcatgacagtggaaatatataaaaggcagtagctaaattggggggtggagatgtaaacatgatgtaatcttcctcatttttcctttaaaaatcggtctgggccgggcgcgggggctcaggccggtaatcccagcacttggggaggcccaggtgggaggatcacgaggtcaggagatcgagaccatccgggccaacacggtgaaaccccgtctctactaaaaatacaaaaaattagccgggcatggtggcgggcgcctatagtcccagctactcgggaggctgaggcaggaagaaatggcgtgaaccccggga

SEQ ID NO: 639531 - DNA, 116 bp, Homo sapiens
attcgccctgtgagatggagttcttcatagcatcgactagtctttaacattatggaatgttctctgcagtggctggtactggttgttcctttccatgtttaatgcttcacttcagc

SEQ ID NO: 639532 - DNA, 193 bp, Homo sapiens
tgcactaatatacgtatgcacatattacccatatcttaatattctcatcaccaataaaatttaaacaaatacacctactcctcacgaagcccataaaatcaaaaattataccaacctgagaacaaaatgaacgaaatctgttcgcttcattcattgtccccacaatactaggactacccgacgcagtactgat

SEQ ID NO: 639533 - DNA, 130 bp, Homo sapiens
agaggatccccccttgtaaaggtgttaacaggcatccaaaggcatcgaggtgcatttgaaaagcccaggccaagtattgccaggatcactattgtccaagtaatcatgtccatccgcaccaagctgctag

SEQ ID NO: 639534 - DNA, 313 bp, Homo sapiens
tgtggagggtgaaatatactccatccagtgatttcttctttgtgctgttgagaggagctggtgttgtaagtcagtgcacgcttagttgctccctgggggcagctcgaggtgaggctccccttacttgcggagattctcttcctctgtgcgcctgtgtctctcccagtgacaggcacaaacactgcacctcaaagctgttccgtcccagtagattaccactggagtcttccagtgtgatgatggtgaggatgggactccggtacatgccgcccatgcaggaacagtaacaattgtagttagagtggatggtggt

SEQ ID NO: 639535 - DNA, 647 bp, Homo sapiens
cgggggggcagaggttgccgtgagccaaaatcatgccactgtgctccagcctggcaacaagagtgaaacttcaaaaagaagaagaagaagaggaggacggacgaaggagaagacacgaaccggaagaagaagaacgaagaagaagaagacacgaagaagaagaagaacgaagaagacagaacgaacgaacgaagaacgaccggagaacgcaagcacgaacgacgacggaggacggacgacggaacaaacgaaacgggaagaaagaagcaagcaagcacacaacacaaacagcagaaacaacaaaaacatacaaaggtgtggggcggcgcccaccccccctaggaaaaacgttctcaacaccccacttggggggggggggcggcggccccggataggtttgaagtgacgacttggcacacaggtgtggctccccagagaagactctgccggctcacaagacacgggggggctggggttctcctcacaaaaaaaagaaacgcccggggggcgagagacgaagcaaggtggtttgtcgaacaaaaaattccgagagggaggttccgcggagacacagcggggggatacaacacaagaggacgccgacagcgaaacagcaaaaaaaaaaacccgcgcggcgcggggacact

SEQ ID NO: 639536 - DNA, 572 bp, Homo sapiens
cccctgtgtcgtaaatagtccctgttaacccccgtctggtccccagtttttgctttgccccgagacaagggattgttattattcctcttggggggctctcccagggcacagggtgttaggccctgcattctaatgagcccggcgtggtcagccccaagccccttcgtgcctgtgaaccccctggggccctgatctgcgttaggaactttgcgtgctgttctttgtttgcggactgtgaatggaaaggttggaatggaatgggtggatggccggtggatggccggtggaaagcgcagtgccttgcataccccaaccacggtgggagcgcttttgttgagcactgacaagcctgcagccggaatactatgtgtgcctatttgtgtggaccaaaatagttacaccttagggtttggagctattccagaggaaatgctcaccacagagcagctaaaccccaggactgagcaccctttggattttgaatttcaaagatgggggcacgggcttgcttgaaggccctgctgagtcatctgttagggccttggttccataaagccctgagccagttgaga

SEQ ID NO: 639537 - DNA, 1198 bp, Homo sapiens
tgaagtggaacgcgcggttctacgggaacgtcgtccggttcagtcagagcaccacaggcgagccctaaggctggctgcctcagtgtggcgtgttcatggtcctaccgatgggacctggcgtgttcgcgcccgggatcgcgctctcgttgcagcgaggccgcgctgcatcagacggggcgggctgacgcgagcgtcggggttggacgtagtcgcggagtaggtctgctctcgtggggagagcactcaagatggctagagcctgcgttcaggcatgtcgcaggtttgccgttgatccgccgccatagggtgccgggcgtgcgtcgacggcgcgggccgcctgggcgccagcgcggtgcaggacgcgagggcggctgggtccccaggtgacggaccctagtggcacgggagcggctttggcccctgacctactcgaggcgtcgcgggttgggcgttgcacgtcggatggcgcccgttagtgtagagaccgctcggtccgggcgcaatgctggggggctgcttcgtgcgtaggctcgaggtggagcctgtcctgtcgtgtgcggctctgagtatgacgaacggggctgatgcgtagggatggaccgagtattcctggcagcgccatagcccgaggacgggggtcctttctggcgcgtttgcgcgcagtcgggcctttccctcggaggggggtctgcgatgggtcgaggggatttagcaagagggccgcccttgtgcgctgggcagggggttgcttgaggttcggccatacactcgagggtgccacgcgtgtgcgcaccacgtaacactggggctggggggccttggcacatgtggccgagggcctcccgagtggttggctcccatggcgcctctgggattggcgggcaaacgaactttctctgggttcccaagggtgtcagactcatgcaaggaccagcctttggtgggatagttctcttgccacattgtggagcaaatcacaaccgcgcgtttcagtcaggagggtttgaccttatggattgggccttcgaatattttggacacggtttgcccggataagcatatcagttcacgggtgtgactttcccctttcggaggacgcttcacagagaggagacccccaggggagatgtgtcaacacaccgtgcgggattttacgtaattggagctaccacttgtgtccagggagaccaaaatgaag

SEQ ID NO: 639538 - DNA, 545 bp, Homo sapiens
gccggggccggggcagccgccgtctccgcctcgagggcctggccgggggctgccctgctgagcgctacccacgtgcgtcgcgccactcgcgggcgacccgcggcaaggccccgggcggagcggctcccgggcgccccgaatagcccccaactttgggccgaagtttgcctggcctctccccgccccacgccggtgcgccgtggtccagaagaacaggaaagagggacccagggagatgcagccttcaccgggggtacccgatggctgcgcacctacagctgattagtgatcgtacagctgattcgcgcccgaatgacttgcagaacagggtgcgccggcccgagactgcagagtacgcgatgcgggcatgccggaacgagccgagagtgacctgaggaagacccagcaaagcacaaacatgaacagcagagacagaaatcaacgcctccgaggactagggcaaaccccgaatgggaagccatcagatatcctaacccagaacgaatccagaaaaatgtaacaggtcttccggaccagaatacaga

SEQ ID NO: 639539 - DNA, 419 bp, Homo sapiens
accagaaaatttgaagagttgtatctgctttccttgtgctgcaacagatgcaacatcgccagccatcgacaaatgagcaccagcactctcaccgccaatgtatttcagcggcgccccgaatctggactctgcattatctactagccactccgcggcgtcataacagtcattcggtccagcagaaaaaggattctctggagcgaggcgctagccaacagagaacagcaagaccccgttcgtgtaggctagattctgcaggacaatgtccttgtgattttgcggtttgcagaccccatcctccgccgtgttatgtgatagtagaccgccccgatataggcttgccattttggagggtctaaagaactcggcttgggttgtctcgacctgcatctcgagatggtatactggtctggctcggt

SEQ ID NO: 639540 - DNA, 954 bp, Homo sapiens
aagcactatagcctaccccttaccttgtaggtatccctatgaggcataattgataacagagctccatctgccgtacgagaaagagacctaaaatcgctcatggcgtactcttcaatcagccacatagccctcgtagtaacagccattctcgaatccaaaccccgctgaagcttcacgcggcgcagtcattctcataatcgcccacggacttgacaatcctcattgactattctgcctgagcaagacgtcgagagagctacgaaggcacatcacagtcgcatcatgaatccgtctctcaaggacttcggaactcgtagctcccaccgttaatagctatttgtgatgacttcatagacaagcctcgattaagctcgccttagccccccactattaacctactgggagaactctctgtgctgagtaagccagcggtgcgtcctgagtcgaaataatcacgtctcgctacgttgacaggactcaacatactagtcacgaggccctatactccctgctagcatattgggaccacaagcacaatgggggctcactcacccacgcagttaaggacataagaagccctcagttgcacgcgagaaaacaccctcatgttcatacaccgtatcccccattctcctcgctatcctcaagcccgacatcattagcgggttttcctcttagaagaagagatcgagtcagcgaaatgtcgacgtggaatgatcagattcacagtgaaataggggggggggcggattagaaagatgtgaggggggacaaaagaagcttggcaccccgttctgggaaaaaggcgggcctaatggagggggtaaaaaacaagggagaagggacgtcacgtttgtctgagggaaagggaagcggggtctttgggagacgcactctgtgggggggattgggcgaccaacaggacattgggccggggaaaacttgcggtggtgc

SEQ ID NO: 639541 - DNA, 1458 bp, Homo sapiens
gcggcacccaggaagaggagaagaagccaccaccagccctaccaccaccaccgcctctagccaagttccctccaccctctcagcacacagccaccaccaacccacacccccagcccggccagctgctcaaatccattggacctccgttgactggagggacacaagtactgataatcgaggggacatggagacagaatgatattcacaaccaggactgggaaccattgaaacacacacgtcagatattcccactggaaacacacgagtcaggatgcatacacgaaccatgaacgacaacaccatcaagccggacacacgtaagacgagccacacggggaagtcacccagaacaagacaccactacatgacatgatccagtcagaaacacatatccatacacattagtcatacgtaacagcgattccaacggacggagagacccctggggagcaccagggagaaggacgcaaagggcaggggcaggacaagaaagaaccagatacacacgaggaaaacaagtatgaacacaaacaaaagagaaaaaaaaaaaaaaaacgagaaacaaaaaaaaaaagaaaaacaacaaagacacaaacaagcaaaaaaacacaagaacacacaacaaagagacaacattcagagagaagaaagcaaagcgaacaaaaaccaaacacaaaaaaaaacacaataataaagcaacaaacgaaaagaaacaagagaagaaacaaacaaacaacaagcaagaacgaaaccaaaaataagcacaaataagtgtttatagatgatagtgaaaaacataacaaacaaaagaaaaaagaaataatgaaacatagaaattaactgaaaaaacaaaagttaaggtataaacagaagaaagatgagaaaaagagaaaaaaaaaaaaaaatgtaaaagaataataaaaaataaaataagatgaaacgaaaatgaaaatcataactagaaaacaaatacaagaatgaaaaagaaaataagataataaatacagaaaacgaagaaaaaaagaaaaaaaagaaaataaaaacaaaaaaaaaaaaaaaacaaagaaaaaaacgacaacgaaaagcagaagaaagaaaagaaaatacaagaagaaaaaaaaaaaaaacaacaaaaaaagaagaaaggaagaaaaaaaagaaaagaaaaagaaagatcaaaggaacaaaacagcaacaaaatagaatgcaaaagcaacacaaaaatgagaatacaaacaaaagaaactaacaagtgacaaaagaacgagaggaaagaccgaagaatggaagagagaaccagaaagaaaaacaagcgcaacgaagaacaaaagcagaacaaaaacacaacccaacaaggaagagcaaagaacacaagcaacaccaccagcaataaagaaacaacacaaacaagaaaaaaagcagaaaaaaacaaaaaaacgaaacagcaaacgatagaat

SEQ ID NO: 639542 - DNA, 279 bp, Homo sapiens
tcgttcactagcaggtcagtgacgcaaggttaccacacacagttagatagtgtctgcatgcacatctaaggctatacagcaaaagaaccagaattagtacaaatacaagaactatatttacagtctgatatactcaagactccaaaacatcacgttaatatttacaacaataaaacatgacaaatgaataatccacaaattaaatgtacattagttgctaatagtgctcaactccattcacggggagagagatcagtttgcaaagtcttggttcaaaaa

SEQ ID NO: 639543 - DNA, 423 bp, Homo sapiens
  misc_feature (43)..(43): n is a, c, g, or t
tcccaaagatcgatcaaatgaaaagttgttttttaaaaagatnaaagacatctataaacctttaaccagaccaagaaaaaaaacaaagaagaccaaagtaaataaaatcagaaagaaaactggaaatattacaaccaatagtgcagaaaatcaaaggatcattagaggctactaggagcaactaaatgccaataaatcgaaatatctggaagaaaaggataaatttagagacacatacaacctaccaagattgagccaggaagaaattgaacagatcagtaacaagtagtgagagtgaagccataataaaaggtctcccagcaaagaaaaaacccgggacttgatgacttcatcactcaattatgacaaacatttaaagaagagataatacctaatctcactcaaaatattccaaaaatagat

SEQ ID NO: 639544 - DNA, 296 bp, Homo sapiens
tacagccgtgtgagaatcgttgcaggtgttctcatgccagagctaccccatcttgcaggcagccactagaggtctcgcttctgctgttctcccatccctatgtccattctttggtttggacgagtgagtttgtttgttttttctttttctttttctttttcttttttcccttttatctagctgccaggcgcctatcagtcagggcttccttaaccaccccctcccataccaccaccgaggctgcagtgcagtggcgtgatcttggctcactacagcttccacctactgggttcaag

SEQ ID NO: 639545 - DNA, 680 bp, Homo sapiens
agtgtggggttcaacccaaacctcttagattctggaaatctaaaaaaaatgggcgcgtattcctttaaggcccgaggacacacaaaaaggcctgcacaggccctcccaacatggtgtgtcaaaaaaggtttgggttgggattaatcatctcattcacgcaaaagtttctttcaatgccggccttcttacgaggcttttcacccttccagcctttgccgtgtccgccattcgatggggcatgtgtccccaacgagtgttcaccccaccaattcccttacaatccccattcctgagcccttctgtataagtcgcgccgaacgtttcatcaacctgagctcgttagcgtttaatagtgacgcccgcggccttataattcaagcactgctcagtcatgtattactgggcctcttttttaccctctttctaccagcatagcattacgagtccccgttcacccttgaagagggaatatccgggtcatcagtttctggagccccaggcttgcagagacctcatgtcacagctggataacttgcatcagtataagtgtcaccaaccaaatattatctcccttttcatccattcgtccttttgggtttggaacagccgtcttctatgtggcatctcgtaaatgtggtttgactattaccggacctctccatgtattgctgagggtctta

SEQ ID NO: 639546 - DNA, 128 bp, Homo sapiens
gggctatctgtgaggatgagaataacacaacctccgcctgcacactgtgacaaagataatcacactactgctatcagcaagtattgtcgttcttgcttcaaagcaccagagagagtttggtgtgcacc

SEQ ID NO: 639547 - DNA, 410 bp, Homo sapiens
acctccccaggactgaagactacaggggtgacaagccctcacttctggctgctcctgtcgcctgctgagtgacagtgctgaggttaaaggagccgcacgttaagtgccattactactgtacacgggccgccgcctctgtcccctccgaccctctcgtgactgagaaccaaccgtgtcatcagcacagtgtttttgagctcctggggttcagaagaacatgtagtgttcccgggtgtccgggacgtttatttcaacctcctggtcgttggctctgactgtggagcctccttgttcgaaagctgcaggtttgttatgcaaaggctcgtaagtgaagctgaagaaaaggttccttttcaataaatggtttattttaggaaagcggaaaaaaaaagtcgtatcgatgtcgacgc

SEQ ID NO: 639548 - DNA, 657 bp, Homo sapiens
agtgacgaattgatgagttcagccactgtgaacatgccccgcaattgatggcgcacacaccgtgtctaggaagtggtgtgaaggacctgtgtgacaccctgtcatctgcaaaatcatgggcgagagctcatagaggacgaagactccgggaaggccttggtcgcccaacagcccattggcaaccttctcatgtctggtcacagagaactgatttgtcctcagtacctctccgtccaccttcatgtacacagtgggcaccaccttcacaaagtactggaacatcatggaggcttggggcgcagtgacattggtgtggtccacggggttcacaatgcctggatagtcctccccaaatgacaggtgctggatgtagtgggtcatgttgatgttgtcaaggccaaagctctgcaaagtcatggacgtgcacatgggactgctggaagctcttcccagggggcaaagtggaagtttccggcaccttattgacttccaagaagccatacacctggcagcctttcattcttctgctcctgcatcttctggctgaagccctctcgccggcactgctcaatagtatctgggttcttgaagggccagcctctacggcgatatgcctcccgcacatcttcaaaggtgttacagcacttgatattttct

SEQ ID NO: 639549 - DNA, 513 bp, Homo sapiens
tgaagagatttagcacttggcactagcataagtggccctcagccttgagtacaatcatagacactggactgcaaaccccagggtaacctgtccataaacctcttgagggactttctagtgaatagcacagtcccctccagtcacggtctttaggttgtagcacagagtgtaagtcagttgaaaagtaatgagagtcttgtatcagaatgcaagattaaaaacactagtataaaggtaccccagttatatgtctgctattctttcctctttggggtcaattcagctatgcctttttaacttctctgtctcacgtacagtaagactatagtaataccaatgaatgttattactcatttcttcattgaggtgaaatccttcagaaactgataggataaaactttgcaaatgctatccatttaactagttaaagcacgtaattctacctctatagtgccagagacaatgtaaggtagtggaaatgccacacaggaacgtatcactttcctgactttg

SEQ ID NO: 639550 - DNA, 104 bp, Homo sapiens
agacgcacatgctgtgggtttggacaaatgtatcatgacatgtatatcactattatggtgtcatacagaataatatctgtgcccattacaagggtgatccgtag

SEQ ID NO: 639551 - DNA, 841 bp, Homo sapiens
ttacttctaggtatgatggcttgttttaattgtgccgatgtcggagctgccgctagtgtagaaggagtgctgttgcgctgatctgggtctgcctgctgcgccagagccagagtctgcagcctgaggggatgcctggggcctggagccctgagccctgagcctgatgcctggagccctgagctgagctggcgtgagacctgtgccccctgcctcgtgcccctgctgccgcctgctgtggccatgtgccctgtgcagtggatgtgaagtgagttgcctgaggttgctcctcacataacatgaatgccactagtcatcctgcagtggctacagttggtgcaacctggtgcgtgccacgttccctgcatgcagtgttttagggattttgagaatttgactgctggtgaactctgtccatgttttcaaaccacacaggctatgcccactggaaggtggccaatgttgctgaattcagatgagctccaggagttgtacgaaggcctgatgtgctgaacaacatgaataaatattgactacgtgctcacagggttatactaggtgacaagtcgttccttggcacatggtggtggacattgtgcaggagctgaagcagcagaacccaaggctggatgtacgtgtgtgatccagtcttggggttgacaggttggacgggcgaaggctcggatgtacgttcccggaggacctccttccacgtcttacaaaggaaaaagttggtgccgcttgcagacatttatcacgcccaaccagttatgagggcgagttaattgagatagcggaaaatcacaagccatgaggaaccttggggttatggacatttgctcta

SEQ ID NO: 639552 - DNA, 982 bp, Homo sapiens
  misc_feature (585)..(585): n is a, c, g, or t
gtatttcctcacgcaagcaaccgcatccataatccttctaatagctatcctcgttcaacgaatatactctccggatcaagtgaatccataaccaatactaccaatcaatactcatcatgaagtaagtcataatggctatagcaataaaactaggaatagccccctttcactgtctgtagtcccagaggttacccaaggcatgccctctgacatccggactgcttcttctcacatgacaaaaattagtcccccatctcaagcatataccaaatctctccctcactaaatcgtaagccttctcctcacgtctctcaagtcttatccatcatagcaggcagtggaggtggattaaagcaatacccagcatagcgcaaaatcttagcatactcctcaagtacccacataggatgaatgatagcagttctgaccgtgacaagccttaaggtaagcattcttaattttaacctatttatcattatggctaactagtaagcggattcctactactcaagttaaactccagtagcgagaacctgatactatttcggacttgaaacaagattagatgagtataaccgttaaatnccatacaaccttcatttcctaggggggctggccccggtacgcggtttggcgaaagggcgtctcggagaatcccaaaaaaaagggcgttaaccgcgatagggacaaaccccttagaacttttttaacacgcagttatttacctaataaagattcccatttaaaggaaataagaggtgcgggtaaaacagcagcactccactaagctatgagaagagaatgccccattattattttaaacaaaaaaaaagagggcgcgcgacaacataggagacgagacacgcagatatttacagctggtatttcttgtttctctttactctattgagggagtagagaggagaagcataaggatagaaacaactagagagagaacggacagacaagagaagaaggcacc

SEQ ID NO: 639553 - DNA, 115 bp, Homo sapiens
aagaagcacctcacatgccctcccggggtctatagctaactggagggtttatgattggtgcatgtgttgcttccctatatcgttggagcaccctatctcaagtcagagactccat

SEQ ID NO: 639554 - DNA, 805 bp, Homo sapiens
cccactattagatgatagctgtgaccaagtctgcagagatcaccccaggacgctgcagacctaattcacagactggaaaatgcatttcaggggaagattgatgctgcttatttatgagaccagcaaatacctgttggatgtactcaataaaaagtacagcattgctggaccacatgcaggcaagtgaggcggtaccatgcttcataggtcaaggagactttataaggcacttaatggacttgctaaaaccagaacttgtccgtccagactacgacatatagtatacagcataacattgactggaattctagaaaccgctgtcagagccaccaaacgcaacagatttgaacagatcctgaagattccatgcagaaaagactggaacagatgacggatgcatggaagggtcatctacacagagtgaacacatggaatgggaatgtcattcaaacacatcgaattatcatgattagaaggacacaaatagcaacatgatataaacatcgatagacatgttattgaggccaaactaaccatacaggaataattaaaaaacttcacttcctggaaggggcgaaaagccgaaattagtaaataccatcccattcaatagaaacatacggagaaaggggaccacaaagttgacaaatggacaaaagataccatgaaaaaacactgcccacagaattcatccgaaagtgaatgacacaaggtgatcaacattagggcacatcaggagatggtccatatccattcaactcagacatgcatttacatcacattgaaagtgaaagacagacaatgg

SEQ ID NO: 639555 - DNA, 264 bp, Homo sapiens
ctctagatgctatgactctcagctgttatatgcccatttactctttccaccttagaggagataaagtgtcttatctgacactgtaagaagggcaaatagcgcacacttggttcacatcaaccatgtttgttttgttattaacctgactttgggacatacatgttcattcaactcctccagggttagggctggttttgtaattctgcggcggatggaagggaaagcctacttcattccaaagttgtcttgaggtatatctaaacg

SEQ ID NO: 639556 - DNA, 106 bp, Homo sapiens
ttttcctccattgagaatgtgacctaatttatgacaaatacgtagatgctcatgtgtatcacttctagttttactttcaaaaatcaaaaaattgagacatgagtct

SEQ ID NO: 639557 - DNA, 149 bp, Homo sapiens
gaccagaccgtaaatcagaaaaccgatcgaatacgagcataatttcttcatgacattgtctctaaatgtcaagttgttctggaaattttttctcgattgtatgattccgtgccttattcattgagacaaactgagttagcatgatgttg

SEQ ID NO: 639558 - DNA, 467 bp, Homo sapiens
atcctagatattttagacatccaatattagagctttaaaatacatgaaacaaaattaatagaatagcaataagaaatagaaagatacccagttaactggagatttcagtagttttctccaaataattgatggaatgagcagatagaaaatgagcaacagtataacaaacttgaacaccactgtcaactaacttgatctgcttggcatttatggaacaattcacccatcaacagctgaatacatgggttttatttttttccaactacatagagaacgtgtaaaaatatatgccatattctggcccataaaacatatctcagtacatttgaaagaattgaagtcaagcaagatgtactttctgacctaaatggaattaagttagaaaccagtaacagaaagattgtaaaattcccaaacatttggtaaataaataacactttaaggtaacccatggattaaagaaatga

SEQ ID NO: 639559 - DNA, 239 bp, Homo sapiens
  misc_feature (103)..(103): n is a, c, g, or t
tctgctgctgcctatgggtcctgatgtcccccaggcgaaccaagatgttcattactttctgacctacatctacactgggctgtccaagcatgttgaagacgcncccgcatttaaggtccttgctcacttaacgacttccgattctttgatacagtagtaaagacaaacggtatcagccaatagggctttatggacacgcgacggctatgtagcctcgtgcgtcagctcgtcagcccgca

SEQ ID NO: 639560 - DNA, 222 bp, Homo sapiens
aatgtagttttatatgtatataccaaatgaatttctgttctgggtctctctgttttatgttatgaagccattcgctcatatacaataatttgtcaaggactttaatcatacttgttccaaaaagtagtaaccggatggaattttagtatttacaggcattggtgctaaatggtacattttatgtgttaaaataaacattgtttttgaggccttgaaaaaaaa

SEQ ID NO: 639561 - DNA, 169 bp, Homo sapiens
atattgtgctggtctcaaacctctgagctatgcagtcctactgcctagtgccttccaaagtgttgggattacaggtgtgagctgccatgtccagtcacaaaaatcttcgagtgtaggcaagctgtcaagctcacaatggcagacaagaaccacaccagcaaagaaccaa

SEQ ID NO: 639562 - DNA, 242 bp, Homo sapiens
tgaaagatagcatatggcggagagatggcatcagttgcaatttataaacctgtcactgattttttccttcaactgtggatgcaggcaaggtggatgatgccagagctctcctacagagatgtggtgcaatggctgaacaaaccccgattgtgttgttgttcctccttaggaattctaggaaacgaggaaaggcatcaacggtgaaatctgtgttagaattgattcctgaatcagctccaacg

SEQ ID NO: 639563 - DNA, 875 bp, Homo sapiens
  misc_feature (663)..(663): n is a, c, g, or t
atggcacatgcagcgcagggtaggtctacaagacgctacttcccctatcatagaagagcttatcacctttcatgatcacgccctcataatcatttaccttatctgcttcctagggtcctgtagtgccgcttgttcctagatcgagctcaccaacaaaatgtaactatatactaagcatctcagacgctcaggaaatagaagaagcgtgctgaactatcctgtccgtcattcatctctagatcctccatcgccctcccagtccctagcgtcatcctttacataacagatcgaggtcaacgatccctcccttagccatcaaatcaattggccaccaagggtaactgaaccctacgagtacgccgattacggcggagtaatcttcaattcctacatacttcccccattattcctagaatcaggcgactgggactccttgacgtagacgtagtcgagtagtactcccgattgaagcccccattcgtataataattacttcacaagacgtcttgcactcatgagctgtccccacattaggcttaaaaaacagatgcattgcccggacgtctaaaccatacatttcaccgctacacgatcgggggtatactacggtcaatgctctgacatctgtggagcacacacagtttcgtgcccatcgtctagatnattccctaaaatcttgaaatagggccgtttttaacctaattggaccccttaacccctttagaggcaaaagaaaaaaaaaataaaacttgggggctctgcgaaaagtttcaacaccctcggggcgccggccaaaatgacggcactcccagacacctcaaagtgggttcccaaaccggggccggcggacccggggggtcggttccagccccggg

SEQ ID NO: 639564 - DNA, 787 bp, Homo sapiens
  misc_feature (74)..(74): n is a, c, g, or t
  misc_feature (178)..(178): n is a, c, g, or t
  misc_feature (205)..(206): n is a, c, g, or t
  misc_feature (215)..(215): n is a, c, g, or t
  misc_feature (233)..(233): n is a, c, g, or t
  misc_feature (253)..(254): n is a, c, g, or t
  misc_feature (260)..(260): n is a, c, g, or t
  misc_feature (268)..(268): n is a, c, g, or t
  misc_feature (270)..(270): n is a, c, g, or t
catgtgctactggattttcgggcgctgctgtgaagctgaattcggagccggtccgctgggcggcgggcgccggnggccggaggggcgcgcgcggcggcggcaccccagcgtttaggcgcggaggcagccatggcgggcaacttcgactcggaggagcggagtagctggtactgggggnggttgagtcggcatggagtgcggtggnngctgctgangtggccagctggcacggngtgttcctggtgcgggactnngagcancagccccngngactatgtgctcagcgtctcagagaactcgcgctgtctcccactacatcatcaacatgcagctggccctgctgccctgccgtgtgccacctgtcgcccgcccagcctccgccctggggtgatgcccctccagactcctgaataggagatcaagagttttgattcatttgcctgctttactggaattctacaaaatacactattttggacactacaacgttgatagaaccagtttccagatccagtgcagggtagttggagtgattctcagtgcaggagtgaggcggagtatgtgcgagccctctttgactttaattgggaatgatgaggaagatcttccctttaatgacaggagacatcttgagaatccgtgacaagcctgaagagcagtggtggactgcggggacagcgaaggccagagagggatgatccaggtccttacgtcgagagttagactgctccgctcgttctggtcgattggggtaccaggggtccccccacagcctgggggccggacc

SEQ ID NO: 639565 - DNA, 435 bp, Homo sapiens
acaatctccatggtggcatgctgggcaggactaaatgaagggacaacacacacttaccctggcatcggtatggcagctgatgagaaggtacacatcgaatgtgttatcggatctaggagagggtgaaaaagtaaatgctgacattctaattaaatgggtcaatccagcactcttaaaagtgcaaaccaaaacagacttctatttcccagcttcaaggcatcacaatctcatacagcaccaagtttaccgtgtcctcagcattcaatagcatgcacatagcgaccaaatgcatgattccgtcaaagcacaatgcatccaggcagcagcaacaacttcatctgcatgcaggcacaagctgcaaccaacgctcaaatacgcccaattcaagtagctcgcaaagcatcggtgccggcatatatagcatatactggatga

SEQ ID NO: 639566 - DNA, 140 bp, Homo sapiens
agactcagataacgtagtgactttaatcgttgaacaaacgaactttaatagcgggtgcaccctcggggatgtacctgatccaccatcgcggtcgtacaaccctattgttgatatggactctagaataggattgcgctgtt

SEQ ID NO: 639567 - DNA, 312 bp, Homo sapiens
tcccgaacagtctccttgctatcctcaaacatctaacatactctcattcttgctgtcttatctgtctggaacgatgcctcccacccccagaaatggtttggctggcccccaacaatcttactcaaacattatttttcagaaggttttctctgatttcttttctccatagattattttcccttctgacaaaaaggcaaaaaaatatacttagagttttacttacttattgcttgtcttttcccatgaaggcagagattgattgctactgtgactcgagatcactgcctggagtacagtgggagctcaatcata

SEQ ID NO: 639568 - DNA, 186 bp, Homo sapiens
tgacctggccggctagagcacagctgtatcatcaacacggcggcaattgatagcagcgctgttcgtgggaacatacctatcaggtcagaaagaccaacaaccagagcggaacgaacttgagcggttcaggaaatctgaaatcgctcgtctggaaacgctgaacgtctcaatcaaacaatctgaata

SEQ ID NO: 639569 - DNA, 378 bp, Homo sapiens
ttgctctttttaacttaatttattaagttttaatttcgtaagctccttattctgatctgttctgttgtcattcgttgattgtgtgatggagatcggaggaactgaccaatgcttctggactttctgactggatttatgtatctctctaaggctccttctgatatcatcactgagtagatgttagctgtttatacagtgtttaccacatagtaagcccgttatgtctcataggtgattagacagcttggtcatagttcatcatgagaacttgccttggattatactttctatgtatggtagctagtagtgagggccctcgatgaattatattattgtactggtagttcctctggatttattctaggtgtcatcattcag

SEQ ID NO: 639570 - DNA, 184 bp, Homo sapiens
  misc_feature (87)..(87): n is a, c, g, or t
  misc_feature (96)..(96): n is a, c, g, or t
ttctcatatcatatagcttattctagtgacttcaaacttaagagcagtgagtgcaggactgtgcactatatactaagaaacattgtncctgtcatntattagtggcagatctaacattgagtgtcttcaccagatagacttctactgttcatcaaactcccttcttaactagacctagactttc

SEQ ID NO: 639571 - DNA, 455 bp, Homo sapiens
gactttcatacactactcacagcattggacaggtctcatctagacagaaaatcaaaaaagaagcactcgatttagactgcactatagaccaaatggacctaacagacatggatagaacatgccatccaacacctgcagaatacacattcttctcatcagcacatggaacattctctagaatacaccatatgttaggccaaaaaaccaagtttcaacaaatttttaaaaactgaaatcatatcaagtctcttttctgaccacaatgaaataaaactagaataacaagagaaactttagaaactgtacaaatacctggaaattaaacaacatggtcctgaatgaccatgagtcaatgaagaaattaagaaggaaactaaaacatttcttgaaccaaattaaataaaaatgcaacataccaaaacctgtgagacacagcaaaaacaatactggaaggg

SEQ ID NO: 639572 - DNA, 416 bp, Homo sapiens
  misc_feature (235)..(235): n is a, c, g, or t
gggccccatattgatctgtcaagaaactgttggctgggaactcctgaggtcaggagttcgagaccagcctggccaacatagggaaaccccatctctactaaaaatacaaaaaattagctggccatggtggctggcgcatgtaatcccagctacttgggaggctgaggcaggagaatcgcttgaacctgggaggcagaggttgcagtgagccgagatcgcaccactgcactccagncctgggtgacagtgcaagactccgtcccaaaaaaaaaaaaaaaaaaaaaaaaaaaaaactgtgtgtgtggggggcccttgggcccccggaaaaggtttttaagaacaattcggttggggggggggggccccagggggtataggggaaagcggggcccaaaaggggggttccccaagggaac

SEQ ID NO: 639573 - DNA, 1286 bp, Homo sapiens
  misc_feature (983)..(983): n is a, c, g, or t
  misc_feature (1137)..(1137): n is a, c, g, or t
actgggttgattttaagtaaaattattgtgtatgataaaagtctaatttcttaaaaaaaaaaaaaaaaaaaaaaaaaaaaaaaaaaaaaaaaaaaaaaaaaaaaaaaaaaaaaaaaaaaaaaaaaaaaaaaaaaaaaaaaaaaaaagaaaaacaaaaaaaaaaaaaaaaaaaagaaaacaaaaacaacaacaatgcaaagaacacagaaaagcggaaggacagaagcacaagaaccattgccacagcaaaaaataagcacaccagaactagatcaataacaaacagagcacacgacgaaacgcagacacataacacacgcaacgacatacaccaacacacaaataacagataccaaacaacaaaacaacaccacaacagacagacaacccaacacacacaccaagacacagaaaaaagaagaaggagactacacagaagtagagcacgtagacagcaacactacaagaagaaaggaataataaaacaaaaggagcaatgaacaagaagccagaagcagacaaaaaagacacagaacaagtgacgaaccagacatccaacacagagctagcaagccgaacgagacacctacagatcaatcaaagagcaacgcaaggagacacacacagaaaaaccacgaacgaaacaaacaacaaaaacacgacaagaacacagacaccataccacaatcaaaacaacaccccaaccatacagtactagacgacataaggagagcaacatcagacaagcaacaaaacatacaaatagaaaaagcgaaactagtagtcacagtagaacgacaagagacaacatacacgagagaaaaggagaagtaataggagagtagtcaagaactcaatgacagaacagaaacaaatgaaatgaacacaaactggacacagaaagagcatgtcaatacgatgaacacacacacagaagcgactaaacgaacaacctacaaagcacaacaaagacatgaggaaancaccgacagaatgaacagcaatatgagtcatcagacaaacgacacaacaaacatctatcgcgacacagtgagcacacgaatcgtcatcgactagaagacgtaggaacacagcagatacaaaacccaacgaagagaagaaaacgaacagacaacnaccatgagaacgacatacatgaagatcctagaacgtatagacaagcacccacatgaatggatagacgaagaacgacgcacaagaagcagtgacagagaaatatcacgagcaactacagacagagatacggacacacacaagatgaaacc

SEQ ID NO: 639574 - DNA, 395 bp, Homo sapiens
  misc_feature (158)..(158): n is a, c, g, or t
  misc_feature (181)..(181): n is a, c, g, or t
aactgactgaattaagacctaaagaggtgggaagtaaagcccttttaatgtatcgctttacattatttgactttaggccccatgtggatgtttgccatattcaaataattaattccttaaaaagaagatgaaaatagaaggtgggcgcagtggctcanacctgtaatcccagcacttcganaggctgaggtgggtggatcacttgaggtcaggagtttgagaccagcttggccaacatggtgaaaccccgtctctactaaaaatacataaattagccaggcatgctcgtgggtgcctgtagtcccagctactcgggagactgaggcagaagaatcacttggacctggggtggcagaggtcgcagtgagccgagatcatgccactgtactccagcc

SEQ ID NO: 639575 - DNA, 261 bp, Homo sapiens
  misc_feature (219)..(219): n is a, c, g, or t
  misc_feature (244)..(245): n is a, c, g, or t
ttgctggttggcacttcttaaagtatttgattacgcaactggagaatgaaaagtgtatattggtgacgccaacctcagatttctgagcactcctgctctgtggtgagaatcagacaaaaatttatcggggtgaaaaaaaaaaggcattacctgatttcacaccctttgtcttgcgtagccctctttccattcatttctacacacagacactttgctctngttaaatccttctctctgttctcannaaccaagcaaccccgt

SEQ ID NO: 639576 - DNA, 157 bp, Homo sapiens
aagagcttgaccaatgactgggaagatcacttggcagtgaagcatttttcagttgaggacagttggaattcagagcccttctatttgtccacgacgtgctccttttgatctctttgaaacagaagaaaagacaatatcaatgtatgtacgcagagtt

SEQ ID NO: 639577 - DNA, 434 bp, Homo sapiens
catcgatgtacctttgctaaggttagaatgaataatcttctggtatcgctaatgtgaatagtcggtgcttaaaaatgagccaagactagaggggacactatcgcctaaaatcagtttggacaacaagacctagaaagggaaggggatggggatcgtggggagagagtgggcgaggtgccttaactacatgtgtgatctgaaaaccctgcttggttctgagctgcgtctattgaattggtaaagtaataccaatggctttatatcatttccttcttccctttaagtttcacttgaaatttctcaaaatcatggctattgaaatcgttgggatctttctgtcttctgggttccattttttaaatgtttaaaaatatgttgacatggtagttcagttcttaacccatgacttggggataatgcaaaacattactgtc

SEQ ID NO: 639578 - DNA, 293 bp, Homo sapiens
  misc_feature (33)..(33): n is a, c, g, or t
  misc_feature (242)..(243): n is a, c, g, or t
  misc_feature (246)..(246): n is a, c, g, or t
gatcattcacagtgaggacagacacaggtgaanctatgggtcgtggaacaaaagttatcctacacctgaaagaagaccaaactgagtacttggaggaacgaagaataaaggagattgtgaagaaacattctcagtttattggatatcccattactctttttgtggagaaggaacgtgataaagaagtaagcgatgatgaggctgaagaaaaggaagacaaagaagaagaaaaagaaatagannagnaagagtctgaagcagtctggaggtaccgacgctcgattcgtatctgt

SEQ ID NO: 639579 - DNA, 865 bp, Homo sapiens
ctcatgagctcaagtgatctgcctgcctcaacctcccaaagtactacaattacaggtgtgagccaccgtgcccggccatcttttcaccctcttaacagggttttatacagagcaaaagttttcagttttgataaagtccactttactgatatttcctttatggactgttgcttttagtgttgcatttaagaacaactctacctagtcttagatcccaaaggttatctgttttttcctaaaagaagttttatagttttaaatttaagtatgcatgtgagccatgttaatttttgtataatgtgtaagacttaggctaaagttctttttttttaatcctatagctggtccagctgctccagcaccgtttgttgaaaggctgtccttcctccatgaattacttttgcaccttaaagtcagctgggcatatttgtgtggtcctgttcccgtgatgatctcggctctgtcgatctgtgtgtctgtgcctctgccagcattgcactcttggttcacatagctatatagtagatcttgaaatcagctggactgattcctcctctcactctattctttttcaaaatatttttgctataaatttgtatatgaattttagaataaccttgtctacatctacaaaacatcttctaggattttgataggaactgcatttaacctgtatgttaatttgaggagaattgatatctttactgtattctgtctagcaatccatgaacatggcatgtctatttaaatctttgatttcatcacgttttataattttcagcatacaagtccttgcatatttttttttttttaaaccgaagtatttccctttttcagcaattgtaaacagtacatatttttaaaa

SEQ ID NO: 639580 - DNA, 222 bp, Homo sapiens
  misc_feature (18)..(18): n is a, c, g, or t
  misc_feature (45)..(46): n is a, c, g, or t
  misc_feature (171)..(172): n is a, c, g, or t
  misc_feature (175)..(175): n is a, c, g, or t
aatgagccggcccaaatngagtatgggatatcaataaactgaganntgtcttcacaatctcagtttattggatatcccattactctttttgtggagaaggaacgtgataaagaagtaagcgatgatgaggctgaagaaaaggaagacaaagaagaagaaaaagaaatagannagnaagagtctgaagcagtctggaggtaccgacgctcgattcgtatctgt

SEQ ID NO: 639581 - DNA, 967 bp, Homo sapiens
  misc_feature (98)..(98): n is a, c, g, or t
  misc_feature (256)..(256): n is a, c, g, or t
  misc_feature (577)..(577): n is a, c, g, or t
  misc_feature (629)..(629): n is a, c, g, or t
  misc_feature (714)..(714): n is a, c, g, or t
  misc_feature (862)..(862): n is a, c, g, or t
  misc_feature (867)..(867): n is a, c, g, or t
gtattcacaggatacaaaaaccacatatacagagggctgaattcttgtatgcatgtattctgccgggccaactgtgggacttgagtatgcacagattntactatactcaagtgtcctggaaccaattcttcacatataccaagggacaactgtaatgtgaacacaaacccataaacagtgcaacattaccagctttcccaggatgcatgtggctgacagaggagtcagcgtcaagaagggctccactggcggctgngggcctctgagctggagcttactgacaagtggaagatgcccagatgataaggtgccgtgacagattgtggtggtagcattgtgagctggttgacaacacagaactctggaatcagatggcctggattcaaatcctggactcaccccttattggctgtgtgagctaaggcaagttacttgccctctctgtgccccaatttcttcatctgcaaaatgggaataatgataatggcattatggtttactgaaagggataaaagagttaatatgtctacgtacttggaacagcatccagcacgacactaagtgatatggacgtatntgctatttttatacagagcttagtggcatgaagaacgtagacaagcaatgangacttcaaggtggtgtcctggataaaagagaaaatcgttctggaaggagacttacatacatgacagacagagatgttggtgttgnttcacgactggaagaagcgacacgtggcaatacccacctattaatgatgccaccaaaactgtcttagaccatctaccttgcaatcactatctttctgctttgacttcttctagctttcttcttgctaaaactttaatcttttatattngaaangttacctttgccacacattcttttaaatatgctggtggacgaacttctttcaccccaagaacacctgaatctttttttaaattgtgatgccggaagtatc

SEQ ID NO: 639582 - DNA, 276 bp, Homo sapiens
  misc_feature (33)..(33): n is a, c, g, or t
gatcattcacagtgaggacagacacaggtgaanctatgggtcgtggaacaaaagttatcctacacctgaaagaagaccaaactgagtacttggaggaacgaagaataaaggagattgtgaagaaacattctcagtttattggatatcccattactctttttgtggagaaggaacgtgataaagaagtaagcgatgatgaggctgaagaaataggaagacaaagaacaagaataggaaaaagaacagaaagagtcgttagacattaccgcgggaggt

SEQ ID NO: 639583 - DNA, 304 bp, Homo sapiens
  misc_feature (33)..(33): n is a, c, g, or t
gatcattcacagtgaggacagacacaggtgaanctatgggtcgtggaacaaaagttatcctacacctgaaagaagaccaaactgagtacttggaggaacgaagaataaaggagattgtgaagaaacattctcagtttattggatatcccattactctttttgtggagaaggaacgtgataaagaagtaagcgatgatgaggctgaagaaacaggcaagcacccaagcacagcacgacacaagaaacagcaagcagcaaagagtcggcaagacaaacctgcacattgcacagcatgtccggttct

SEQ ID NO: 639584 - DNA, 415 bp, Homo sapiens
caggatcccccaagcagttaaacagactcaatcagtagactgtgtgaaaagacagaatttttttctttgagacaaagtctatactctgtcgcccaggctggagtgcagtggtatgatcttggctcaccgtagccttcgcctcctgggttcaagtagattctcccacctcagcctccccagtaactgggattacaggtgcccaccaccatgcccggctaattttttggtattttaaatagagacgggtttcacctgtgtaagccaggatggtctcggatctcctgacctcgtgatccgcctgcccagtcctcccaaagtgctgggattacaggtgcgagccattgtgccagcacctgtcttttcttcatagagacagggtttcgccatgtcgcccaggctggtctggctcaaggtg

SEQ ID NO: 639585 - DNA, 327 bp, Homo sapiens
gtattgtccagtgaaaactatccaggcgcagtggttcactcctgtaatcccagcactttgggaggccaatgtggtttgatcacttgaggttaagagttctggaccagcctgtccaacatggcgaaaccccgtctctactaaaaaatacaaatattagccggtcgtcagttacgcgtgcttgtagtcccacctacttgggaggctgaggcaggagaatcgcccgaacccaggaggtagaagttacagcgagccgagatcgtcacatctgcactcctgctcttcagcctgggtgacagtcgaatttgactatctagaggaagtaaaagc

SEQ ID NO: 639586 - DNA, 517 bp, Homo sapiens
  misc_feature (50)..(50): n is a, c, g, or t
  misc_feature (74)..(74): n is a, c, g, or t
  misc_feature (95)..(95): n is a, c, g, or t
  misc_feature (116)..(116): n is a, c, g, or t
  misc_feature (131)..(131): n is a, c, g, or t
  misc_feature (168)..(168): n is a, c, g, or t
  misc_feature (180)..(180): n is a, c, g, or t
  misc_feature (218)..(220): n is a, c, g, or t
  misc_feature (229)..(229): n is a, c, g, or t
  misc_feature (234)..(234): n is a, c, g, or t
  misc_feature (246)..(246): n is a, c, g, or t
  misc_feature (250)..(251): n is a, c, g, or t
  misc_feature (276)..(276): n is a, c, g, or t
  misc_feature (371)..(371): n is a, c, g, or t
  misc_feature (420)..(420): n is a, c, g, or t
  misc_feature (428)..(428): n is a, c, g, or t
  misc_feature (437)..(437): n is a, c, g, or t
  misc_feature (448)..(448): n is a, c, g, or t
  misc_feature (514)..(514): n is a, c, g, or t
tttgtaacgtggtgggatacagccacacccaatatgtatagggctgaggncgatatcctttgggtcaacgagangcttcaaattaaaatgctgcnaaatggcacacaacaaaaganacaactccatgcganccaggccttctccagcacacactcgttttcctgtggnaaatggcttganatagtcactgtacttgagctttccattttcattcaggnnntgttctggnttttncttttctggttntggnnattcttggttgtcatacaaaacagngtccagagttggcactatgtttgtgcccttggggatgaggtatcctctgaaaatggtgtctcgggttgcttcatggggcaggttggtagggctcnagtgtgatgaaccgctgaatctcatgcaccatagcatccatgtagggcntctcttgnctatcgctngatggcagggnttcggcttggcccaatcacctgtcaatttcttcatgggagcttctcttcgatctcaggggtatttnatg

SEQ ID NO: 639587 - DNA, 179 bp, Homo sapiens
gagaaacactacggccattaagagacgcttctttccattcctttgcatcacgtgcaagtcactgataccggggagggggctggctcaccagcaatattgtacctagactgggtcagaaacagatataatacattattcttttacatatattgcttgttaatagctttaaaaatcctcac

SEQ ID NO: 639588 - DNA, 274 bp, Homo sapiens
atactcaggcttgggttccccaccctcattggagggcagatcccgcataccacgataaccccggacaaccacattgcgtacccccgccattctcacacagtgggagaggctgtagcaaggctttctctttgcagaccccatcttagagggaccgtgcttgcccctgtgtcctcaggaggtggaaccctgtaccgtactgaggtcctagggaccttgctctgtctgacccatcccgagctgaccactgggtgagagaggctccactgtgccctgc

SEQ ID NO: 639589 - DNA, 1486 bp, Homo sapiens
  misc_feature (400)..(400): n is a, c, g, or t
gtggttcgtgcctacacttgctcagctactgttcgtcccgggtgtcgtgtatatttttctcttttgcgtgtcgtgtgagtggtgcctgccttcctcgccagctcggtgggtgcttctttctcgtcttttgttgatgtgcgtggcccctgctctttgttctgtggcgcgttttgtctttgctcgctctgtcttgcttgtgtgtgttgacgctcgctctgttgtgttgagaggaccacctggggtgtgggggccttctgtcccttatttctgctgtgtgagcagacgttgtgattttctttcgtgcgctcgctacttgtccacaccacctcgtgtttgcttccaagggggggggaacccccccaccgtgcggtccccgctgccatcttgttcttgtgatccnatcgcggttgttgcacaaacaccgattcgcggggctcccgggggtaatccgactccccggggcccctgtgctttgggaggcgccccctgtgaccaccctgcttgtccggtgcacgataatgtgtagtgtgggcctccttttgaaacccgtgtggtcgcgacacaatagagaaagggcccaacgattccttgtggtgaaccgccgccttggtaatttctcatggtgtcactcatgtccccgtcccgttggcttgtctggggaagactttgggggcgcccttaatctggtgtgggcttaccttcctaatcgtgttggcgccatgggccacgcctgcgtggtcaacccagggggcgaggcttctatcagccctttcgagattctacccccgatctgttcccgcccactcaccccccttcggtatgtttggattttctcctggcgctgtaagggacccaaggtcacccctcttgtggttgtgagcgcttcccacggagcacttcattcgccccaccctgtaagtaaagaagtatgtaatgtgtgaacacccactggaacactggttctttcctcgaaccacctggaaaggacccggtaacctgtccggaacaccgcctttttcttggaaggaaatgttggcctgccttgtcggaatggggaccacgtgctatactggctgagaccaacgtgagttctgtcccacggtgtcgcccacgaacttcctatggaccacacgtgcgcgggaacacagctgctttgaggtgcacacaccacctatcccatcgttcctggaaaaccacgggaaggtggtggacggcctcggagaaggccactttaacaagggcccacggcacacgaagcacgggccctgactgcccccccggccccccttctcgggctctttcaacccacgcctggtactgaaggtgccacagaacgtgctcctgctgagccttttgcggctccgggctgtgtcctaaaatgccaagcaccacctcggccgaggcctgcgccctgacatgctcacctctctggactgccaccctggattgttcttttttaagactccatcatgacttctttacttac

SEQ ID NO: 639590 - DNA, 139 bp, Homo sapiens
ttagatcgcacgggtaggggtgatggcccggcgacgtcagtggatgaccgccgcctccggattctgcacgaagagtccattcgcgggagtctcgcgcaagggcggcaccatggaaatggtgcagctgtgggtcaatcta

SEQ ID NO: 639591 - DNA, 128 bp, Homo sapiens
  misc_feature (116)..(116): n is a, c, g, or t
taaattagccgggggtggtgacacaaaccgggggggccagctatccaggatacagtggggaggatcactggagaccaggaagtcaaggcggcagggggccatgttcacacctctgnactcaggcctgg

SEQ ID NO: 639592 - DNA, 45 bp, Homo sapiens
ggatttgctggtgcagtacaactaggcttaatagggacatggagg

SEQ ID NO: 639593 - DNA, 213 bp, Homo sapiens
acagtactcccacatttaaactccttctcaccccagtgtctggaagagattaatcattacataatagcacccactctggctctggcactgtgtcgcactactggcagagccaaatcagcccaaattagtccctgttttcttccatcccattgcctcaaagtctcagcatgcgatacgcgcatatgcattgccatcaagcctgtcaaccagccc

SEQ ID NO: 639594 - DNA, 108 bp, Homo sapiens
ggtttttaaaaggctttattggggaaacgtagaggggtggggaggtcagggctgcagtgagctgtggcagtgcagaccagcctgggcaacagagcaagaccctgtctt

SEQ ID NO: 639595 - DNA, 953 bp, Homo sapiens
  misc_feature (953)..(953): n is a, c, g, or t
gtattctggaaagtttctctaagactagtgaagaactgaaggagtcctgcgtctttttgtggatctgcttcggtttaggaaagcgcaagattcctctgcttcataggtgtctgcgtggaaggtggtagtggaagtctgcgctgtacagcagagtgtaatgttgaagttgccttacaagaccagggtggggaggggggaagggcgttggaaaaaattagactgtggagacattttggaaaacgagacgacgtgagagtgaacgggatgatgatctggcagcaaatggtcggaggttttagaaagattgccccgcgatgtaaattgttggtgaaccagcctttgatttgttggtgcattggtggacgttgggggggtgggatcaggggcgggaaaagtccacgcatggtcgacgttgtaccctggctctgtggttcaagagcagtgtggcgaatggttctggtcttgtggaaagaaagcgggaaatagatgttgaaagaataggtttgaggggaccctattgtggggggtccattgttgtttttaaaaggacaggcatttgaaagagtggggggtggagattccccaaaacaagaccgtaagtaatacgctgaagtatggcattgttcaggctccttgaggggacgcttttgagggatggtgtgttggaataggcagaatcgttggagcacttaggtcgtgtggatctgaggtgtgggaggctagtggggaagaattcgtcactacatattatagggtatagaaaggagggatattgggcggtatggattgtgtggcctattttacaatttattgtactggggaaacagcgggcagtcccacgttggatgggttggttcacaatttggggaggttttacacacaacgtgtggagctgcgcacagattttattccccaaagggggtcggataacacaatatttcgcagacaaattn

SEQ ID NO: 639596 - DNA, 255 bp, Homo sapiens
  misc_feature (35)..(35): n is a, c, g, or t
  misc_feature (37)..(37): n is a, c, g, or t
  misc_feature (90)..(90): n is a, c, g, or t
  misc_feature (115)..(115): n is a, c, g, or t
  misc_feature (126)..(126): n is a, c, g, or t
  misc_feature (148)..(148): n is a, c, g, or t
  misc_feature (152)..(152): n is a, c, g, or t
  misc_feature (176)..(177): n is a, c, g, or t
tgcctctgagagaagtagagtaggagagggtatangnaggacgctgacaccaggctttcctgtagtacttattcacagagccaggtgctngagtactggtggtggtgtggggggnttgtccattgntcctccttgacttttgccatangagnggccttatttatgggctactggcnntctctcatttgttatgtgtttttttttcttttcatgcagtgatcagaatataatgtccaaacattcaagccgtcagga

SEQ ID NO: 639597 - DNA, 689 bp, Homo sapiens
gcaccccacaccatcacgtagcaggcgtcttccttccgaaacctgcggctccccaagaggctgcgtgtgtctacttcctggcccgcacccgactggcacagcgcctcatcatggctggcaccgtcgtctgggatggcatcctggtatacacagacccagacaggggctgcgtcaactagcctacgactgggccacggtgaacggaagcagagtcgcacatgggggtgagggagacaccaggtcctcgcatgcccgtggcgctagtggtcatggctgtccctcgccagaccaaccggaccactgccttctctcatcttcccacgctgatggcccctaagtctagcctgagaaccagagctgtcgcgcaggcgagtcacctgagcgtggaggtccagcgagaggttgtccatgactaggaccagttcccagaggtaaccgtgggggccgtgaggatgaggaactttggaggaaattgtccttccgccactggccgacgctcttcagctattacaacatcacactggccaagaggtacatcagcctgctgcccgtcatcccagtcacgctccgactgaacccgagggaggctctggagggccggcaccctcaggacgagcgcagtgcctgagccccaccggggcccatagctgctgggcactgggaagcaggaccaagggcccaggtggggt

SEQ ID NO: 639598 - DNA, 941 bp, Homo sapiens
  misc_feature (70)..(70): n is a, c, g, or t
  misc_feature (170)..(170): n is a, c, g, or t
  misc_feature (173)..(173): n is a, c, g, or t
  misc_feature (180)..(180): n is a, c, g, or t
  misc_feature (182)..(182): n is a, c, g, or t
  misc_feature (200)..(200): n is a, c, g, or t
  misc_feature (258)..(258): n is a, c, g, or t
  misc_feature (374)..(374): n is a, c, g, or t
  misc_feature (917)..(917): n is a, c, g, or t
agccactcttggtggcaacctcaaaatcccgcacaattaagaggcaggggaaacaaagacacccccctcnccaagggaggagaagaggagggagggaaccagataagcaggaaatgattgggaagcgtgtgaggagcgaggacgacgggccgttagcacggagaacattngcntgaagtngngaaagcagaaaaagtacntctacaatcacgacagatagaggtgtgacagagagagggagacatagtgacgggaatnaaagccacgacgagcacagagacatagcctcacaccgccagcacacaacccccgcgcgcgacacgcctctctacgcgcgcgcgtagcggtagcgaatatcctaccacgcgccgccntcctcgagccgaaatgttcgaagacacaacaacgtggacgttcatcatggcattctggagcatgataacagtgactcgacattaccaagctacttctatatgaaacaacacataataaaacgagaaagaaagagatagtaagagaggaggaggaaagaacgtgagagagaagaggtggcgagagattcgaaagtgtgtctgattgtggtgtctcgcgagggcagcgccccgaagcgagcacagcaaacagcaattccacataacggaaagggacgggcaaggagtagcaattagatataacgcgtgaagtcaatccgtgagaggacgtcgctcctctactctctctcctgctcagcgccccacccccaccatcccacaaccgcgcatcctgcgcccgaccacacacattacccatctcagaccatcactacaccacacaacgccctaccatctcacacttacatgattcaactcacccactaactgaagacatgttaccattcttcacaccacacccaaccgcacataacactacacttcganactcgcacctcacacacgtagcgt

SEQ ID NO: 639599 - DNA, 427 bp, Homo sapiens
agggggttggacctgtcctttttttcatgcttcaattttttggcgtgtccttttttaggggagggttttttcccccttttttgggttgtaagtggttttttcatttaatcgttatttgggtggggttatccttgtggaattcttgggaggccttcctttgtgatgggctttttttttccaaattattccaaattggttgttttttggtggatgggttatatgtttctcgccgcaaaaattttcccttggttttttgccccaggttccgccgggtgcaaatggttttccggtaaaatggttttggccgtttttccttaacaatttttgttaaaatcttgcataattttccttttaacttttggcctttttttccctaaataaaagttatgcctggtgttttgttaaagttgaaccccctttggttgga

SEQ ID NO: 639600 - DNA, 291 bp, Homo sapiens
tgaattctgtaagttgaattagagtatccccacccagtaaagattctcatcaccatacaggctgactgggccatacatatcaatagagtcccagcagccgccgctggagactctacatctcagcatgaccagcacgtcgaggccatcgaaatctgttgtgaccatggctgtgttgacatgttgatccgacatcgcccgcaatctggacaaggctgaacgcgagtccctgctgctgcgcgcgacctacctcaataagctggacagccctggctatgccgcatcaaactagta

SEQ ID NO: 639601 - DNA, 113 bp, Homo sapiens
tcttgtttcctgcacttcagtcggggtttgggttccttcagctctgctgctccagaaactgtagtcccagctacttgggaggctgaggcaggagaatcgcttgaacccgggag

SEQ ID NO: 639602 - DNA, 194 bp, Homo sapiens
tctggtagactgaattgtaggcatgtgatacatatctagccagggatactacacagtcctgtatgaagaatgcgttctggtcctgtgtaagttgctgacgatgatggtttcccgttttgggcgggtgtatgtgtcccggaatttatccatttcttctagattttctagtttacgtgcgtagaggtgtttatagt

SEQ ID NO: 639603 - DNA, 160 bp, Homo sapiens
  misc_feature (102)..(102): n is a, c, g, or t
tatatggcgaggctgcgggggtgtgtccccatcttcagcacacaacgccacttggcgaagtcagctccgtccttcttgtacttgggcacagcggctcagacnagcccatccaacccttggtgggtagtctcgccatttgtccctgccattggccagcggg

SEQ ID NO: 639604 - DNA, 969 bp, Homo sapiens
agcttactcagctatgcattgactcactcgctcaataacacattgtcttatctgagtgtcctcatgtccttagatatgccccgtatatgacattataaatctacatagaaataagtaactaatgatatgatgtgacaggctctggacataaaacactcgggctgtatgtattcctgtccttggagcgaaacgataccttgaatccgtcatcgacctctctctatgcccttagggctttcctttcatctataataggaaggatcagaaggctccatcggatcctcctacccatattagtccatgcaacattgcaacatggagtcccatgcatagggtgagtagtcatctctaatcgtaaactaaagcttgaatcttagggtatgattgaatctacagttcattgactagtacatgtcgcgcccaatgtattctcttagagaacaagtgacatgtggagtctctttgacagtgtatatgatcggaagtaagatgagctccccggaatgtgaagcaccctctatgtccgtagtaagtgagaattacgagtacgaactagatgactgtactttcgccaagggttcattcgtagccattggccctctagccatggatgggcgtctataagaacatgcatgctaagtaacccggaatgtcctaaaaacataacatctactattacaccacgcttacagcgacctgagagttttacgtacgtgtcacttggctcctggctatatctgcaggaaagcaatatcaaaagcatcacttgacgcaattcggtcctttactaatattcattgtgtcccctagaacattagtccttctgaattatacgcggcccgttatttgagccgctagtacgaagcggcacgtaataagaccacgactaatgatgcccagttaatgaaggaagtcaaattcctaaggatcaagcggccagtttgacagaaattcaccaaaagggggagg

SEQ ID NO: 639605 - DNA, 793 bp, Homo sapiens
  misc_feature (20)..(20): n is a, c, g, or t
  misc_feature (85)..(85): n is a, c, g, or t
  misc_feature (88)..(88): n is a, c, g, or t
  misc_feature (214)..(214): n is a, c, g, or t
  misc_feature (268)..(268): n is a, c, g, or t
  misc_feature (280)..(280): n is a, c, g, or t
  misc_feature (291)..(291): n is a, c, g, or t
  misc_feature (311)..(311): n is a, c, g, or t
  misc_feature (316)..(316): n is a, c, g, or t
  misc_feature (325)..(325): n is a, c, g, or t
  misc_feature (337)..(337): n is a, c, g, or t
  misc_feature (408)..(410): n is a, c, g, or t
  misc_feature (425)..(425): n is a, c, g, or t
  misc_feature (434)..(434): n is a, c, g, or t
  misc_feature (523)..(523): n is a, c, g, or t
  misc_feature (647)..(647): n is a, c, g, or t
  misc_feature (784)..(784): n is a, c, g, or t
ttacatatgatttccacatntttttcacgctaaaacaaagtacagataactctgccaacaatggcaaactgcttccctaatagcnatntgccttttcaactcaaatctcactttatattaggattaaaaaaaagtaaagatgagaaatcattagtatcctgcgcttccaaattatctaatttagccttccaccaaaactgcgtacatttttgantcggctgcacatgaaaagaatgggtgtagcaagaggtgattaaaaaaatttgcnaaaaagtaacanaaaatcacccnttaagtagttttccaaaagncaccngaggcagcngcgccagtcaanagtattagccctgaagaggtagagaatttgagcccataatacaaaaaaagccttggcccagcgcctcccgnnnaggatcaatattttnaagttaganaattttatggtaaaggaaccaggttccaccatttaaagaaaaggtgctggtcactcccatgtctcgataatttgtttattacgtgaganacagaagacggtcaaggacacacacgcacttgattttttttgtccgtctccattatcaagtttattcataagtgaatttgatattaataaatacaaaaaagcatcattcacaacaaagatatanacaaaccaaaataaaccctgcaataaaaccttctatttcagtgagtatcaagaaaaaacaggcagatgatttggtgcagctttcttaagggatcatagaagggacatggttttaaataaagatggcaagatcaatancaatagaca

SEQ ID NO: 639606 - DNA, 132 bp, Homo sapiens
caaacttcgttgaaagcggcatagtctttttcaatgtcttttaaataaatcgttaccgataagatatggctttaatctgtgcctgcatcagctaaaaattggtcaatcatgtcgaatgtttgttgggtttga

SEQ ID NO: 639607 - DNA, 147 bp, Homo sapiens
cactgaaggttataagcaaatcagaggaaatggacaaatagaatatatcaagtgttctacggtagagatttctgattcggagcaaggaatacagtagcacaggctccccttctgagggccacgatgacctccaaggccctttcccag

SEQ ID NO: 639608 - DNA, 320 bp, Homo sapiens
  misc_feature (21)..(21): n is a, c, g, or t
  misc_feature (78)..(78): n is a, c, g, or t
  misc_feature (96)..(96): n is a, c, g, or t
  misc_feature (134)..(134): n is a, c, g, or t
  misc_feature (141)..(141): n is a, c, g, or t
  misc_feature (144)..(144): n is a, c, g, or t
  misc_feature (275)..(275): n is a, c, g, or t
ccgaaaaaccgggcctaaccnaacattcaggacattggcgcctatccctcaaatttttggtcacccgatgcctggtgnatcaccgggcagacgttntttgccaacggtggctatactacccgttaatctcaagntcttctnggncgtgccgcagcctatttatcaggatggacaatcggtggataaaatagggagattacgggtgtttatccaggttgccgaggtgggcagtttcatccgtgcctcgcaaatcctgatgatgccaaaaaccacgntgtcggcggcaatacagcaactggaacatgaaatgggcgctcgtc

SEQ ID NO: 639609 - DNA, 888 bp, Homo sapiens
catggtggccaggcacctgtagccccagctactcggaaggctgaggcaggagaatggcgtgaacccaggaggcagagcttgagtgagccgagatcacacaatgcactcggcctggcaaacaagagtgagactccatctcaaaacaaaaaaaagaaaaaagaaaaaacatacaatttatgaaattgacatgacacattacagtctttatgaaccacaaaatacagttttcagatatatcatggttaatatgtatatataaaatcttaactaaatctcaaacaagggaaaaagtcaccattaattactccaagagaaagaactgttactaactactttaatgcaggagctcgtgcataaaacaagatgagtggatcacaaaacacgcacgtgagtatcacaccagatgaaaacaacacaggtatactcacattatggcattgataatcagagacagcactttagctgcttttcttcactggctagagaaatgggcaagaatcacggcattcaaaggtctacctccttccttcttcaacataaaaccaactaatcaaaaagcaggtattcaaatctttatacgatacccactgactagagtgcaaaatacctcatttgtgtctataatcattatcacgatgggggtaatgacacaaccaaatggatccggttgtaaccgttacgagatggtatcacggcttctggcgtggcacataaggctttatcacaggaccttgaatggtgtataaaacctttgttaggttacgggtcagacataaaacagtattttattcgcaaaatggaaaccgtaaaccaatagacctcccggctaacatgaaacagccagaaagacacttgacaatgacgacaacgaccaaaaggggaccaccg

SEQ ID NO: 639610 - DNA, 130 bp, Homo sapiens
gccttaaactccgggagcctcgtacctctttacgaggacagctgctctgccacagcaagctgttggggtcagctgaaaggcagcagcttccagtggcttctcccaacactcttggggacaaatatattta

SEQ ID NO: 639611 - DNA, 471 bp, Homo sapiens
ggcagaaggacaaagagaacgacaacgagacgcggttcagccttaaaggcaaaaagaaatgcactccttaatccttacacctaccatgcccttctcttacctattacagtgaaattccagcatgcaagctcagaaccaacacattactctctgtgcctaatgttcctcactgtggttgttttttattttttattgatcatacttgggtagtttctcgcagagggggataaggcagggatcataggacaatagtgaagggaaggtcagcagataaacaagtgaacaaaggtctctggttatcctaggcagagaaccctgcggacttccgcagtgtatcgtgtccctaggtccttacgatatagggagtggtgatagactcttaacgagcatgctgccttccaaagcatctgtataacaaagcacaatctagcaaccgacctataatccatttcaccctaagtggacacagca

SEQ ID NO: 639612 - DNA, 345 bp, Homo sapiens
acaatgaattcgtgtgaatgcttgcacttctcagagccacattggaaggtgaaatatttgcttttgatgtcccagaagcggtcgccatagatcaaagcctagctcctccccagtccggatgtcatcgggaactgacgaaggcgatgcgtggcaatcgcaggtcattggtgcaagcatgaaaaacccggacgggaatgatgttggggtcacacaggtggttgatgaagcggctgatgtcgacatagtaacggacatctatgcagctacacctctccatccttgtagtactaagtcgaagaggtaagcctcatcctctctcacatcagcctcaagatcagagatcag

SEQ ID NO: 639613 - DNA, 188 bp, Homo sapiens
tgtcgtctgcggtcatcgttcggctctctcctcgttccttccagcctggttctgttcgggttgtacggtagcactgctcttcttcatcctctgtgggtccttgcggcgtctgctacgcttttgcgtcgctgggtttggtttactccccctcaacacaagctgccgcgggggtcccgcgctcgcattcg

SEQ ID NO: 639614 - DNA, 332 bp, Homo sapiens
ggagttgaagatctcgtcgaggccagcggtgccgtttttcttcacgtggctcagtccgtaacccagcgctttgccttcgagcgagccatttttggtggcaagcgtttcgatttgcgcgaggtcctgggtggcgagcacggtgcggaagtctttggcgagctccgcgctctctttgcttactctgcgtaggctgaagaagcgctcgatcatgatggagatgctgattacgctcactacgcccatgaggtagaggatgccgtgagcagtggcgtccgcgaggcgaaacatagcttccattgtgtcttttctccttatgcgtcttgcaatttggg

SEQ ID NO: 639615 - DNA, 269 bp, Homo sapiens
agtaagctatagatatgcttattgtattcatccaattatgtgagggtgtgcgtgtgtgtgcgcactgtgtgtgtgccggtgggtgcttgcatgtgcaacagtagtgtgctgcccgcttgctcagccggctgagcaacgcgggcagtgaggacaaacagatgccgcggtcgacagaccaagaccagctttctcgtgtaatgcaaagtcccattaaatagacgtgcgtggctggaaagacgtaccttattcttgcataagaagacaacggc

SEQ ID NO: 639616 - DNA, 1063 bp, Homo sapiens
agcggggttcggttgcgggtcggaacggcgctgctctgcggggccggtccagtgctggcagctgccggcgcttggcggtgagtggctgggctccctgagtgggtccctccacctgaaggcggtgtggaccagctggctgagtgccagtgatgcctgtccagtgcggcagctgggggttcctcactcatcccagatgtatggtctatctttctgaagtagacttggtccatggcctgaaacatttttccgaaacatcagttttgacgcaacagactagtctggttgaaataacaatgaataaccgagattcaagcatggtttggaaaggctgaagcagaaacgttacgtaattggcaaatagtctgggtgacttacgttctctgttgactgttgatattaaccttgggccaagcattgcccattggaaattgccattcaccgggatacgcaggaaaccgtacggccagcccacgtccacggtctgcgcacgaagcacaaaggaccacctggtgacgcaacgtgggccttgggaccctcaaaaggccaagaaaagacccgtttggccgtagtcaccaagagactctgccgtttgaactaagtatacaatgtgcgcaccgggtggttggcccatccaggggagcgttgggaaagcccagagagcaggctccaatttgaagagggccacaatggcgtcggtgccacacgccaacacaattcgctttgcaccagtatatgacgggcttgactgagggaaacgaaagggacaaaacccaaagcggggagtaccaacatttcacgcggcccgtgaaaagatcgccgtgggggacgcccatgcacagaggacaaagacactggtggggactagacaggtggatacgaaagcgattcagcaacgggcaggaagaaggtcactacagggtcgacgtgatggcaacttgaccgggagagtgggagagtgctaaaccgtgggaacgtggacaaggggtggcagtggtggaggactgtcgtgtagggaccgcagtggccaaacgaaggcacgataaacctgcacacgtgaagcgaa

SEQ ID NO: 639617 - DNA, 166 bp, Homo sapiens
  misc_feature (130)..(130): n is a, c, g, or t
  misc_feature (161)..(161): n is a, c, g, or t
gatgcctctatctggtaagagcttcacagaattgcaggggttgtggttgctgggaagggttagtctgttagatcaggtgctgcagaatcgagtgtaacccttcctccctttagtcttactgtgtagcccngtgctggcctgcaacttgctatgtagacctngttga

SEQ ID NO: 639618 - DNA, 488 bp, Homo sapiens
  misc_feature (27)..(27): n is a, c, g, or t
  misc_feature (31)..(31): n is a, c, g, or t
  misc_feature (118)..(118): n is a, c, g, or t
ggtcatgagacctgccctacctggggngccntctctaggatgtctgtgacgggactggcatcgattcagaattcgctctacggagacttagtctattcagctccctttactctttgantagtggtcccttgaaattaagtttataggggcactgtgtctgttaggtttttttcaagcgtctgacattgcaggctcttattagagttagctttcgggccgggcgtggtggctcatgcctgtatcccagcactttgggaggccgagacgggtagatcactgaggtcaggagtttgagaccagcctggccaacatggtgaagccctgtctttactaaaatacaaatattagccgggcatggtggtgtgcacctgtaatcccagctattcggcaggcggcaggagaatcacttgaacccaggaggtggaggttgcagtgagccaagatcaagacatgcccctccagcctgggtgacagagcaagatccgttt

SEQ ID NO: 639619 - DNA, 535 bp, Homo sapiens
  misc_feature (42)..(42): n is a, c, g, or t
  misc_feature (59)..(59): n is a, c, g, or t
  misc_feature (63)..(63): n is a, c, g, or t
  misc_feature (65)..(65): n is a, c, g, or t
  misc_feature (71)..(71): n is a, c, g, or t
  misc_feature (79)..(79): n is a, c, g, or t
  misc_feature (310)..(310): n is a, c, g, or t
tctcagttcaggctgaaggggttgagttcgatgcgctcgatncgcgacggcaccgtggngtantnggccanctgtggtnggcaatgcgaagggcgatgccgggtaatatcagaaagcccagcaagctgtacaaagcaagggcggtcaacaaggcgcctacggcgcggatcaatcctttgggcatgggtgaacgccatctatgtcgaacgagagtgccttggagtatggcacgggaattcggtttcgaagaaccgtgggcgctgggaaacttcctacaaatgcaggatcagcgtcttcagcggaggctgtnggtctctggagggaaagtcggctccaggtgttataacctgccattcgcgcaccgggcgcccggctttttctgcgcagcgcagcacctgctcacgccagtcttccatgctgacctttgccaggttgttgcagcaaatcagcacgccattgtcggcggtggccagcagtgcgggtttgagcaggctttgatagtcgcgcaacaaatcgaccgtgccgaaggcgctct

SEQ ID NO: 639620 - DNA, 1084 bp, Homo sapiens
gctaggagcaggtgtgtgttgcatgatccgcgtaaaacgcgacgtggggacgggcgccgactcattttgacatagtcgagctagtcgcggtagggtaacggcgccgtcctgcaggtactggctcgtgtgcagtctcagtaagtgcgacgggcctccgacgatcagtagccctgaaacaatatgaagagcggagcgatgctgacagagtggagaccgggcgctcgcttctgtgtgttgtctgggttcttgcggctcttgtgcatttcgctcgtggtgtgacctggtggctcatcacccaattgaatacttctccgttgttgcctccttgttgatgactcaggcggttccctatgtgcgcattagtcattgctgtcccgccacgcggaagctctagcacgtggggttcccctttcgttggcttacctgtgccctcctcgtggctgtactgttgccccggcctgcctgcctatgtccggcgtgggtgtgtgtggggtgaaccccgtaacgccatggtgatctccattacctggtgcaggacttcagacgcacgacatggactctatactgtctgcatctgtcagttgctgtgaaacaacataataagtcggtgtgacacaaaaatggatttccctgaagacaagcctaaagttcagaacgagctctgctgaaccatgtgtcacaaggaggtccggaaactgagatttcagaaacataggtacaaaccgacacagtacatagtgccaagttgggaaggaagggggacgaggaattgtggaggcgagagcttaaaattccttgggtgcaagtgaattggaagtacccgtaggaagataaagacgtgagagcagaatgaaaagatgtccggtgcttgctgttacacaatgtaagatgaaagactagagctgggtaacggagtgtacaaaaggtgtatgggagaatgtaaatagtgagaaggtgtttaacggtggggacttgtaacataaggagtaattgaaggacaaacttggaagcatgtaggaagtagcagaaatataagaagttgaaatgatgaaagtaaaaatgatagaaatataacaaaagagta

SEQ ID NO: 639621 - DNA, 613 bp, Homo sapiens
gcgcagcggacacgtgcgtccggcctgcggcgcccggcaccggggcggacgcggaacccgaggccatgttccatgaaaagagttttttggtgtctggggacaactatcctccccccaacctggatatccgggggggcccaggccacaccagtgccacccactatgtcaggaatacgctacaccatgtgggacgtttacacaacgagaagaaatgatcaacggaatgaaaagacaaggaaaaaacagagaaaacaacaaaagaacaaagaaaacagaagaaaaaagaagaagcaaagagaaagaaaaagaagagaagagaaacacgaaaacgaagagaaacgaagcacaacgacaaacacagaaaccgaggaaacagcagcaacggaaacaagaaagaagcgacatcagaaagaccagacacaaacaagagacaagaagcgagcgagcagaagagaacaaaaagagcacagacaagagaacgagcaagagagagaaatgagagagagcgacagacgagaagaaaaagagaggacggaagaagaaagagaagaaaagagacagagggagaagaacaaagaagagaagaagagaaaaaagagaaagaagaagacac

SEQ ID NO: 639622 - DNA, 89 bp, Homo sapiens
gagacggagtcttgctctgtcacccaggctggagtgcatcatcggtgcgatatcagctgactgcaaccccccccttctgtcgtcttctc

SEQ ID NO: 639623 - DNA, 294 bp, Homo sapiens
gctcgaggtgatcagaggatcccgatagtgcactgttctagccttgggtaggagaatgagactggtcttgaaaacaaaacaaaaaacatggtatagggggcgtgtcatgtattagtacattcacttagtattcaagtgaagtattttacggtaaaagggtgtccgaagatcaggaaaccgaaagcactggtgggcgttgcccaatgaactctgaatgaagctctactgacgcctgtggtttcgtgtgctagcgaccagtatataatatgtagttaggagggttggtgatggcag

SEQ ID NO: 639624 - DNA, 244 bp, Homo sapiens
ccggatccttcccgactagcccgacagccctggctggtggttatcagcgtggcagccttgcctgagacaggaggcgcaaactccctctgggccattgatggtgcttcagcccgaagtcttgcacctggcagtaccatctgcatgttgacgtgctgtggagttacgacatggtggacagatagctgaggccagtgtccgtggtgcgtacacacctgtcgggctagtcgggggggtaccgagctcg

SEQ ID NO: 639625 - DNA, 370 bp, Homo sapiens
tgcgaggtgatctacggatcttcaaacaccgcaatctgtacagtcaaatgcttcatggaaaaaaaatctctctaaagcatctgaaatacttaaaaatgtttaaccttcaaatgcctagtgatcaggaaaggaatacttaggccagagaagcaggtgaaatcccccgttcacatgaagcatcccccatcgattcttaaaggctatgtaaaggaggacttaattgggtcccaaacccccagaataatataccactggctaagggggtattgtataaataatcaggggaaaatctattccttgcctagtttggtacagctaaattctttaccgtacacaaaaaccctttataatgtagagattgcggtgtaag

SEQ ID NO: 639626 - DNA, 136 bp, Homo sapiens
gaaaaaaacggtacttaaacagcagatgaagacattcaaggaacccagaacctgctaacttcgattgagtctgaaacagcagcttctgaggaaaccttgttcaagcgcgtcccagcgcatcagagacgaggctgca

SEQ ID NO: 639627 - DNA, 315 bp, Homo sapiens
aacctaaactacaaagggggaactgaggagggaactcaggagaaaggaactaactgcggagcttaatcttggcccagtgttcagccactcggaggtgcgggggctgaggcacatcagaagctgctggtggctgtagtggggtgggatgacctggccagagccaacgaggatactggagccaaagtcaagttagagacagctggaacgtgaatggggctcttgattttcttatcaaaacaccactcctccagctggactaaatattctttctagcaagcagctttgtgagctcctgaagccaaggaaacccttcgg

SEQ ID NO: 639628 - DNA, 469 bp, Homo sapiens
  misc_feature (32)..(32): n is a, c, g, or t
  misc_feature (56)..(56): n is a, c, g, or t
ggctcactgcagcctcaaactcctgggctcangcgatcctcccacctcagcctccnaagtctttgggattataggcgtgacaccgtgctggcttgcctttggttctctgaactactccagttctttccactaaatccacccccctcttttttcccctttggttaatcagaatccatatcttttgctccagatcaaagaaccctacccgatgatcccttctccattcacaaaatcaataacatactcaaaatcaataaacagctgaccgagcgcagtggctcacgcctgtaatcccagcactttcggaggcagaggtgggcggatcacaaggtcaggagttcgagtccagactgaccaacatggtgaaaccccgtctctacttaaaaaatacaaaaattagctgggcgtggtggtgtgcacctgtagtcccagctacttgggaggctgaggcgggagaatggcttgaacc

SEQ ID NO: 639629 - DNA, 1334 bp, Homo sapiens
aaagaatattgagattgtctgaagtatcttcccagtattacgatattgaggagtgcaagaaggtaagattagtgatagatctccatgggttatagtaaagtgaaaacggagatatcgggagaatccgctatgatgacatccactgagatgagctgagagtatgggtaggacttagcactacatgcttctgctacatatatacctgatagacataattgtataactacaggatgctatgtataatgatgatattaaagacataggaattatacaaaacacaaggaaaatgctgtaaagtattagacatatggtgatgctatcttggacacaaaaggattacaaagataatatagacaaaaagataggtaatgaaacacgaagatttataatagatcaaagatagaaaacgagaatacagaaacatacaatggacatgtgttaatatacatcaatatttagaatatgtactaggtttagaggagaaatcgagatggagagatggaaagtatcagataaaggcgtatgacaaaaataaggaataacgaacagagagacaatataatagacaactaaaaatatgaaacagccacgatcatgaacaccgtagggaaatagaacgtcaccagggagcacaaaggaagcacgaaaagaaccataagagtaacaaccagatacccataaagactgcgaaacaacgttaccacagacgtgcgaatagaaacattgggggacacagatcaagcatcaaagccgtacatcatagtgggccgtcaaaaactaccatacacaacatagacaaaatgaacggaaataaagaacagtacagaggcaaggaaaccataaccctcagaccgggcaacgatagaacaaggaaatgaaacggaagaacggcaatgctgaacaaggcgaacctcgcaaacactgcaaaaaagcacaaatgaaacaacgcacagacattagaaacagacaactaggtcaagcacagaagaagacaaaagcaagcacaaaggaacaaccagcagaggaaacacgacggacgcacagccgagctgaacacagcaaacagcaagcagaacaccagacagaaacagcgcaaaaacgaaaaaaaaagaggccagagaaaacacaagggaaagacaagacaagcaccacaagagcgccaaaaggcgccaacacagagcagagcctagcaaccgaaggacccagagcaaatcaagaaacagcaagaaacaaaaaacacgacccagacaaacggcgaccgcggaggaaaaaaagaaaaaaaagtagaaaagacagacaaccaacacgacgacgcaaaaggacaacaacacaaa

SEQ ID NO: 639630 - DNA, 453 bp, Homo sapiens
  misc_feature (32)..(32): n is a, c, g, or t
  misc_feature (56)..(56): n is a, c, g, or t
ggctcactgcagcctcaaactcctgggctcangcgatcctcccacctcagcctccnaagtctttgggattataggcgtgacaccgtgctggcttgcctttggttctctgaactactccagttctttccactaaatccacccccctcttttttcccctttggttaatcagaatccatatcttttgctccagatcaaagaaccctacccgatgatcccttctccattcacaaaatcaataacatactcaaaatcaataaacagctgaccgagccaccatgcctggccaagaaacatgggttctaatcccaatgcccccgcttcctagctatgggaccttgattgagtcctgtaccgtgcctcagtttccccacttataaaaagaggttactaaaaaggatgcttcactcaagggtgtgaagacccagtgaatgaagtgttaataagaaaaaaaaa

SEQ ID NO: 639631 - DNA, 146 bp, Homo sapiens
aattcacggccgccggatgaagaagctgggaaagtgagcacatttgggagctggagaacagggttatcctacccctgtgactctgttacagcttacataggttccttactatactctagcatccatcatgacactggagtttcatg

SEQ ID NO: 639632 - DNA, 258 bp, Homo sapiens
ttttttttttttaggggggcccccccattaattttgtttactgggccccccggttaaaaattttttggggttttgtggaacttggacccctgaaaacttttttttatttataaaaaagctttggaagcctgttttgggtcgcccgtaaatttaggggcttttttagataacttcccccttaaaaaaacgggggggtttcccggcgggtttttttttttttttataaaattttccccccttgttttttttcccccgtta

SEQ ID NO: 639633 - DNA, 220 bp, Homo sapiens
gctccaccttaccaccagacaaccttgagccacaccatttacccaacataaagtataggcgatagatattgaaacctggcgcaattagatatagtacccaagggaaagatgaaaaattattacccaggcattatataggcaggactaacccctattacctctgcatatatgaattaactagagaatatactcttgtcaaggagagaccacagactataga

SEQ ID NO: 639634 - DNA, 323 bp, Homo sapiens
gaaatggagttttgctcttgctccccaggctggagtacagtggcacaatctcagcttacagcaacctctgcctcccgggttcaagtgattttcctgcctcagcctcctgagtagttgagattacaggtgcacgccaccatgcccagctaattttttgtatttttagtagagacagggtttcatcatgttggctggtctcaaactcctgacctcaggtgatccacccacctcagcccccaaaagtgcagggattacaaggtgtgagccactgcatctggcccaggttaagtaaacttttaaatccctcgtcgacgcggccggaa

SEQ ID NO: 639635 - DNA, 1009 bp, Homo sapiens
gggcaagaggagaggaaggggagccggaccggactagccagacaagagccggtgaatgggtttgtggtgacccgagaggagaagctcaacctggactcgatacatacgggcgcctgctggagatgcagctcgcggcctggaagaatagtacagctgacagagaacgagatccgcggtactagtgcctagaaatccccgggagatattttctagagcccagccccatatcgttctaggatgctaggagagcaccccctacagagatactgctggtagacataaacacgtgcaagtactaacagacctatctagcgacatatattgagtaatgggcggttatccctacccagaggagacaagctagcctctattctaaagggagaactactgtagcgacacgtgggtcaacgccagatcctatgcgagaacacatactagtcctagcatgcttagtgcctaagtaacgatacaaggctacgccgcggaagagacattctatacctagctacccgtaggtgacacccacggagctagtgcccaagcatacagaccggcagtctataggctttctcacgcatagacgtgcacagagaacgctatcaaccatcagaagctgtgggaaagaaccttccactagactgctatcaagctggctagcccatacgcggccatagttgggaccgaaaagattcttctagctgccacgggagggctagtccccggagctgcagtctatggagccagaattcggcgggatcatgcgggccgacagatgtgcctgaccaggttccttgctgtgtgacctgctgtggtctgcctgacgaggacctgcagcgctgcggcgaggacgaccgaggcgcctcttacctatggagccgagctgtggccggtcctcacgcaggccgatttgacccttgcgagacgccgctcgcacagaggcacggtcctggcacgcgcggccgggccctccccccttctgcgcagcagactcgtgccagtcttgcaccca

SEQ ID NO: 639636 - DNA, 954 bp, Homo sapiens
ggctcaccgaaatggccgcgtccagtcgaggaaatttggagcggaaatacgagtcagctggaccttgcgaaatttgctaagaagcagccatggtggcgtaagctgtccgaggcacgccgaatcatggaccttcacgtaggaagaagtagtaggcgtgccaaacccagcctgttcattgggaggctgtgaactgggagtggtgcacagggtctcagtattccaggaaggttgcgaacgttggctgcacatcaggctgtgggaggctgagatatttctctcctctcagtttgcagaaagcattacttggtacatcaaacgttgactgtcaacgaagtggccgcaaggacgtgcacatgaatgcgccagagaggcggctgatgatcgcgtaagtagcatagtcgatgatatccttacgtgacggtctgtgagcaacacggctagtgggaggtgcgatgctccttcgggaggaaagaagtgtctaagtaaccgtgggggatttccggaggcttctgcttggcaatggcatccctaagggaagatgacctcatgttcatggtccctggttttttccagccagcagctctacactccaatcataggaccatcgagtccctcctcctcttctcccatgcctttcttgccctgccatgcaaatctagagggcttcttcttaagcatctggtggtaccaagtcaatgtgggaccatgagcttcatggtggcggaagagacatagtcctagctctcctccaagtaacccctgtggcccagttgtgccaacaagaagttcttaccccatggaagacactttggaccttcacgatggtgccggcggactggctgaagttgcccctgctttggaaaaatgccagatacttggggggagagggactgtttgggaaaaaaaaaaagggggcgccaaaacttgggggaaaatcatgtgtaaaccgaacga

SEQ ID NO: 639637 - DNA, 1311 bp, Homo sapiens
  misc_feature (288)..(288): n is a, c, g, or t
  misc_feature (304)..(304): n is a, c, g, or t
  misc_feature (339)..(339): n is a, c, g, or t
  misc_feature (348)..(349): n is a, c, g, or t
  misc_feature (355)..(356): n is a, c, g, or t
  misc_feature (360)..(360): n is a, c, g, or t
  misc_feature (400)..(400): n is a, c, g, or t
  misc_feature (469)..(469): n is a, c, g, or t
  misc_feature (818)..(818): n is a, c, g, or t
  misc_feature (825)..(825): n is a, c, g, or t
tgtccccttggtgccccttggtggggggggtccttttgggtctcgtgatttgtggtctgttgcccccctttaaccgggattacgcggcgtttcccctacgtgggctcctgttgtgtctgtccttgtgcacatcacgttttgcgctcttaagtgcatcgtccattagtggtcccccagttgattccggttattcgcgtaaggttggttataattaaatgtcggtttgtgcacatgctttgggactctgtgtatgagtacgactaatatcttctatttactaagaagatnaagaggtcgataaatnaggaggtcaagcccgttttgcaaggtcacacaggnaagaagcannccacgnnatgnacttcggctgtcacctgcggtgggcgcactagaggtcttntgaactccttcggctaccgtcgccgcgttctcgctgtgcactcttattctgcgcctgcgcgcggctacngcacggttcgtttttcctttagtcaggaaggacgttggtgttgaggttagcatacgtatcaaggacagtaactaccatggctcccgaagttttgccaaaacctcggatgcgtggccttctggccaggcgtctgcgaaatcatatggctgtagcattcgtgctatccctgggggttgcagctttgtataagtttcgtgtggctgatcaaagaaagaaggcatacgcagatttctacagaaactacgatgtcatgaaagattttgaggagatgaggaaggctggtatctttcagagtgtaaagtaatcttggaatataaagaatttcttcaggttgaattacctagaagtntgtcacntgacttgtgttcctgaactatgacacatgaatatgtgggctaaggagaataagttccatcattgagtaaactaaacaattgtaacacaagtaagaaacatgagagaaatcacacacacacataaccactgaaggaccaaggataaccacgtatcaccactgaagccaattcatacaaatagacgaaggaggcacagccggctataacaccccgaagagattccaggacaccgagaaagaacgctgagaaagagtgagagggacaaaaaaacaagaaaaaagcgcgaaagaataccaaaatatgccaaaaaacgaaaaaaggaaaaaaagagacaaaaaaatacggcaaggcgagcactatatacaggggacgaaaaaaacgaaagttgtccagaaaagaaaaagacaacgacccaggggagggacaaaaaagcttaaagacgagtcagcgagagaacacagaggacgcacgaagaagacgcacaca

SEQ ID NO: 639638 - DNA, 1631 bp, Homo sapiens
  misc_feature (288)..(288): n is a, c, g, or t
  misc_feature (304)..(304): n is a, c, g, or t
  misc_feature (339)..(339): n is a, c, g, or t
  misc_feature (348)..(349): n is a, c, g, or t
  misc_feature (355)..(356): n is a, c, g, or t
  misc_feature (360)..(360): n is a, c, g, or t
  misc_feature (400)..(400): n is a, c, g, or t
  misc_feature (469)..(469): n is a, c, g, or t
  misc_feature (1138)..(1138): n is a, c, g, or t
  misc_feature (1145)..(1145): n is a, c, g, or t
tgtccccttggtgccccttggtggggggggtccttttgggtctcgtgatttgtggtctgttgcccccctttaaccgggattacgcggcgtttcccctacgtgggctcctgttgtgtctgtccttgtgcacatcacgttttgcgctcttaagtgcatcgtccattagtggtcccccagttgattccggttattcgcgtaaggttggttataattaaatgtcggtttgtgcacatgctttgggactctgtgtatgagtacgactaatatcttctatttactaagaagatnaagaggtcgataaatnaggaggtcaagcccgttttgcaaggtcacacaggnaagaagcannccacgnnatgnacttcggctgtcacctgcggtgggcgcactagaggtcttntgaactccttcggctaccgtcgccgcgttctcgctgtgcactcttattctgcgcctgcgcgcggctacngcacggttcgtttttcctttagtcaggaaggacgttggtgttgaggtgagtccggtcccttttgcatccctaccccgacactgcgggttgtcacaacggcaccctcccgctttctctctgcctcggatttagtcgtgactgtgtgtctccgccgtggtgcagcttcaggcctctcccgcatctactctctcacgcttccgctgcggcctgagggagggcggcgggcggaccacggaccggggtgggttgcgacggccccaccgaagccgggtgggctgcgggaccctcgagaacccagctggcttcggagtgagctggcccggggctggtacccgctgcgctttttcacagccattgtgaccttggttagcatacgtatcaaggacagtaactaccatggctcccgaagttttgccaaaacctcggatgcgtggccttctggccaggcgtctgcgaaatcatatggctgtagcattcgtgctatccctgggggttgcagctttgtataagtttcgtgtggctgatcaaagaaagaaggcatacgcagatttctacagaaactacgatgtcatgaaagattttgaggagatgaggaaggctggtatctttcagagtgtaaagtaatcttggaatataaagaatttcttcaggttgaattacctagaagtntgtcacntgacttgtgttcctgaactatgacacatgaatatgtgggctaaggagaataagttccatcattgagtaaactaaacaattgtaacacaagtaagaaacatgagagaaatcacacacacacataaccactgaaggaccaaggataaccacgtatcaccactgaagccaattcatacaaatagacgaaggaggcacagccggctataacaccccgaagagattccaggacaccgagaaagaacgctgagaaagagtgagagggacaaaaaaacaagaaaaaagcgcgaaagaataccaaaatatgccaaaaaacgaaaaaaggaaaaaaagagacaaaaaaatacggcaaggcgagcactatatacaggggacgaaaaaaacgaaagttgtccagaaaagaaaaagacaacgacccaggggagggacaaaaaagcttaaagacgagtcagcgagagaacacagaggacgcacgaagaagacgcacaca

SEQ ID NO: 639639 - DNA, 384 bp, Homo sapiens
  misc_feature (1)..(1): n is a, c, g, or t
  misc_feature (324)..(324): n is a, c, g, or t
  misc_feature (326)..(326): n is a, c, g, or t
  misc_feature (335)..(335): n is a, c, g, or t
  misc_feature (362)..(362): n is a, c, g, or t
  misc_feature (367)..(367): n is a, c, g, or t
ntttttttaaatgaagcatagtaagtacataaaccaataacatagtcactcactatgactatgaagtattatgtactgtatgtaattgtacgtgctgtgcatttatacagctggcagcacaataggtttgtgtacaccaagcatcaccacaaagatttgggtaatgcattccattgccctaacgggcttacaacatcactagggcaatagggaatctttcagggtccgttgttgtcttctggggacttctgtcatatatgtggggtctgcctttggacccaaaatgttgttatggcagtgcgtggactataccccactatatgntncaagttctnaatggggatctggggggagcttgattnaaggnggaaaataatgtgtagg

SEQ ID NO: 639640 - DNA, 1577 bp, Homo sapiens
  misc_feature (288)..(288): n is a, c, g, or t
  misc_feature (304)..(304): n is a, c, g, or t
  misc_feature (339)..(339): n is a, c, g, or t
  misc_feature (348)..(349): n is a, c, g, or t
  misc_feature (355)..(356): n is a, c, g, or t
  misc_feature (360)..(360): n is a, c, g, or t
  misc_feature (400)..(400): n is a, c, g, or t
  misc_feature (469)..(469): n is a, c, g, or t
  misc_feature (1084)..(1084): n is a, c, g, or t
  misc_feature (1091)..(1091): n is a, c, g, or t
tgtccccttggtgccccttggtggggggggtccttttgggtctcgtgatttgtggtctgttgcccccctttaaccgggattacgcggcgtttcccctacgtgggctcctgttgtgtctgtccttgtgcacatcacgttttgcgctcttaagtgcatcgtccattagtggtcccccagttgattccggttattcgcgtaaggttggttataattaaatgtcggtttgtgcacatgctttgggactctgtgtatgagtacgactaatatcttctatttactaagaagatnaagaggtcgataaatnaggaggtcaagcccgttttgcaaggtcacacaggnaagaagcannccacgnnatgnacttcggctgtcacctgcggtgggcgcactagaggtcttntgaactccttcggctaccgtcgccgcgttctcgctgtgcactcttattctgcgcctgcgcgcggctacngcacggttcgtttttcctttagtcaggaaggacgttggtgttgaggtgagtccggtcccttttgcatccctaccccgacactgcgggttgtcacaacggcaccctcccgctttctctctgcctcggatttagtcgtgactgtgtgtctccgccgtggtgcagcttcaggcctctcccgcatctactctctcacgcttccgctgcggcctgagggagggcggcgggcggaccacggaccggggtgggttgcgacggccccaccgaagccgggtgggctgcgggaccctcgagaacccagctggcttcggagtgagctggcccggggctggtacccgctgcgctttttcacagccattgtgaccttggttagcatacgtatcaaggacagtaactaccatggctcccgaagttttgccagcattcgtgctatccctgggggttgcagctttgtataagtttcgtgtggctgatcaaagaaagaaggcatacgcagatttctacagaaactacgatgtcatgaaagattttgaggagatgaggaaggctggtatctttcagagtgtaaagtaatcttggaatataaagaatttcttcaggttgaattacctagaagtntgtcacntgacttgtgttcctgaactatgacacatgaatatgtgggctaaggagaataagttccatcattgagtaaactaaacaattgtaacacaagtaagaaacatgagagaaatcacacacacacataaccactgaaggaccaaggataaccacgtatcaccactgaagccaattcatacaaatagacgaaggaggcacagccggctataacaccccgaagagattccaggacaccgagaaagaacgctgagaaagagtgagagggacaaaaaaacaagaaaaaagcgcgaaagaataccaaaatatgccaaaaaacgaaaaaaggaaaaaaagagacaaaaaaatacggcaaggcgagcactatatacaggggacgaaaaaaacgaaagttgtccagaaaagaaaaagacaacgacccaggggagggacaaaaaagcttaaagacgagtcagcgagagaacacagaggacgcacgaagaagacgcacaca

SEQ ID NO: 639641 - DNA, 474 bp, Homo sapiens
aaagccctcaaggaagcaaagggacccagctcctccagcagttgctctggatccaggtgggtccattggatatccggggcggccgggcaggtaggcggagcccctttggatgttggcctccctcccagaagcagtcgaggggggtgaggatcacgcagggaaacagtttctcaatcatccgctcaatcattccatttacaagaagggggaactcttgactggtagcagatttggttcaaatcccaggacttcccatagagtgatactgggacttgactggcagtgagggctgcctggaggtggaggccaagtgctgcgggtgtgaggatgtcctctccctcggggggggcggtctgtatcagcatcggagaggtgtatgcagcctcctccccaagtttctcctgggtgtaatgcagttcttgggctcagcgggctggccatttctacccagagctggtcccagtttgctcagag

SEQ ID NO: 639642 - DNA, 797 bp, Homo sapiens
aaagctataaggaactctacacgttatcatgcagtggttaacgtgataatctgacactatggacttcagacatgcagggttgacaggtgaatgagcagcaataaagaaggcgctgcaggacggtggaagacgaaaatcagtgagacataagccagcaagagaaaccatctactgaccaccccctcctccacgcatcccacccttctgtgaaaatctcgccctattagtcactgtagaaccacacaatatcatgactataatacatctcagggctcagtagataagatggttcctggctgctgttgggcattcagtcagggacagtggttagctgtggaaagaaatgtatgactgggagaaatgaagaaatatacggggataataatgggagaacgagattatacgcgatactaatagactggtaagcagatcatgcctagccgtgtttagcccacatggatctacaggagtatacaacgaggcggagattgcttgggatagattgatcttggaaggatgtggaggtgaaacatttgactgacccatctagtgatccagggcgagacagagcatgatgatccatgtgagtgatggtcaccaggaccagcggcatctaggagaacgatgcaacaaaacactacatgagcaaaacatgcgagttgtaatcctatgcgtgtcgcaaagctttaggttgcagatctgaagaggcaatgagtgatgcgccgtgaaagggattctcttgcctcggatgaggcgtcaattttgatctcccgccgcgaaattcccccagaatccgg

SEQ ID NO: 639643 - DNA, 1250 bp, Homo sapiens
  misc_feature (377)..(377): n is a, c, g, or t
tggggacatatgaaaccctttaggggggcccggggggtgtgtggggggtgagtgtggccaaaaggggccgctcggtgttataaaacccggggagttcccaggggaacacccgggggtgggggccacgcgggggtggggacaccatgtgagaccccaaagaagtgcaccccggagggatttggggagaatatgtctcgcgggacacgtatgcgcggaaagaggccgcgggggccgcaaatcccagaggggagcgagaggggtgccaccaccactagaagagagaacacaccctaccgtcacacgcagaggccccccacacgagtggacacgcgacaacaggcgggggacacacatgtgtgagacacaccacttcgtgngtgtataaaacaaaagtggggcgcgttgtctaggtcggaaaccccaaggaacgagacccacccttctcagacacacagttggtgtgtgggcgaacccgcggggccacaaatatcaaggagggggggccccaaagtgtggtgacacaccaaaaatctccttccacacgagagtactcgcgtgtgtggagagagccccgaatttctcgcacctaccgagagcgaaaaaagagacccacgagggggggtgtgacaaccacaagagaggggcgggggaaacaaaaaaggctatacgaaggtggtgtcaccccgccaggttattgaaagccccgggagacaaggggactggaggagtagtatagcccatccccggagggaggcggccccacgccaagctgggagtcacaaaccaacagaccttgcgaaatagggcaccccccttggggaggaaaaagccgggcgcagacaccaaccacgattacgacagcccagagaactacaccaaagaggaggggcagagagatatgtctttctacaccacaacagacacgcgccgtccccttccgagaagagacacattagtcaccataagagacaaaacaggggcaccacctgtcgacaacagggcgctccaacacaagagaacaccaccccaggggaatcttcgggggggacaccacacattgtgcgggggaaacaacaaccgagtacgaggcggcccgacaaaaaaaaaaaaatacaccgacgagggagggcgaccaaagattcaagcgtatccccacggtctcttctgtggaccaaggtcggcggccccatataaggggctggattataaacacaagaaccagggcgacggaacaacacagtcgagatgag

SEQ ID NO: 639644 - DNA, 866 bp, Homo sapiens
tggggggaaataaaaagttctttttgggggcccaaaccaggattccggggttttggaggcccctggtgttttggaattttttcttccccagttttttctcgggcgggtcccgaaccccacagaaggggtgttctatctgccggggtaggggagttcctgggggtttttctaccttttccttcttcttctctccagcgggtgggtctcgccacgggcgctggtgtatttatccacgccaatccttgtgtagacgcccagggcgcgccccattataggcggcaacttttttctgggtaggggctcacaagacggccaaagactctttggggggcagcaaggaaacccaccatcccgggttttctttgtggtcgaagggggggggggagattgcccgcaaaacactctggaggacggggccagaaggggcgcggggcgccctccgtgggagtttggggggagcgaagagaaaatacctcagcaggggtccccgccacaaaaaaatggcggcgtgggggccccagaaaagtggggaagggccctcggagaaaagggcgtgggtggtaccacaccggtggagcgggggcagaaacggcagggaacctccacttcggccgcttggaaaaattgcggcgcaaaaatgtggtggacagtcgcctacacaacaggcggtaacagaccaaccacttttgggggcccaagaatgacccgtgtttacccacaagggcgcccacgggcggcgccaaaaaaaatggcgtctcaaccaaaacaacgcaccaggacctggacctcccgcaattcggggaaaagcaaaacggaaggcgcggaaaaaaaaccccggggccaagatagcgaccacgtttggccag

SEQ ID NO: 639645 - DNA, 494 bp, Homo sapiens
  misc_feature (295)..(295): n is a, c, g, or t
  misc_feature (303)..(303): n is a, c, g, or t
  misc_feature (378)..(378): n is a, c, g, or t
  misc_feature (400)..(400): n is a, c, g, or t
  misc_feature (451)..(451): n is a, c, g, or t
  misc_feature (485)..(485): n is a, c, g, or t
aagcagggtatcaacgcaagagtgcccagttactggccggaggtgacgttccggattctctggtcagatcgtcggatgcgatagcgaccaagtaggagtgttcagacctgcgttagagaccgtagcgtaagcggatgccctatttagtcactaggcaatcttgatgtcttcgaagctcgttcgtggtcgagtgaattcgtgtaccagttgtaggtatgagcaagatacaagttcaagcatgacggtagaacagacgccagatggttcgcatccatgtataaagacccttgttacnaggcacanaccaagacaggaccatggtggacgaacgtatgcggaaggagggccgcgttgctcgaatgccatttctgatacacnctagggacgtccaagcccagcntacggccttatggatggattggacttaacccgattgtttctgcaacgactntgcgtgcgcaacacactgcaggcggtcacggatntacagatgg

SEQ ID NO: 639646 - DNA, 247 bp, Homo sapiens
gatctctagcaggatcccctcactgctgactttattccaatatttggatgagtaagttatagggtagaatttgtacagttggatttaatcttttgaaaagtaaattccttgtttactgatttgccttactaaaccagcaattaataagagtttcagtttccctatattctcatcagttggttggtgttgtcagtgcttcggagtttgcccattctaataagtgtgtagtagtattctttatcactag

SEQ ID NO: 639647 - DNA, 902 bp, Homo sapiens
  misc_feature (412)..(412): n is a, c, g, or t
  misc_feature (449)..(449): n is a, c, g, or t
gtcatggctgcgactgtggcgacggcggcagctgtggccccggcgccagtcgcccggtccggactgcgcctcttcggtgcactggttccgtgaaggtctgcgattccacgacatccctggcgttgctggcggccgtgcgcggggcgcgctgcgtatcgctgtcgtttacattctcgacccgtggttacgcgcgcctcctcctcacgtcgggatctaaaccgtatgcgaggtttcctactatcaggtactcatggaagtattatggacacctacatgtttaagcgaaacttgaattctcccagcctggtttgtagtcctggggcacagcacagcacgactgatgttcccaaagtgcttgttccaagggaatgcggcgagttgaccccgctttaaccgtttgaactcatgactnctgaacccatttgcggacaagaagcggagatgctagnccaatcatgcaaggatggaccaaggagggcgtaggatgctgtgatagtcgtgacggtagaagttctcaatactcctctatgaccttggacaggaatcatttgagctgattgggcatgatgccacccacttacataacaagcgctttcaggcgcatcaatcagcccgctttggcagcttgccctaagcaagcccacgtgggcttggtagagcgagcccagcagatggagcagcttgccagggacccgatgatccaaggatgaaccacgaacgagagctaacggacgttgccctcccttggtaggcagctgggggttcctccactagaaagggacttgagtcctagtctgtcttggcaagaggagcgacgtagactcgaaacctcttgggccggcttggactaaagcactttggtaactggaagggtctgggtttggccaactattgagagaacc

SEQ ID NO: 639648 - DNA, 819 bp, Homo sapiens
  misc_feature (144)..(144): n is a, c, g, or t
  misc_feature (147)..(147): n is a, c, g, or t
  misc_feature (159)..(159): n is a, c, g, or t
acttcagaagagcttgagtaggccaaatgtgaagttaagttttccaataatgtgacttcttaaaagttttattaaaggggaggggcaaatatggaattagtggagtggctgttacggttgggatggggggtgggttaggtaatngtntagtttatgatngcagataaactcatgccagagaacttaaagtcttagaatggacaaagtaaagaaatatcaattccaagttgcaagtaactcccaatgatttagtttttttccccccagttgaatgggaagctgggggaagttaaatatgagccactgggtgtaccagttgcatgaatttgggcacggaacgtgtcatactttgatactgtatctgtttccttcaaagtatagagcttttggggacggaaagtattgaactggggtggtctggcctactgggctgacattaagtacaaattatgggaaatgcaaaagttgttgcatatggtagttgtgtggtctctttagcaattgaaggtgattcactaataatttaaacatactatagaactgagagaaggaagggttaatgatcctgaggattcttctgatgggaagctttgtgctcatcaaagtaagattctattacacgtgtgttgtagcaagtttctagtgtcggcacattctttccattgttactgcaaaacagagtaagggtttgctcaacattggtactgtattaacctttggtggtaatggactgcacaatgcaaaacatgagtctaaaggagaatggagaggcggacattagtgacgtgaaaattgcacacgcgatgaagaaactggaga

SEQ ID NO: 639649 - DNA, 466 bp, Homo sapiens
  misc_feature (144)..(144): n is a, c, g, or t
  misc_feature (147)..(147): n is a, c, g, or t
  misc_feature (159)..(159): n is a, c, g, or t
  misc_feature (302)..(302): n is a, c, g, or t
  misc_feature (382)..(383): n is a, c, g, or t
acttcagaagagcttgagtaggccaaatgtgaagttaagttttccaataatgtgacttcttaaaagttttattaaaggggaggggcaaatatggaattagtggagtggctgttacggttgggatggggggtgggttaggtaatngtntagtttatgatngcagataaactcatgccagagaacttaaagtcttagaatggacaaagtaaagaaatatcaattccaagttgcaagtaactcccaatgatttagtttttttccccccagttgaatgggaagctgggggaagttaaatatgaagnccaacttggggctggtaccagctgcatttaactttgggggcaagcgaaagtgtcataaattgtgattactgctaatctgnnttttacctttcaaagctaatagcagccttttgggggcgaaggcacaagctaatgggacacctgggggggcttggggctcctta

SEQ ID NO: 639650 - DNA, 624 bp, Homo sapiens
tggaaaaagtcagggaggccagggggtgggcttgaaaccagcttgggggggtccgattccttcctttttggtctaaatttatgtatacgggtcctctcgaatgtgtggtaggggggggggcatccatatagtcactccagggtttagtggagggttcttctactattaggacttttcgcttcgaagcgaaggcttctcaaatcatgaaaattattaatatctacggcgtgttagagaaagtgaagtgagcctacagatgataggatgtcacagtggtgggtgtatgcatcggggtagtccgagtaacgtcggggcatcccggatcaggccgagaaaagtgtcggggggaagaaagtcagatcctacgccgatgacatatgatcagtgaaagggatcagggcgtacgtcggcgctagggggtacgccggagaataggggaaaccagtgaatgacagcctcctagtgagggcaaatacaggtccaatggatacggacactaggggaagggagcaacaaggctacctacgtagtcagcgtcagcgacgaggccgcaccgagcgtcgcacgcgtgagagctctcccgccgcaaacgccgcacgcaactgccccaacgccgcccccaag

SEQ ID NO: 639651 - DNA, 125 bp, Homo sapiens
  misc_feature (85)..(86): n is a, c, g, or t
gtagtgcctgaggaggagctcaggccttagcgtaggcggcccacattgcagccagcccctctctccatgctcccggcttggctgnntgccgaggctgggccgtgtcataaagagttttgcagtgt

SEQ ID NO: 639652 - DNA, 120 bp, Homo sapiens
gggggccccccccccttgggggcccccggggttttttttttcccccccccccccccccccccggggtttttttttggttatgtgggggggggaggatttaataaaggggtttttttccca

SEQ ID NO: 639653 - DNA, 179 bp, Homo sapiens
gagttgaagtggcatgcgcccggcagggtattaggtttttaaaagctttttagtttccatgaaatcagagagcgagattctgcagtgttggtttctctcgaagttctaaccttggtgtagtttcttcatgtgtaagaggtggcatgagaaaaagggatcaccaatagcagatgagggtt

SEQ ID NO: 639654 - DNA, 431 bp, Homo sapiens
gcacgagagctactcatgttaaaaagaatcatagattgcttttggcaatgagaggaaatcatttaattcaagacagggtggttcctctaggttactcactgatgagacaacaacaatggaaaaatttgcatcattgctctctttcctctctgttaaattgtgaacaagttctttctgtgatcctgtttttgtgttgtgtctcacaaattcaaaacattctggactcttccttttttcagtggctgttcttagtgatgacatcagttgtctacaagaaaatatttgcacttgtgttctaacaacagtcactgtttgttatagtctctggttttattttcagatattgttccaggatttctttattttgttatttataatatgaaatccatgtttatgaaaaaaacatgaataaaagtcattcttattttcta

SEQ ID NO: 639655 - DNA, 499 bp, Homo sapiens
gggagacactggacccagcagggtcacgcgggaggagactcgggacaccactcgctggctgccaccgggagcagaggggggctcgtgccgcccctcccacatcagtctccagacccttggggcttcagaggcctgctcctagtgctcctcggaggaggctgctgggtttcttcttttccggagagcaaactttcctcggagatgcctggcaggatgagccgtggccccggagaggacgggaccagcctctgatcgccgctgcgtgccctgcatgcccatggccaggaggccccagggaacggacagcctgaactcttagtgcgcctgggaccctcacggctccagatcaagtggccgaggcacccagagtttgaaacactcaggctctggagttcacgcagcaaccagcagcatgtgacaaaaacctgcccatggatcacgcagcgtgaccggaaaacatacgccacgtcttcgcccggaacgccacataaatcgcagg

SEQ ID NO: 639656 - DNA, 260 bp, Homo sapiens
aacggggtgcttgtgctggccgggatgcatgctacgtggctacgctcacgccaaccttctacatccccgtatggggctgcgccacggctctcgcctggtcaaccacctgattggcaacatacacactcacttggggcactaccgcgtagacctggatgtgagcaagtgcaccaagaacagcttccagacactgcagatgaagctagaaaacatcaccaacccctggagcccgagacaccgcgtggtccagccaactctgg

SEQ ID NO: 639657 - DNA, 282 bp, Homo sapiens
gaatcccctagcaaaaatacatacaataatcctgggctgggcagttgctcatgcctgtaatcccttgggaggctgaggcaggcagattgtttgagcccaggagttaaagaccagcctgggcaacacggtaaaaccccatctctacaacaaatacaaaacttagtgcacgcctataatcccagcactttgggaggccgaagcagatggatcacctaaggtcaggagttcaagaccagcctgactaacatggtgaaatccctactaaatacaaaaaaaatcagc

SEQ ID NO: 639658 - DNA, 178 bp, Homo sapiens
aaggtcattaggaaccattttcgacgaagaggcgcagatggagttggtgttaggtgcatggcctgctgcgtgtatgatgtttctgtactctggtagttgaggaagagcagatgactctatcatgacagctcggatagtttcacaaagaagaactctgccctgatctacgtagtcttgg

SEQ ID NO: 639659 - DNA, 206 bp, Homo sapiens
acgatccttatttgcggtgcctttcccaaacatctcacgtagttgaatctgaaagatgtgtttccatgtacatatcttgaagatcagaaggcagtttccttatttcaggttaaagcacagataattgtgccttagaaatggcacccatcaaaatgtctacaaatgcagcagaacatgagagggaatctctaccaggagaacatctt

SEQ ID NO: 639660 - DNA, 476 bp, Homo sapiens
tggggggctaggggggggcaggggccccttttccccccggttcccggggggcccaaggggggccggtgtcccccacccttggggtggtccaaaccctttggcggggggtttggggcccccccccccggggggggggaaaaccgggggggggggccccctaaacccccccccccctgggggccccccccccctggggggggggggggtttttccccccccgcccgggggggggcggtttgcccccggaaaagcccccccccccctttttttttggggttttggtaacccccggggggggggggggttaatttttttggggggacccccccaacggggtttttggggggggggggccccctttcggcctcccaacccccgttgggaacccccgggttgggaaaccgggtttccggtttcctttcgccccccccgcccggggattttggggtttgggaaaaaatctcttccccttttta

SEQ ID NO: 639661 - DNA, 904 bp, Homo sapiens
tgctggcgtgctgccatgagcttgctttgatgctgctctgtgtgtgtcccctgtgtgctgggctgtgcttgtgcttgtgctgcatgagtgaggtgatgtgcagtgctggctgtgcccctgtgtgtggctcccccccgtgactgtgtgctgctgtgccctgtgccctgtctcggctgaactctgctggtgtgtctgctgctgtgccctgctgcttgcttcctgtacccctggtgtgcccctcctgccgcctgccatgtgctctgtgcctgctttagttgcccatgctctgctagaatgtgctgcttgcttgctttggagctcgaatggtgtgcttgcaagtggaagatgcctggtcaggagtggattcctgcggtgacacttgggttgtgactgatgtgtgcggatcctatacaacttggtgatgtgttggccatcttcgggcccccgcaacaccctactacgagggcgggctacttcaaggcgcgcctcaagttccccatcgactacccatactctccaccagcctttcgtgttcctgaccaagatgttggcaccctaacatctacgagacgggggacgtgtgtatctccatcctccacccgccggtggacgagccccagagctgggggagcttgcctcagagaggtggaaaccccacgcagaagcgtcaggaccattctcctgagtgtgatctccctcctaacgagcgcaaacctctctcgcccgcaacgtgacgcctcgtgatttccggacagtggcggagagcagggaaggatcggagttccagacgtcatcggaaggcggtctggaccaaggtgcgcggagcgtgacgggtaggtccccagctggcgggactgcttagacaggccggccgagaggctaaccttcgggaacagaggggggg

SEQ ID NO: 639662 - DNA, 596 bp, Homo sapiens
  misc_feature (362)..(362): n is a, c, g, or t
  misc_feature (432)..(432): n is a, c, g, or t
  misc_feature (449)..(449): n is a, c, g, or t
  misc_feature (455)..(455): n is a, c, g, or t
tccggaaagctgtccctggtgagtgagggtctccagtgccccagcctgggggatgccccctagaatcactgatggggccttgggagtgggcagagaaaagaagaagcaaagaaggccaaaaaaggggtgccacctcttacaccagcgctgtgggcttcctctctcccaccacccttaaaaagtcacctcgggtcacatttactattcatgtagtcaacgagcgcttcttgaatgcttactgaccccagccggtgacccttacctgctccccacacaggccctggtggctggggttccccaaggtcttggacgtcgagtgttttgctttggagacccccagtagcttcagcctttcttcttgntttcttttttctctttttttttttggatatggagtctcgctctgtcactcaggctggagtgcagtgtgcnatctcgactcactgcancctccncttcccggatttaagtgattctcctgcctcagcctcccaagtagatgggattacaggcgcccgccaccacactcagctaatttttttttttttttttgagacggagtttcgttcttgatgcccaggctggggtgcaatgga

SEQ ID NO: 639663 - DNA, 338 bp, Homo sapiens
accacactcatctgcgacatcatcacctcatcactcatctgctggtggcctttgcggaaaacgaagcccttgacaaatttctaagcaacagtgaagtctgttgaggaaattctaaaatgtcttcaggccataaagggtataaggttagtcaactgcctcaacagagtttgactaaactattgaatttgcgagttactggaattggatatgtaaaaacagggtggtaggttgggtcatgcttacaatggtctcaagttcaaataagctactgtgacaatacaccacttcacaggtcacacgcatttccaggggcttatcctttccctcagtaagtgctg

SEQ ID NO: 639664 - DNA, 687 bp, Homo sapiens
  misc_feature (30)..(30): n is a, c, g, or t
  misc_feature (669)..(669): n is a, c, g, or t
gagctggggcccagcatggccccggaggancattaccgccggcttgtgtcagcactgagcgaggccagcacctttgaggaccctcagcgcctctaccacctgggcctccccagccacggtgaggacccaccctggcatgatccccctcatcacctccccagccacgatctcctgagggtccggcaggaggtggcggctgcagctctgaggggccccagtggcctggaagcccacctgccctcctccacggcaggtcagcgtcggaagcagggcctggctcagcaccgggagggcgccgccccagctgccgccccgtccttctcggagagggagctgcctcagccgccccccttgctgtcgccgcagaatgcccctcacgtcgccctgggcccccatctcaggccccccttcctgggggtgccctcggctctgtgccagaccccaggctacggcttcctgccccccgcgcaggcggagatgttcgcccggcagcaggagctcctgcggaagcagaacctggcccggctggagctgcccgacgactcctgcggcagaaggagctggagagcgcgcgcccacagctgctggcgcccgagaccgcctgcgccccaacgacggcgccgaggagctgcagcggcgcggggcctgtggtgctgaaccacgggcggngccactgctggccctggc

SEQ ID NO: 639665 - DNA, 1014 bp, Homo sapiens
ctggccacgtcggacggcgcgaatggcggtggttgccgccgagacccccgaagtccttcgggaatgctggtgtgcgagggcatccggatctgtctagatactgcgagtcggtagctggcggtgagtgacccggccctgggacactgcccccagcgaaaacataccgtttcatttactgctcccgacaccggatgggccgtggggcacatgaaggagtcttggactttgtagggctgggccttcccgcattcccaggagtagcatgctgatccgaggacttctgtgaccccggtgcaggacatgaagccgtagtagtgagcgggtcattggaccgtgaccccctgcgtaagctctcccgagtcctggacggatggattgctaggtctatggcccccaaaggcaaactttttggaaacagaagctaaatgaacgaggtgcttctgtgggctcccccagcttcttgtcggggaggtggtgcgcgctggattgcgtgcctctaacccggggtctggaaggtgcttccaggccctgtccgacgcagttgccagccttggactacttgcctcgagctgcgtgctctagccatttgacctcaccaacttggaaccgaaggcctttggttgtgtggaggatgctgtctgttcagcctcaacttctgttccccccaccgtgctgtccatgtgtcgggaggccgcccgggagcctgctcctctgctcgcgcccgtcggctgccgggaggccttgggtgggacagcgtggattaagcacccagcggggtcggtgctaaggccaaggagggtggaggtggggcatcccctttaacccggcccggtcctggtggtctcacccggggcggccggccaggtgggaacattgcatcaaccggagacacattcaaggcgcccgcgttgcgaatccgggacgggcaatggccggagagggcaaaggccgaagtgcggtcccctcccgaacacggaaacgccgcacaaatcggaaaaagaagccgcccgggaa

SEQ ID NO: 639666 - DNA, 383 bp, Homo sapiens
  misc_feature (31)..(31): n is a, c, g, or t
  misc_feature (46)..(46): n is a, c, g, or t
  misc_feature (61)..(61): n is a, c, g, or t
  misc_feature (67)..(67): n is a, c, g, or t
  misc_feature (380)..(380): n is a, c, g, or t
ccaacccccctgagcaacaagtgagttggantagtctgttatgatnttaaagtaaattacnaaaccntatataaataaggaagtacctttatgggaaaagccataggtgtagattttcacagggcctatttgtctttcagattagggcagtttcatttagttgtagagcaagaaaaattcctccacttaagataatttttttttttggtagaattctggttacatgtgcctttatgtatatatttgtttttttagcccatcaaaatttacttttctcacaatattttgaagatatatggtgtttatattgttgaaaagttttgtgttctttgcattgtctcatggccgtggagttaatacaagatgcactgtaccataantcc

SEQ ID NO: 639667 - DNA, 437 bp, Homo sapiens
  misc_feature (272)..(272): n is a, c, g, or t
ctggtgatgatgtgtctgggatatgtggatgtgggtgggggctgtgtgctgattgagtgtatgcctatgtgtgtatgtatatacgtgaaatgtgagtgatatgttttggaagtgtgttgggtgtgtgcctaagggtctaggagtggacagggagggcagctctatctctcagcactcaagtctccgagcagcttggtcatgtgagtaaccacaggagggaggggggaagaggaggcttggtgggaggcctggatggaggccaaggggactgngatcagcgtgctacgcctgctcacaggagtaatagcccacgtcagcgttgactgtcaagcgggcgatgtcaaaagtctcaatgacgttgctgtcccatttcttgcggtactcaatgtcgtgtaggacgtcgtagagtgtctcggctggcacatcacagcactcca

SEQ ID NO: 639668 - DNA, 222 bp, Homo sapiens
tctactctatagtctgccataattctcagccatagagcatgcaaggtgtgttatgttgcagtatgtgttactgtctaagagagcatatattcttctgtcctgcagcaataaagaagcaatatataaaaagaagcctaaatatctattagagccacaggtattgccaagtatatagggggtggaaatctccaaagtaatgagaaaattatgttagaattatga

SEQ ID NO: 639669 - DNA, 322 bp, Homo sapiens
cccttggatctcccccccccctttttaccccggggtggtcccgccctccccaggggtgtttttgcattgtgcctttaaggttgttaatgtaaatccgggctccgcctgcccatccgcctttcccccttctaaaagaaaaggtagtctttccccgccccttttgtttttccttttggggcgggggcatttttgagccttcagttttggttctgggcctttttgtcctccccccggtgccccgtcatttggtccccctctttttcccccccttaaaaatttggctgttttccaccacaataaaataacacgagtttgggcccga

SEQ ID NO: 639670 - DNA, 163 bp, Homo sapiens
gatctgaagttgtaccacggcggggggctgccctccttgcacgacgccaagctcatcgacagttgctacaccaaccctgctgacagggcctactcctgtgtaccagcatacagcgagcccatggagaccccagttgctctgaactatagcttctatcaggtga

SEQ ID NO: 639671 - DNA, 437 bp, Homo sapiens
gtttgctgaattcacgcatatgactttgtacttaacatacagatcttttcttaatatggagtactttggttttgctagctacataccacaaacctaaacctgtattatgaattacatattacaaagtcataaatgtgccatatggatatacagtacattctaattggaatcgtttactctgctagaatttaggtgtgacattttttgtttcccaggtataccacgcttatgtttggtggcattaaataggtttctttaaaatgctacgggggcactgtttgaaacagattgcttctagattgttacaaaccaagcctaaaacacatctgtgaatacttagatttgtagcttaatcacattctacacttgcgagttgaatgacaaagcagctgaacaaaaattatggcatttaagaatttaacatgtcttaactgtaa

SEQ ID NO: 639672 - DNA, 700 bp, Homo sapiens
  misc_feature (51)..(51): n is a, c, g, or t
  misc_feature (53)..(53): n is a, c, g, or t
  misc_feature (55)..(57): n is a, c, g, or t
  misc_feature (64)..(65): n is a, c, g, or t
  misc_feature (68)..(68): n is a, c, g, or t
  misc_feature (73)..(73): n is a, c, g, or t
gtactatttaaaatcagatgtatctacgtgagctagtaattaagagaatangntnnnctgatcnnccntgccncaaggaataacatgaactagcttatgtttcatgatcatcttccaagtgctgtggcaactgatttggccacttcttgttggcagttcttggcaccagtacaattctaggttctgaacttgcaccatactcttatcgtcatccaaattgcagtgttttggttcagttggaaaatcaaggttacagtttgcgttcacagaatgaaatttcccagcagtgttctgtgattgtcagagtgatgtaatttgatatattaaaaatcaacaattttttcctcagctttgttttttagactgaaaatgatttggagttttggtgaacctttatattttgacactacaggagccagccacaaggccaaatgtgtcagctgccagtgtttgcttgacatacaggagaacattaaggaactctcaggttgggaggagggaagtgttggccaggacatcagacggaggtttcttgtatatgtttttttaaacactatttttaaactcttcagtagagggactattttaatattctaggtatagaaataatagcttttataacagtcttagttctaaatgaagcagacccgtcttgtaaacctgagactagacctgaatgtcaagccggacaagatagcca

SEQ ID NO: 639673 - DNA, 259 bp, Homo sapiens
  misc_feature (31)..(31): n is a, c, g, or t
  misc_feature (112)..(112): n is a, c, g, or t
  misc_feature (114)..(114): n is a, c, g, or t
  misc_feature (156)..(156): n is a, c, g, or t
  misc_feature (205)..(205): n is a, c, g, or t
  misc_feature (216)..(216): n is a, c, g, or t
aacctggccaagctgaaggcctacctggctnccctcacccagtccgggctctggtctactacgccaaggcctgctggttaccaatcggccgggggtactcttctttgagggngncgagggctcaccgccgacttctccgggagtatgtcacgctgnataagggatgcttctatggccgctgcctgggcttccaggtcaggccctncatccggccantcctgcagaccatctccatggggctggtgtcttcggggagcac

SEQ ID NO: 639674 - DNA, 358 bp, Homo sapiens
ctcaacgctttatacttctgttaaaaaaaaaaaaaaaattcccacccccacacacacacaaacaaaatccaggcatacagggaaatacggcataggaaagaggtagtattccaaatcaggggggaaataaatgactactaaataaatactggagaccctaaataaaggctttctagataaggagagatgcttctaaataaggagagcaaaaaaactagcatccctatctttcacccatatacacacaaaagaaatccccttatgcaacaagtgcactaaagatcaaagcagaaacctttaaacttttatcaaattataggagactataatcacgagatcagggacgtataaagcgtgg

SEQ ID NO: 639675 - DNA, 1642 bp, Homo sapiens
  misc_feature (1253)..(1253): n is a, c, g, or t
gggctcgtctgtattgcagcgccgcgagaccagctggcgaccccggccaccccaccaccgcagagccgcggctcatggcagcgcataccttgttccgcgcgcatcactacttccgcggccagacgccaggccgcaggagcgtcctagtcgccccatactgttgcgagaatcattggtagcacacacgatacgcgatgtgcgtcgattgcctgcctaccgctagatgtgtcgaggggcgcgtccgacgcggcagcactcgccagaggccgtacgcaggcacgcaacgagaatagctgaacctaaggatccaacccgcaaccataccagtacttcgatgggctacgcatggagccaccggtaacagctgcggcatctctctgagtcctcaatggcccgcatccgtgcagccggtgtccgtcaccgccgcatcgcatcttgtgctgtggcagccgtgactggacccgggcagttggctctcgtgttggccgggctccctcgtctggccctgcggagccgggatgtctcttccgactagggttctgcacaggcacaaccctagagggaaaacctcacagtttcgataggtagaaccagcacacgcgagcgcaacaccttgaggaagaccgagtggcgtaagtcctaggctacgaggaacggccttggtacactatgagaccccggacattctacagcaacaaaacctcattttacttccagaagatttaccgcgttagtcaggcatatgcacgtcgaggaccgctagggggaggaccattttcccagaaacccctcgtagactttggcgtggctggacggcgtccttcagtgccaagttcccacaagaggggggacccaagattgggccgagaaggattcccgcaagtccaatgggggacgagggaccccctctttaccgggaacattggaagcgggaggcattggttcagcgtttatgcttttcgaattccccgagtccaatttgttgagcgccaacatccggggttaagaccccacccaaaggcaaaccctataggagcgcagcacgggcgtcctaaggcaaagtctgtggcccggaaggttagaagaacccggtagagagcatcgtttggggacacgagtttaggtccgcttcgaccttctgcgccgtgggacattgcaaacacttccggctcccgaaactgagggtgtctgacccacagcgcgggccgcacgagacacggcgaggcacactttagaccgcgtgggacaattantcaatcgagcagaaccaacagaggtctgtagtgaaacagcagctccgagatgaatctcagtataatggtgcataggtcactgtttgtgttgtgaccccatcgatcggaaaggcccatcatcgggggaaaccgtgaaaatcgccctagtctgaaagggaagaaaccccagagaattgtagaggaaaccccgagggcgttgactgcacacaaaatcatcgaagaggcactcttccaccagtaaatgtgcgtttaacccacgatcagcactccaccacgggctggcagatagaatcagacctcttaccacatagagaagttgcagagaccaagacaccagattgaggcgacaagtcagataacaacgtcatctgacacgagacacagcgact

SEQ ID NO: 639676 - DNA, 264 bp, Homo sapiens
ctccacccgacggggtggctgggattacagacatgtgccaccactcccagctaattttgtatttttagtagagatagggtttctccatgttggtcaggctggttttgaactcccgacctcaggtgatccgcccgcctcggcctcccaaagtgttgggattacaggcgtgagccaccgtgcccagccaagatctacactattatgtcaccccagaaagtgaactctcactcttcccaccccgtcgggtggagcgctcacccgtcg

SEQ ID NO: 639677 - DNA, 317 bp, Homo sapiens
aaagaagccattatgtgaacaagacacatgcacacacatagttatagtaacacaatttgcaattgcaaaaatatgaaaccaacataaatgcccatcaaccaacaagtggaaaaagtcctatatatatacaccatggaatactactgagccataaaacaaaatgaaataatggcctttgagcaacttggatggagctaaaggccattactctaggtaaataactcaggaatggaaaccagattattgtatgtctcactataagtggagctagatatagatgcaagcatagattatatatgggcggtcagtgctatgct

SEQ ID NO: 639678 - DNA, 294 bp, Homo sapiens
  misc_feature (34)..(34): n is a, c, g, or t
  misc_feature (173)..(173): n is a, c, g, or t
  misc_feature (181)..(181): n is a, c, g, or t
  misc_feature (186)..(187): n is a, c, g, or t
  misc_feature (198)..(198): n is a, c, g, or t
  misc_feature (219)..(219): n is a, c, g, or t
  misc_feature (221)..(221): n is a, c, g, or t
  misc_feature (224)..(224): n is a, c, g, or t
  misc_feature (233)..(233): n is a, c, g, or t
gcaaatcatttcaaattgggaatcaacatctcgnagtccagtggctgaccatcatcttcccatgtcatctgacaggaccgatacgatgtcacttagtcccaactggatcctttacttccaccaccaaaattccatcatgacagagggcttcagacaaatctttgatttcccgncatctggnagttnntactttcgggnaagcttcttgagataaaaccngnctnatccattcnggtccggtttgtgctttatcagagccagccttcgaggtcttaatatgatgtcttcaggggg

SEQ ID NO: 639679 - DNA, 1785 bp, Homo sapiens
  misc_feature (873)..(873): n is a, c, g, or t
  misc_feature (876)..(876): n is a, c, g, or t
  misc_feature (1785)..(1785): n is a, c, g, or t
gggtgtacaggcgcttcgtgcagcggttgggcgtggtggactatatctccttctggtagcctacatgcactggaagaattgtgacagcgattgtatcatgtgattgagtcacgaacttaggggctccgtgtctgatggacgcttgcatcttcaagctcaggagacaggtgcgcattgtccgttcgcaccagttgcagtgaccgcctctacattgagtttctactacctcacagttgtccgacatagtttgcccatcctagaatagctatgctcacgtgagccaagtactcttgcgactgtgaccagggccgatgcatcagtgccattgtaagcaaaaagattggagagcacgtctgcacactgattggggcgacactgcacacggatctagccagtcactttggcacgaaagaaagggcagaaagaactcacacgtaactgaacaagtactacacagtggcagtgcggcgcattgacaaggtctgaactgtggacagggtccagatgcgacagagaatgggatgcggaacaatagggcagagttacatttccaaaccgaaacactagagtagggtatcaaaaaggagaccgttcggtctcagcactaccaagtgggcaggccattctgtgctcctgtgggacgaccccgccattacattgtcgccgcccaactacgcaatacggctcactgcgatgcagccacaactccatagcgggtggtaatcgtacggcctatggaagttgcctttgccgatcacactggcgttcgtcgttggacatagccccattgtcgcatagggcactaagagctatggtcgaaacaaaaaaggctattgagcaccaattccacaacaggaaatatactaccgtacnatnctagcccacacagatagctcggtcagtgcacacgttgtgtacaaaccagcaaggcggcgcaattatcccataggtcatcgtcaaagacaagaacgggccttattatggcggtcgagccaccacagagggtacacaaagtgcaccgaatagagagggcacacacgtaataggcggtctagtccggctcgttagacattctcgaatcttacatagtggtacaccgaacaaagggggtgcccaaatgacactagagttctaccaccattgtgcccaacaccgcaaaaagagagcagaaccgttggctgttcacaataggaggccgacccagttcctctgggtgggagacagcaacagtggtactggagttaagatggttagttgtgacaccttccacgtacaagggtataccggttcacactagtagaaatgggaggttcccgatatctcgcctttgggaccgcctttcggtaatctgtaggcagctagagccattagtcgcactacaaagtaggagaactatgatttggtgctcccaaaacagcagtctctaattaccaccattgaggggcctctttcgaccatccgtgaagtaacataggagttgctcacacctatcggaactaatatgcgggcgctcttatcaagcggttggttagtccgccataccgtggtgcgcctaagcagagcatagtcaccagccagcagtcatggtaagacacgatagagagacttggggctcaagattcatcatgaagccagagagcagcatcatgccataacaagatcagattgcgcttgcagtcctctcatcaacgcaaaacgtgatgcaagatactcagaccagcggcgtggtacgatagcaggaaagctagagctctcagtccgtactagtgcggagagagatctccn

SEQ ID NO: 639680 - DNA, 542 bp, Homo sapiens
  misc_feature (534)..(534): n is a, c, g, or t
tctgatctggatttcatttattttcatgagaggggaggtgtgagtcctcattgttttcgactcattaaaaatattgctttgattttttaaaaatacaaaagttatttttttaaaaagaagaaaagtcacagaagttaaactttctttaaagcgggactctggacttttgaaaacaagtgttgctgttacgaacaaagactagaagtgtacccagattttctcccccccggggatcatttctcttccaatcaacaaacaaatcccccagtatttcctaccgaaagggaagggaagttttccagggagagtctcctcctgggtttggtggtaactgcgactcagtcttttttggacacaatgtttctgctgactcctgaaaattttccacttgaatgtgcaatgaacggcggcggcagcagaggctcggctcggctcaggcggcgcgcgcggcgcgagcgatgctaagaatgttcggaatgaggacaggaatgaaatgacgccaggaccgactcgctccggaggggtgggcctcgngacccgct

SEQ ID NO: 639681 - DNA, 926 bp, Homo sapiens
  misc_feature (48)..(48): n is a, c, g, or t
  misc_feature (120)..(120): n is a, c, g, or t
  misc_feature (918)..(918): n is a, c, g, or t
tcctaagtttgatgtatctggctatcaaatcattcctaccatacattntgccttcgtctgataagatgattttccctcctcccacatggtggatagatagccagggcctcctgaaagctntgctcgatgtcggggctccagaccccttctgcatcattgtcaattggcttatctgcagagtcactcatcctttccatgttttcggcagggctctcactgccgctccagctgctgggctcaattttggcggtgggattttccaagccgaagcctggagccttttcaagaaaataaaccgaaagggaagggaagttttccagggagagtctcctcctgggtttggtggtaactgcgactcagtcttttttggacacaatgtttctgctgactcctgaaaattttccacttgaatgtgcaatgaagcggcggcggcagcggcagcaacagtcctcggcccagggagccaccgcagcgcccggcgagtccgaggcaaacttcggcgccgcttcccccgccctctgctcggtgcccggctccctccccggctcccggtccctgggcccggccaccccacccctgcctagcaccgctcctgccccggggccggctggcgcgctgggctgctgcccgcgctccgggcaaaggtggaggggtgggggggcgtcactgcatggcctgtgcctggacgcggccgccccgggcccgggccccgccgcgcggaatggcccgcagggtggaagcgagtctgcaaagtgcttggtgggcgcccgcggcgggcggcggggccgcggcggcggcagcagaggctcggctcggctcaggcggcgcgcgcggcgcgagcgatgctaagaatgttcggaatgaggacaggaatgaaatgacgccaggaccgactcgctccggaggggtgggcctcgngacccgct

SEQ ID NO: 639682 - DNA, 908 bp, Homo sapiens
  misc_feature (900)..(900): n is a, c, g, or t
tctgatctggatttcatttattttcatgagaggggaggtgtgagtcctcattgttttcgactcattaaaaatattgctttgattttttaaaaatacaaaagttatttttttaaaaagaagaaaagtcacagaagttaaactttctttaaagcgggactctggacttttgaaaacaagtgttgctgttacgaacaaagactagaagtgtacccagattttctcccccccggggatcatttctcttccaatcaacaaacaaatcccccagtatttcctaccgaaagggaagggaagttttccagggagagtctcctcctgggtttggtggtaactgcgactcagtcttttttggacacaatgtttctgctgactcctgaaaattttccacttgaatgtgcaatgaagcggcggcggcagcggcagcaacagtcctcggcccagggagccaccgcagcgcccggcgagtccgaggcaaacttcggcgccgcttcccccgccctctgctcggtgcccggctccctccccggctcccggtccctgggcccggccaccccacccctgcctagcaccgctcctgccccggggccggctggcgcgctgggctgctgcccgcgctccgggcaaaggtggaggggtgggggggcgtcactgcatggcctgtgcctggacgcggccgccccgggcccgggccccgccgcgcggaatggcccgcagggtggaagcgagtctgcaaagtgcttggtgggcgcccgcggcgggcggcggggccgcggcggcggcagcagaggctcggctcggctcaggcggcgcgcgcggcgcgagcgatgctaagaatgttcggaatgaggacaggaatgaaatgacgccaggaccgactcgctccggaggggtgggcctcgngacccgct

SEQ ID NO: 639683 - DNA, 836 bp, Homo sapiens
cggcggagcttaactgccgcggcgtatgggatgtaactgtgagtggtgaaggctgcgggtatctggtggagagctaccacactagtttgcaacgaaacggagcgggacgaagaggcggtatccgtatagtcaggctgagactctcagagcacgacgggcacacgccctccttaggctcgctcgcgcgggcggcggcttgccccgcttagtgtgcctagcctccgagcattgcctctggtcttcaaacagctggcggcgccatgagtccttaaggtgcggtccaacgcctcccgtatcccttggtcccagacctcgggcccaccatggatgcctgggtctccgactgatttccgtacgcgcgcacctggagtgcccggtgttctgagcctagctgggccgagttcctgagaccctcttgtgctacatcgcgaaaatcaggcccatcgcagagaaatcgggcatttgcaagatcctgccacccgcggactggcagccaccctttgcgtgtggaagtggacaagcttcaggtttaccccccgaatccagaggctgaatgagctagaggcccagacgagagtgaaactgaactacttggaccagattgccaaattctgggaaatccagggctcctccttaaagattcccaagtgtagaacggtggatcttggacctctacagtctcagcaaaattgtggtggaggaaggtgggttatgaagctatctgcaaggaccgtcggtgggctcgggtagccaggcctcaatatccacaggcaaaatattgcgtccttgtacgctcccactaacgaacgcattgtttatccctatgaaatgtccag

SEQ ID NO: 639684 - DNA, 230 bp, Homo sapiens
cttaagaaatctttccctacctggggggtacaaaggcattatcctgtattcccaggtcgtaactttctgcctttgacatccaaccttgagtccacccgcaagtgtaactgcggcagaaggcaggggcctgccgtcatcctcgctacaccgtgacgagagagcacctctgccgaccgcgatgcacacgtcatctgagcaagaaataaacttcgactgtgcgaagaaaaaac

SEQ ID NO: 639685 - DNA, 772 bp, Homo sapiens
  misc_feature (48)..(48): n is a, c, g, or t
  misc_feature (120)..(120): n is a, c, g, or t
  misc_feature (764)..(764): n is a, c, g, or t
tcctaagtttgatgtatctggctatcaaatcattcctaccatacattntgccttcgtctgataagatgattttccctcctcccacatggtggatagatagccagggcctcctgaaagctntgctcgatgtcggggctccagaccccttctgcatcattgtcaattggcttatctgcagagtcactcatcctttccatgttttcggcagggctctcactgccgctccagctgctgggctcaattttggcggtgggattttccaagccgaagcctggagccttttcaagaaaataacctcggcccagggagccaccgcagcgcccggcgagtccgaggcaaacttcggcgccgcttcccccgccctctgctcggtgcccggctccctccccggctcccggtccctgggcccggccaccccacccctgcctagcaccgctcctgccccggggccggctggcgcgctgggctgctgcccgcgctccgggcaaaggtggaggggtgggggggcgtcactgcatggcctgtgcctggacgcggccgccccgggcccgggccccgccgcgcggaatggcccgcagggtggaagcgagtctgcaaagtgcttggtgggcgcccgcggcgggcggcggggccgcggcggcggcagcagaggctcggctcggctcaggcggcgcgcgcggcgcgagcgatgctaagaatgttcggaatgaggacaggaatgaaatgacgccaggaccgactcgctccggaggggtgggcctcgngacccgct

SEQ ID NO: 639686 - DNA, 190 bp, Homo sapiens
cggcggtctcgtatctagtctagcatgctttggcaggcacactctagtcatagggctagagatcgacactggttagttaccagacgtaggcctagacaataaacatgctagctcgttattccagatatgctagccataaaagatataaacctctacggtaccacagcaaggctgccatacaagctattta

SEQ ID NO: 639687 - DNA, 1308 bp, Homo sapiens
  misc_feature (219)..(219): n is a, c, g, or t
  misc_feature (621)..(621): n is a, c, g, or t
ctttcattatgtgtatatcgtcttaggtttctaaatcgcatgttagtagagctcgttttaacttccgacgagcctcccttccggaatggtggtgtttctagtctccccacagaagggtaaatatacgtgtgtcgtgagccggcgcacttaattttttgggggagtccatatagactacagagcccctcctaattgtgcgggcgccaaagcttctcacanccccttgggcggccccgattattacaaggcgggtctccttggcaaatttttggccccatccaccgggggcccaattccggcccaggaattggggggtcaccgggggtcccttcgccaaggagggagcaacttggccaaaggtccaatgagagggccccacggtgggacccccccgggatgaaagcacgggtctcgcaccacatgcctggaagatatccccggagtcgccgtggttcccgaaacacgccgcgtttggcaccccgggggccccaactaaagggggccaagggttccgaaagagaagggaaggggggaataaaaggggggaagcaaggagcgcccctcgaggattctcgggcgcactaagggcacccgcactattctgatatctcggagcacaanaattctggtgacctagcaccgcgatatctccacgcccccgaaagcccacaggggcccaatgtccacagcacaggcgccccacaccacatgggagaaatctcaagattcacccgcaccccacagccacgcacagagaatggggagcactttcttgagcacatctgccacagccgaacgccccctgagagatcttctggggcacagcacccacaaccgcgtggcctcgtgttggcgggaactcggaggggcaccacgttgaaggaataggaagggttggttaaagaaaaaacacatggggggcccttctatcgctgtgcccctctgcccacgggcaacttgcaattccagcctcgctgcacatttgctcttttcgagttcccctttcctcctcaactgcctcccaaagcgccacccctaactcccaaaataaatgggtcacacattgaatattggaaacataattcaagcagttaaagtaaatgagatcccaccctttactaaaacacctctttctctgaaaccccccttgcccctcactgattcttgctttttccctggttctcacagcacgttgtgggtcaaaattgtgggtgaatcgctaattgtactgattgtttaagtgtgcattagttgtgtctccccaggctagattgtaagctcctgccgcggacagggaccacctctaca

SEQ ID NO: 639688 - DNA, 1094 bp, Homo sapiens
  misc_feature (841)..(843): n is a, c, g, or t
  misc_feature (859)..(860): n is a, c, g, or t
  misc_feature (868)..(868): n is a, c, g, or t
  misc_feature (872)..(872): n is a, c, g, or t
agcggggggttgcggaacggcggcgcggctgtctaggaaaccgcggcgtcggctggcaggggctggcggcctgagctgggcagggggcggaggcgggggctcggctgtctccggggctgccacgcagagcgggcttcgtggcgtggacataactgttcgtttctaacgtggctgtagttggcattctctctcataccaagataccttttgagactaaaagtgaatcagaaaaataaagaaccagcatcaaatttgaagtggccacaaattctattaaagcagaagaaatagtggtgaaccataaaagagaaccagtttcctctctattctgcaatttagaggaaaaattttcatccaaggacagatcaggtggtggacctagatgggaaacccaaattataatcaagagatttcttggtactgtttttcaaccctactctcttgaccaagaatgaaactatttacaaattaagatgccaacagatcacgaagagccctgtggtcccagtcacaagtcgtttgcctgaatggggggcttgttatgtgatacctactattcccagcccatttgtaggtgcgttgaaaactatacaggagctcgttgtgaagaggtttttctcccaggctccagcatccaaactaaaagtaacctgtttgaagctttgtggcatggcggtcctagtaacacttatcatggagccttctacttcctttgcaggaaaggccactttcagagagccagttcagtccagtatgatatcaactggtagagacgagcagtaccagtgcccaccacagtcatgaacaacactgaagaaacgtcaagtgaaccaaatcttgnnnttatttaccaaagcgnnaaatgaanaccnctaagtcaaagaattacacaatctaatccttttatttcttgaataaaacgcttgtgtaactcgtttcatgaaccagaaaaaaaaaaaaaaacacttttgtggggcgggccaggaaaaatttaacactcgtgggccgcccctgtggcaaggccaccggccgagaccggcccgggggttcccaaaaaccgggcgggctgcaaccaggtgggcggtacaggccgc

SEQ ID NO: 639689 - DNA, 376 bp, Homo sapiens
  misc_feature (57)..(57): n is a, c, g, or t
  misc_feature (69)..(69): n is a, c, g, or t
cgggggatccggggacatgcttatccttttcactttgtgagttgaagaactactggnaaaggaatcagnagcacctccagccatcagccagtggagaaaccaagccctttaattcaacattccctttaagaagagaatctggcaccaacccaggtaggttggaaacagattattccccaacccagcgcttagaagaaacacccgccctgggtggcaccttgacttccttctgggagagaccctgaaacaaaagacccatctagggtatggcgattcctgacccatggaaacccctgccataataaaaaaggatggtggtttaaactactaaatttgtgggaatctgttatgcaacaataaataactattgtaccct

SEQ ID NO: 639690 - DNA, 81 bp, Homo sapiens
ctcctcagtgactctggcttctatctctgtgcctggagtgtatacggtgttaaaacagggatgaacactgaagctttcttt

SEQ ID NO: 639691 - DNA, 959 bp, Homo sapiens
ggcaagctcggtgattctcggctcacgcgggaggggagtacagggtgggggtccgggcctgtagttcagtgggtgcagcctgcttgcgatgctgagggccagacatggctggcggcgcctacggacggaaacgaaacaaggttgattacaaacgggaccatattttgcttcgaaatggatccagcagttaacgagccaatgagagaccaagtcggacgggactcatttgagagaggagacgtccctaatagtgaagtgctgacatagaaaaggtttagcagaatcaggtcatagagatgcacagtgatctgagggttctggatttcctggggcatgacatggtggagtcagttgctggtcaagaggatatgctgtcaatgtatttgatatccagcaagggtttgataatccggctcgaggtgcggttctttctgggtgagctctgcagacgagcagtgatcgtgtacccagttctggacaggtgtaaacgcagtttgcccacttgttgggtcacccccaacatccagtaacaaggaaggagctctttgtagtagagtgaattactgtggcaccactgaatgtcattgaagacttgtaagaggcgtggggttcagaaactcactttgaaccagtgaggtgccagctgtcagtcttctgagggcgtcgattttcaatgaatgggaactgaaggacgttcctatgcatggaaaacgcagttgactactacgcaagtagactaagatcttacggagagggcgttcttgggcgcaacgagtcctgagaaggaattcttaaacaaaggcatccggcctcatgggtttttgggcccaggacccggcggggccattctctttaggggccgaaacggaaagtaatgggttgatgggagactgtgggcgtcccctgttggaatgtcgcaactgtgggcgagacgtccacacacgggggagtccacctga

SEQ ID NO: 639692 - DNA, 781 bp, Homo sapiens
  misc_feature (528)..(530): n is a, c, g, or t
  misc_feature (546)..(547): n is a, c, g, or t
  misc_feature (555)..(555): n is a, c, g, or t
  misc_feature (559)..(559): n is a, c, g, or t
cagattttgacatgttataaaatgcaagtcacagctgctgtgtctgcggtattcaaaaacttttgaaacactgcatgtccaacaaaatttatttttgtgtgaatgtactgtttttcaaccctactctcttgaccaagaatgaaactatttacaaattaagatgccaacagatcacgaagagccctgtggtcccagtcacaagtcgtttgcctgaatggggggcttgttatgtgatacctactattcccagcccatttgtaggtgcgttgaaaactatacaggagctcgttgtgaagaggtttttctcccaggctccagcatccaaactaaaagtaacctgtttgaagctttgtggcatggcggtcctagtaacacttatcatggagccttctacttcctttgcaggaaaggccactttcagagagccagttcagtccagtatgatatcaactggtagagacgagcagtaccagtgcccaccacagtcatgaacaacactgaagaaacgtcaagtgaaccaaatcttgnnnttatttaccaaagcgnnaaatgaanaccnctaagtcaaagaattacacaatctaatccttttatttcttgaataaaacgcttgtgtaactcgtttcatgaaccagaaaaaaaaaaaaaaacacttttgtggggcgggccaggaaaaatttaacactcgtgggccgcccctgtggcaaggccaccggccgagaccggcccgggggttcccaaaaaccgggcgggctgcaaccaggtgggcggtacaggccgc

SEQ ID NO: 639693 - DNA, 346 bp, Homo sapiens
cactagttgtacccgtcgcatctgatactgtgacaaaagccatttcttcaccctttttggtacgggttgtgcgcacttggtcaatgagggcaataacggtcaccggttgctttttatcagtcttttcagtcaaatcagcaatctcttggtaattgtgatcagcaattaagctggcatacccatccagtggatagcccgataaattcaccccgatggcctcttttttcataggctaacttctccgtcaaatcccaattccggcattttttttaaattttggtttcgtttaaaattaaggcgccaaagctagccgcttcaatcaaatcatcttaagcggtaacaaggt

SEQ ID NO: 639694 - DNA, 1359 bp, Homo sapiens
gcgttgatggggatgggcgtgtgacacatgttgtttcttactggcagtaatcagataacagatgtgtattggctcgttttcaggtgtggtcgcgatcatattctcttggtgaaattgatgtagaactgataaactgatacactggaaatgaattagtttaggggtggtttcattattatagcacaactcgtaatatgtcatcattgaagacttgcaatattgaagcggcatgtccctctgaagagattatgattgggaacggcaccctattactgtgatcatgtgagttagggtattagaagctttaacagagcgaataagatactaatatttgaatattctagaccaatgtagatacgagaattgatccatactctaacaataacccaagagggagaagcatgtcgagggcttgcaaacttatgtgactcgccgcactagagagaggacgattagaatctgaaatattccagaggaatatataccagacctgtcggctacagtatatattacagatgatgtcaaagaaatgagtactacacactattaacaggttgactacacagacataggtttcaagagattattcagagaagaaaggtcttgatgcacataaagaatcacgggtacttttagtcgcggaaaggcctcgcccggtacttatctgcctaggagggcaacacacagggggtgaacgagaccaatagtggcggttacagatggatattaataacgtgggtctcactatgtctatggctttatggaaaggagggcgacattgttgcgcgtaacctatttgcggaacaaaggagttggcattgcccaatatagagaaaaactcggtgcggtggtttcacacaccaaatgtataccatctatgccatggattgcgcttattttgtaaaggcggattgacccaattcttgggtgaattcaccttattggttaacaaccttgacattaggacgttatcattatttttagtttatttataatgcaagggaataaaagtggtaacagacatattgaaacatttgtaaacgagaggacttgggtttcataaaattgaagaaaattcttaattcgcaacaggttctagttaggggcacgaggttcctataatgctgttaacgctatcattcgagaacattttttttttaccagtggcactggctatggcatgcacatttggattattttcttccacgctggctttgatagagactctctctcaataaggggtggagcatcttgtggaatgtggtaaacgtggttcattgatgttaacagtctttgaagtaggaataacaatttacggtgagcatgtgtgataaatggtatttatatatggtagaattt

SEQ ID NO: 639695 - DNA, 756 bp, Homo sapiens
tgaaaccgaacctcgacacaccttcttcgaccccgccggaggaggagaccccagttctagtaccaaacacctattctgagtttgtgtcggtcaccctgaagtttatagttcttatcctaccaggcttcggaataatctcccatgatgtaacttgaacgttactccggactaccaagaaccgatttggatacataggtatggtctgagctatgatatcaaggttggcttcctagggttgatcgtgtgagcgcaccatattttacagtaggaatagaggtatgatacagtgagcatttttcatcctccgactaccataaatcatcggctatggcccaccggacgtcgaagtattgaggctgactcgtgccatactccacggaagtcaagtatgaaatgagtctgcgtgcagatgctctgagccctaggagttcatctttctttctcaccggtaggtggcctgactggcagttgtattagctaagctcatcacgtagacatcgtactagacgagaccgtactacgttgtagctcacttccactatgtgctatcaactaggagctgtgatttgccgatccataggaggcttcattcactgattgtcccctatgctcaggctgacatccctgaaccaataccgtacggcgaaaatccattttcgactatcgatattcgatcggggtaaatctaaacgttgtctttccaacaatatttctcggcgtatccggaatgccccgacgtgactcggacttaccccg

SEQ ID NO: 639696 - DNA, 289 bp, Homo sapiens
ctgatccgtttagcacgaggtcaggagtacgagaccggcctggccaacatagtgaaaccccgtctttactaaaaatacaaaaaaattagccaggtgtggtggtgggtgcctgtagtcccagctacttgggaggctgaggcaggagaatctcgaacccaggaggcggaggttacagtcagctgagaccgcaccattgcactccagcctgggtgacagagcaagattccgtctcaaaaaaaaaccaagaagaaaaggagtgaattagaacttcttctgctgggacttaagc

SEQ ID NO: 639697 - DNA, 342 bp, Homo sapiens
aaaaatgacccccatttgtgtgtcttcattgagacccattccctgaatgagcaggtgaaacccatcaaagaattgggtgaccacgtgaccaacttgcgcaaaatgggagcgcccgaatttggcttgggggaaaatttttttgacaagccccccttgggagccagtgataatgaaagttaagcctggggttaatttccccaaacccgtggggtgatttccctggtccccaagccagggcaggcatgttggggtttcctttcccttttctataagtggtaccaaaacacccacttaagttttttgattggccccattccttcaaataaagaaattgggtcccca

SEQ ID NO: 639698 - DNA, 130 bp, Homo sapiens
gatggtatttctgaatgttgacgttccagtgggatgtgagtccttcatttttcctgtcttcctgtccctttggtacagttgttactgtcaacacttatcattcgtgtgtgagattgtttatccaaaagaa

SEQ ID NO: 639699 - DNA, 532 bp, Homo sapiens
gactctctcatgcaacattgtgtctttttgtttcttttttttttagtttaggaattgttcaattcttttcatctccataatacatagtcttactaagaagacaattctggaatctgaaagctttcaaagccacttgtggctactcttaaattactttctgcaggtttaaattaactgtgtgtttgtaaaccaggtgcttttcaagagttagatcccctaacagtcattcgtttttttttctatgtgagaaaatgcattattgtgaaggttcagagacataaagatggcactagagaactaggatgatgctttcacctccataaaaggagaagtataaaagagaactgcccaaggaaactccaatattcagttgcatgtcagcaaatgggggaaacgttctaaaatgccctacctttatacatttaaaaagatgaaagattaagtttcaaggaactcacagcaaaaaaaagagaaaacaccccaaacagtactttgactacctccagaggaataaagggctatattcccatga

SEQ ID NO: 639700 - DNA, 666 bp, Homo sapiens
ggggtcgctaatccgaactctgcttcggagcctacgatatcgtggcttctctggcgtggccagtcagccacagggaactattaaaaaacagaaaaagaaaaaatagatagtgaaagaggggtgtagtctagttgcaaaggagaggagagaggagacgtagagtcgccctgtgttgcccaggcatggtcttgaacgtcctaggctcgaagagatcctctctgcctcaggctcccaaagtgctgggattacatggcaactctggtagctctctctttggtctggtttagttattggaatgataagaaagagtcagagaaggataataaggttgagtaaatcatgtcggagtaactgtgacctttctatttctgtctgtaggaggacacaggtactttgattgctcagtgttgctacagcgagatgaagaggtccggaaaggagatgagacaaggattacggcgactagagagaatgagcttgactgggatgatagcagaaggacaagggggcaagtagggggcagccataacatgttacgatgtgactcgagagcctgctggccccaggtagcaccaaggaggaagtcccttggggcacgggggttatggcaggggtcccccaaggaaagcccaaattcaccctatggtccggtgggctaaggtaact

SEQ ID NO: 639701 - DNA, 161 bp, Homo sapiens
  misc_feature (110)..(110): n is a, c, g, or t
acccctgaatttaagccagctgatagtactccggaggaggcagagttcacaacagcatcatatgcgaggtgcagcccttaaccacagcgccagagtcaaacagtgcgcanaggctgtgtactcctctgggggttcagactctgggcactgtttggactctg

SEQ ID NO: 639702 - DNA, 124 bp, Homo sapiens
ttaagccaagccatacgtttaacttctagttaggtctacctggacgacaacacataatgacccaccatcatagccaccatcaccctccttaagctctacttctacctgggttaggtctacctgg

SEQ ID NO: 639703 - DNA, 540 bp, Homo sapiens
  misc_feature (18)..(18): n is a, c, g, or t
  misc_feature (222)..(222): n is a, c, g, or t
  misc_feature (267)..(268): n is a, c, g, or t
  misc_feature (389)..(390): n is a, c, g, or t
  misc_feature (395)..(395): n is a, c, g, or t
  misc_feature (406)..(406): n is a, c, g, or t
  misc_feature (409)..(410): n is a, c, g, or t
  misc_feature (412)..(412): n is a, c, g, or t
  misc_feature (419)..(419): n is a, c, g, or t
  misc_feature (432)..(432): n is a, c, g, or t
  misc_feature (439)..(439): n is a, c, g, or t
  misc_feature (472)..(472): n is a, c, g, or t
gtcagctgacccaagggncttcgaggtgccttagccgcttgcttgctcctcagaatcgctgccgcatggctagtcagtctcaggggattcagcagctgctgcaggccgagaagcgggcagccgagaaggtgtccgaggcccgcaaaagaaagaaccggaggctgaagcaggccaaagaagaagctcaggctgacaattgaacagtaccggcctgcagagggnagaaagaattcaaggccaaggaagctgcggcattgggatcccgtnncagtgtgcagcactgaagtggagaaggagacccaggagaagatgaccatcctccagacatacttccggcagaaccagggatgaagtcttggacaacctcttggcttttgtctgtgacattnnggcanaaatccatganaanntncgcatanatggatagaaganagaagcncctgtgctgtggagtgcattttagatgccctcngaatatgaagttagcacagtctagttaccttgctatgatatggcattaaattatttccatttattaaa

SEQ ID NO: 639704 - DNA, 433 bp, Homo sapiens
gtagagacggggtttcaccgtgttagccaggatggtcttgatctcctgacctcgtgatccgcccgcctcggcctcccaaagtgctgggattataggcatgagccactgtgcctggccacatctggcttttgttatatgatcagaacaaagggcccactctagttctctacatgtcaatcaatcaagcatgttgaataagggacatagaggatttaacttttgttaacgtaaatggaacttgcaggccttttttgaggaccctattgaggattacctatccaatcattgggataaaaacttacctcattgttaatagaatgggcaaatgttcctaaactgctgaagctacatgtgttttgttccgtttaacaaagtcaggtgtttgagagttcgtttccactctactactactcatagagctggtttattcttt

SEQ ID NO: 639705 - DNA, 761 bp, Homo sapiens
cattcagtcggtgctcgggccctagtacggtaagtggaagttgcacatagcatgtcagttaggcagcatcctggtgcatagatattgagccttgagagtactacaccatgtgatgtgaacgcccggtggtcaccgatatgtcctgacgcggactccgagaataggtcttctgtaggctcgcttgactgccatggctatccatttaggagttccagagcgcagctcggatgaatccccattatgccaccggtcatgtatggcacaacgtttcaagtacacaggggtccagaaacttgcagaattcgcacacatacagaaatactgctgcccacaccaaataacttcgacgcctgtgcaagaccctcacacttggtccagttgcggcacggtgcgagccttacacttcaacatccacgttacgtctaagcaccttggtcagcttgcccaaaatctacacaacagttacacgctgacacctctatagcattctgcctgcgtataacatgccttacatcgcaagcgatgcaggaactgcttgacaaggctccctgccgcactatttacgagcatccacggacagacacgaaccttgatccctgcaacgaagtgaccagcatccagctcggtcgcatactactccttgacattactcctcttgtacctaaacaaacctttacaagagtaccaggtggatacactgaccaaccgcgcacccacaatcaactctaagaacggccaacagaccttcgcagcgcgaacct

SEQ ID NO: 639706 - DNA, 83 bp, Homo sapiens
gggggggttttcccccccccaccaaattgggggggaattgggtgaaacccaaacccttagtttcccccggggtgtttttttta

SEQ ID NO: 639707 - DNA, 411 bp, Homo sapiens
cacgaggagagagagagagagagagagagagagagagagagagagagagagagagagagagagagcgagagagactcataccgagttagatacatactgacacacaccttgatcttgctttgcccctccttctcccatcattccttcattcctccctgttctcccatgcctctcttctgctttattccttctccttcattgctcctattgtatattatttaccccttcgtcacttgtcttgttccactttctttttctttctttctgtccctttccctctctctctttttcgctcttttactgttttttcctctttgtatcgtctcttctttctttttttattccccttcttctctctttctgtttttcttttttctttctcttccttctctccttccttttctcttttcc

SEQ ID NO: 639708 - DNA, 537 bp, Homo sapiens
atcaaacaagcgcttgtgatgggttatgttgaagtcagtgccttgggggaccatttgcctatggacttgatcatcataacattcatggggaccaggagcactgtggcatgtgacaggattggagcttcaagaaagaggatgacgacttctacttctggttctaaaggggcaataggggctggaatcaccctcccattataaaaatctaaaaaaccaaaacacggttgtgaatttagacaacaggccgagcaggactgtggtcccaagaaaatggaagctgatgggcacgccctatgctcacccaaactttctgtctggaggtggcttccggactgcaacacaggccagaagaggcaaaggggctcagcaggttaaatgccaaatcaggagaaggttgaaaacaacacaggtaagactggcagtcaagacaacagcaaatggacaagctgtagagaaaagcaatgacatcaaaggtgttttatttaagatgattaataaaatggaataaccttggatggactgattaagaaaacaaaa

SEQ ID NO: 639709 - DNA, 820 bp, Homo sapiens
tcaatgggcaacacaaattatattggggaaaaagactctggggagaaggggtgtaccagctagtgccaaagcccccttcccgtctttacggggtgtggcccagtttacagtctcccgggcaggaagaggctcgtgggcactgtgctgtggtgaaacagtgggcggtggtgggacggatgtgcttgggcgtgcgtgcataatgtgaagggaaatttagtgtgacacgcccagggtgtttagggccgtgggcaccttgcctgggacgaggaagtggtttcctcacaggctctcgaggcccgtgggtggaaatttgtctccactctcgtgacccagtgttggctcacaacgtggctagggggctcgtgcaacaatatagtgtgccacgcttggggggccataaccgatctctcttatatgttgctctatcaccttataggttatataacaacacatgggcgcaacaaccgggggccgtctcgatgtggatctcccaactctgtgggacacgtgacatatcactgtgcgcgtggcaacatagcgggggcagtctgtgcgtgcactctaacggggccgcagtgggggttaacccgtggggaacgcaccttctcaccggcacagtgtggatttctccccgctgcgtgatgagagggccctacgttggggtttatctttacaccacgctgtgttgttcaccacaaagccggcgtgttgcacacaacttacttacttttatactacccacgtgggttgtataccacctgcggccgatgtgcccttctgcccccgtgggacatacaacaccaaattttaccaagccccc

SEQ ID NO: 639710 - DNA, 119 bp, Homo sapiens
tctcgactctcttgagcgagggtcatggggcgttggcactgtcatctcctttctcctttcttcccctttctctgccgcctttcccatcctgcgtagacttcttgatgtcgagcatgtcg

SEQ ID NO: 639711 - DNA, 335 bp, Homo sapiens
  misc_feature (11)..(11): n is a, c, g, or t
  misc_feature (327)..(327): n is a, c, g, or t
tagtttgctcnagcatgcctggacagaactagacaagccccagcccatagtgcatgccattccttatttggagatgcttccttaactatccctgggcaacttccttttctttctttcttctattccccttacctaattaagaaagttttaaactaacagccaatcgggtaaagtgtaaaatgggaggtcctattccagccaatggaaactggacacagcagtagggtaaacacgtcaggttataagtaactctgtctcctttgtttggtgtgctcttgtagctggacagctattgagtagcaccctttgtgcagaaaaataaagctngccttgct

SEQ ID NO: 639712 - DNA, 861 bp, Homo sapiens
ggacttgggctgggcctggtggagggggctgcagcgaggctctcggactgggcgctggcctgctttggcgccctgcgtctcaccctgggagtggggggctgcgggggagacgtcctccaaagcgccgcccccttccccagctctgaacgagcccaccatggactacggattccagaggctacagaaagtcattcccagcgtgttctccttctcgcctgtcaaacatgatctccgccgtcaaacagaggagcggccttggccccccgtggtggccccccaaagtgtccaacacaggctgccccagagccccaccggagaggggttcccggaccagtcttggtgaggattctgacaagtttcactgctccagccgggggcattcagaggcctggaatactcctaattacggtctgcagctgttcccatggagcccggactgcaggttccctctgggattcacagccaaacccggatggtggcaccagaacagatgcagggtccgggccattgggcggacctcatccgtgagtctgacgggggaggaggcttgaaccaatgatcaagcgtcccgtaagcagcccacgaggttactgtacgcctccccgggtaaggggtagtaagaagcccagcatgtgcggatggctcatggcaggacagccatcgcagggacgttgcgggatcaggccaacgggggggctggaccacgaacaatggctgggcgaccagctgtgaagagggacatgcatggaacgtgggaccgagagccgggcaggccgaagccggtggctgccaccaggccagccaccttgtacaggggccagatgaacacacgcgaggccaagtggcggccacctgagaccg

SEQ ID NO: 639713 - DNA, 958 bp, Homo sapiens
  misc_feature (113)..(115): n is a, c, g, or t
  misc_feature (118)..(118): n is a, c, g, or t
  misc_feature (121)..(121): n is a, c, g, or t
  misc_feature (123)..(123): n is a, c, g, or t
  misc_feature (126)..(127): n is a, c, g, or t
  misc_feature (129)..(131): n is a, c, g, or t
  misc_feature (133)..(135): n is a, c, g, or t
  misc_feature (137)..(137): n is a, c, g, or t
  misc_feature (142)..(142): n is a, c, g, or t
  misc_feature (153)..(153): n is a, c, g, or t
  misc_feature (178)..(178): n is a, c, g, or t
  misc_feature (184)..(185): n is a, c, g, or t
  misc_feature (187)..(187): n is a, c, g, or t
  misc_feature (191)..(191): n is a, c, g, or t
  misc_feature (195)..(195): n is a, c, g, or t
  misc_feature (201)..(201): n is a, c, g, or t
  misc_feature (207)..(207): n is a, c, g, or t
  misc_feature (457)..(457): n is a, c, g, or t
  misc_feature (540)..(540): n is a, c, g, or t
  misc_feature (546)..(546): n is a, c, g, or t
  misc_feature (592)..(592): n is a, c, g, or t
  misc_feature (633)..(633): n is a, c, g, or t
  misc_feature (657)..(657): n is a, c, g, or t
  misc_feature (752)..(752): n is a, c, g, or t
  misc_feature (760)..(760): n is a, c, g, or t
  misc_feature (765)..(765): n is a, c, g, or t
  misc_feature (772)..(772): n is a, c, g, or t
  misc_feature (803)..(803): n is a, c, g, or t
  misc_feature (810)..(810): n is a, c, g, or t
  misc_feature (846)..(846): n is a, c, g, or t
  misc_feature (861)..(861): n is a, c, g, or t
  misc_feature (887)..(887): n is a, c, g, or t
  misc_feature (955)..(955): n is a, c, g, or t
gcagcgagtgacaggacgtctggaccggcgcgccgctagcagctctgccgggccgcggcggtgatcgatggggagcggctggagcggacccagcgagtgagggcgcacagccnnnacnccnangcnncnnncnnnanacccncaccagcgcancggccctcggcgggacgtgacgcancgcccnngncgcnggtntatttnatatantgtttgcaacaaattcgacccaggtgatcaaaatgattctcaactcttctactgaagatggtattaaaagaatccaagatgattgtcccaaagctgcgaaggcataattacatatttgtcatgattcctactttatacagtatcatctttgtggtgggaatatttggaaacagcttggtggtgatagtcatttacttttatatgaagctgcaagactgtggccagtgtttttcttttgaatttagcactngctgacttatgcctttttactgcactttgccactatgcgcgctgtctacacagctatgcgcaataccgctgcgccccttgtgncaaatntaccctatgctaagcattgctttcagcccagcgctcagttttcaancctgctacgcctagtgctgctttctacctcacgctgctctncagccattgcatcgcataccctgncctatttgcttcaccccaaatgcaagctcccgccctttcgcacgccacaaatgccttgctagcccaaagctcaccctgccatccatacattttgncctgcctncccangccttgncccagctttgcccagcctataaatcccatcncaaatgntattttttcattgcagaaacaccaaatatttacagntttgtgcttttccanttatgcagttccaaaaattcaacccntccgcatagggcctgggcctgaaccaaaaatatactggggtttcctgttttccttttctgcattattntta

SEQ ID NO: 639714 - DNA, 371 bp, Homo sapiens
accccacagactttggtttcccggtaatgctgcccggtgtgctcatgggtctacgccgcccgcatcgcctgctcggcactcgtttattgtcgtgaaccacgacggtctctgatcgtcttcgaccctcctactttcgttcttcattattgaacacattcttggcacatgctttcgctctgtctccgtcttgcgccgtgctccaagaatttcacctcttgcgtcgcaatacgaatgcccccggtccgttccctcattattcttgactgcagataacccaaaaccgaaaaaatagaaccgcggaccctattccattattcctagctgcggtatccaggcggctcgggcctgctattgaaacttctaaaactagg

SEQ ID NO: 639715 - DNA, 279 bp, Homo sapiens
cccctattaaattttttaatgaagattttttttttaattgggccttgtccttcctaggttttttattgagatgagaaagccccattatgttgcccttttcccccccccattaaatagttaaaaaggatgcagcctggagccaaaaagcaaaaagttggggtggttttgaagctttttccatacttaagttgcccccaaccagtttgtgaaagtatcagtttttggtttcctggggattgattcccctaatataaaaatttttgggtcatgaccctttta

SEQ ID NO: 639716 - DNA, 450 bp, Homo sapiens
ctattcgcagtgtaggtattccatcagctgcagcttcggccatcacacacatttccacggtatcattacggcgctttatagcagcatcatcagcatcggttgtgagaccttccatcatgtaagagcctcctctaggttcagccagtttggtaatcccagatttctattgaatgatgatctgcgtgttactgcctacttgagcactgttcgcagttagcgcactccaaagcttcatctatagaattggtgttctctgtctgagtccctcctaatgctgctgccattgattctatatgcagtacgattccataatactgtagggctcatgctcagtaagtgaccatccacatgtgcaacagtgtgctattataattatagatactaagtcgtgaggctcatacacactctagattaagtgagcccagagtcttctaacagctctcatctgag

SEQ ID NO: 639717 - DNA, 1498 bp, Homo sapiens
  misc_feature (16)..(16): n is a, c, g, or t
  misc_feature (91)..(91): n is a, c, g, or t
  misc_feature (104)..(104): n is a, c, g, or t
  misc_feature (109)..(109): n is a, c, g, or t
  misc_feature (119)..(119): n is a, c, g, or t
  misc_feature (136)..(136): n is a, c, g, or t
  misc_feature (139)..(139): n is a, c, g, or t
  misc_feature (148)..(148): n is a, c, g, or t
  misc_feature (156)..(156): n is a, c, g, or t
  misc_feature (196)..(197): n is a, c, g, or t
  misc_feature (211)..(211): n is a, c, g, or t
  misc_feature (246)..(246): n is a, c, g, or t
  misc_feature (263)..(263): n is a, c, g, or t
  misc_feature (315)..(315): n is a, c, g, or t
  misc_feature (334)..(334): n is a, c, g, or t
  misc_feature (386)..(386): n is a, c, g, or t
  misc_feature (443)..(443): n is a, c, g, or t
  misc_feature (484)..(484): n is a, c, g, or t
  misc_feature (492)..(492): n is a, c, g, or t
  misc_feature (502)..(502): n is a, c, g, or t
  misc_feature (511)..(511): n is a, c, g, or t
  misc_feature (514)..(514): n is a, c, g, or t
  misc_feature (543)..(543): n is a, c, g, or t
  misc_feature (711)..(711): n is a, c, g, or t
  misc_feature (751)..(751): n is a, c, g, or t
  misc_feature (754)..(754): n is a, c, g, or t
  misc_feature (782)..(783): n is a, c, g, or t
  misc_feature (788)..(788): n is a, c, g, or t
  misc_feature (792)..(792): n is a, c, g, or t
  misc_feature (799)..(800): n is a, c, g, or t
  misc_feature (840)..(840): n is a, c, g, or t
  misc_feature (843)..(843): n is a, c, g, or t
  misc_feature (845)..(845): n is a, c, g, or t
atttacttcttctggnacggaaccttgtacctggagaccatttacttctgccatgaccacttcgggtggtacctgggctggggccactgtntctggctgccttntcttnacacgctgcngggtctgtacttgtgtnccnccccgtgcngctgtccnccccggcccccgtggcgtcctgctgctgggcctggtggcnnccacatcttccggnaaaaaaccaccagaaggacctgttccgccgcacgnatgggggctgcctcatntggggcaggaagcccaaggtcatcgagtgctcctacacatccgccgacgggnagaggcaccacagcaagcngctggtttcgggcttttggggcgtggcccgccacttcaactacgtcggcganctaatgggcaacctggcctactacctggcatgtggcggtggccacctgctgcccaanttctacatcatctacatggccatcctgctgacccaccgctncctccggnacgagcaccntgcgccagnaanaacggccggaactgggagcgctacaccgncgcagtgccttaccgcctgctgcctggaatcttctaagggcacgccctagggagaagccctgtggggctgtcaagagcgtgttctgccaggtccatgggggctggcatcccagctccaactcgaggagcctcagtttcctcatctgtaaactggagagagcccagcanttggcaggtgtccagtacctaatcacgctctgttccttgnttntgccttcaagggaattccgagtgtccannactgncgantgccagnncagacggattttctctaatcagtgtccctggggcaggagnatnanccagtcacctttactagtcctgtggagacaatttacctgtattaggagcccaggccacgctagactctgcccacactggtgagcaggaggtcttcccacgccctgtcattaggctgcatttactctctgctaaaattataaagtgggagtggggcgtgcgcgtatccatgtattgcctttcaggtctagatccccctcccctggctgctctgcagtcgtgggtggggcccgtgcgcgtttctccttgggtagcgtgcacggtgttgagctgggacactggggagaaaggggcttccatgtcgtttccttcctgctcctgtgcacagctgcaggagtgctctgctggagtctgagactcagagaggtcacagcactggctgtggctttcagtgtaggcaggtgggctctgttcccgattcctgtgaggccagcctctcgaagatttactgttgcctgtgatgtgagatcctggtcgagcaaccgggaatcacctcgggctccaaactctcagggagagttcagccagctggaaggacccctttagggttgccgaggttttcccaccaggggtgacatttaccaggcaacaacttataaccggaaaaaaaacggtttggggaagaagagtcatccatgagaagcttatagaaata

SEQ ID NO: 639718 - DNA, 104 bp, Homo sapiens
aagtattgagtctgaatgtcgggcggagtagcgtatgatgggcagtgaggggtgcgatatgatctaggctattatattcggagtatagtagcggtaagttaaaa

SEQ ID NO: 639719 - DNA, 236 bp, Homo sapiens
tgtaggtcgaattagagtatcccgaatcgatcacattcttccttcgccgttgacgaagatcagtgccacgccggtagattcgccagcgatagtgctgaccggctcgacttcgatattatctgcttaccagtttgcttacgggatacgctcatcctgtgtcatcatgcgctcggtacaggcatataagtgcgatgctgtgcaccgctgtcgcccggcgtgctaccgcgctggtgtcg

SEQ ID NO: 639720 - DNA, 326 bp, Homo sapiens
catcatacctgtcatgccattatgtatgtcttactacgcgagaaatgtctattcaaatcttttattaattttaaattggattattagatttatttcctattgagttgtatgagactccttatatttttttgtgaattatactttgtcagatggaaaacttgcagatatatattattcttccactctgtaggttgtctcttcactttgtagattgtttcctttgctgtgtagaagcgtattaacttgatgtgatcccatttgtccatttatgctttggttccctgtgcttgtagggtattactcgagaaatctttacccagtgcaat

SEQ ID NO: 639721 - DNA, 264 bp, Homo sapiens
  misc_feature (1)..(1): n is a, c, g, or t
nggagataccttaagcctggctgttgtgggcgggcagcacagagccatatttctcttctttcaaaagaaaataggagacatattgctgaattctttttctcagcaaggaacaagcctgaggaagagaatgcgctcctaggggtaggcctctaaacctggcttgctctggggggaccggaatgtccttttacacgttgtagataagggatgacataagccccggactcctgttgtgctccctaagccctactccctaagaacctt

SEQ ID NO: 639722 - DNA, 105 bp, Homo sapiens
  misc_feature (30)..(30): n is a, c, g, or t
gggaattgggaactgtaatgagatctcttngaacagaattcccacagaaggcagagttacaggacatgatttaatgaagtagatgcttgattggtaattggcaca

SEQ ID NO: 639723 - DNA, 1417 bp, Homo sapiens
cactcaggctgacccagtgcattacctgttcctacacaggcaagctcagcgactgctctactccgcgtggagcggggcttcatctatcgtccacaatgccacctgtgcacatccggctttcgactgaagatctcctttgtcaactttgctcgtggtaccactactactcgttcctttgactccgacattgatgacccaatgccacgcggcactccacgctatacccttcagccacgcatccgcacgcagcgcgagcgacgctccggcgcaaacctgctctctgactctcgctcacacgcctacccaacacgctcaaccatcaacaacacccgacggcatcgcacaacgacggcgcactgaaaccccaacgcctaccgcatgcacactcatgcctgcacctctgcactgcaccgcaccccaagcactgcactcgccctaacctctggacccaggcgcactgcacacgggcaccgacacgcgccaccgaatcccgagcgcacccaagcacatcgcccaacctgaaccacgcccagccgcactgcaccccgcacgcgcagcaaagcaaacaccccgactgccacgctcaatcccagacccccaacgcgctgcaaccgcaggcacggccaacgactgctgcgccaccagccgaacccccgcacaagcccaaaccgtccccttcttgccccagcccatcccatccccagcatcacattgcacgcggactgcaacaaggctgaaccccgccgccactgcaccaaccgcaacacccgcgcacacaccagccttcacacaacaacgcccccaacgaattggcgcccgaaacgcgacctcgccaacagcgacgcccgccaccgtcaagcgccccctggctgaccagcgattcatcaccaacgggcgaccacacgcacaccccacaactggccccccccaaacaaaggcccccatgcacctgccattaccactgcctggtccccatcacactggcccagcccggaccacacaacaaccaaacgtccagaacccaccccctgagccactcagcccaacacacgcggcatccttaccccaccccaatcgccccccctacccccttccaaaccccactgtccccccacaccaccaaccactatctcccccccctccctgccctaccccactcccctccccaccctcccccacaacccccctcaaccacctcctaccgcctccatcaccacctcccccatcctcacctccctcctcaccatccacccccccctcccctccctccacctcccctcacactctcatcatctcctcactcctaccactccccacccccccacttcccctctcaccctctgcactcttctcctccaccacacctccacatcactcccctcccccctccactcacccactacgctttcactctccc

SEQ ID NO: 639724 - DNA, 392 bp, Homo sapiens
ttccctgtgcttactgaaggctggtgctgtgttttgtcgggttaccatcgctcactgttatctcctttctgctccggtctcaggtcacatctagggacctttctatagttgagctggtagcgtgcggacgtggtatcggacgtctgtattcgacttcgtcgaacagcctgattcatgacaggggctttaaattgatgactaccttagatttatgaactaagagtcatacactatgaacttttgttcattggtgctcagtcctagacccttttcacctctctattctcttctggtgtcatctcatcctttcccatctttataccagtggcttccaatttatgtttttattgtagaattctcatctgagtgccactctcaaatacctggttacc

SEQ ID NO: 639725 - DNA, 659 bp, Homo sapiens
catctctacaaaaaataaaaaattaggccaggctcagtggctcatgcctgtaatcccagcacttctggaggcccaggcgagcggatcacctgaggtcaggagtttgagaccagcctggcgaacatggtgaaaccctgtctctactaaaaatacaaaaaaattagccaggtgtgatggcgtgtgcctgtaatcccagccagtcaggaggctgaggcaggagaatcgcctcagcctcagagctcgggaggtggaagttgcagtgagccaagattgcaccactgcattccagcctgggtgatagagcaagactctgtcttaaaaaaaaaaaacgtttgtcctaaatgccactggattatgggggttggttttcttgtcgtcgtacggttttttgttcttcgacgacagagtctttctgtccgctctgtcacccaggctggcagtgcacatggcatgatcataacccactatagcctgaaactcctgggcacaagtaatcctcccacctcagcctccaaagtgctgggattacagcgcatgagcgccattgcacccagcggccactgacttgttcattctcacaatggttaatcccggctggcgcacagagttccagtatggaatgatgatgacgtcctgcaggtggatgttggtgatgcttg

SEQ ID NO: 639726 - DNA, 292 bp, Homo sapiens
  misc_feature (224)..(225): n is a, c, g, or t
  misc_feature (277)..(277): n is a, c, g, or t
ggacttcgcgctcataattgtacaaccctatcagataggtactatttttaccacttacagaggagaaactgaggcacagaatttaagtgatttggccgggtgcggtggtcacacctgtaatcccagcactttggaggcaaggcgggtggatcatttgaggtcaggggttcgagaccagcctgggcaagatggccagacgccatctctaatttaaaaaaaagaannaacaagactcctatagtggtgaagaacagacattccgaaaacagactgtgcnttatgataccgcgaa

SEQ ID NO: 639727 - DNA, 908 bp, Homo sapiens
gggaggccgaggcgggcagatcacttgaagtcaggagttcaagaccagcctggccaacatggttgaaaccccgtctctactcaaaatacaaaaaaaatttagccgggcgtggtggcattcgcctctagtcccagccactcgggtggctgaggcaggagaattgcttgaacctgggaggtggaagcggtttcattgagcccagatggcacctctgcagtgcagcgtgggccacagagtcagaccctgtgtctcaaaaaataaaaaagaaaagaatttattcttactaaaattagtaaacctaatcattaataagtgaaattgatctagtaaataattgatcagaggcatgtggtactaagcttttaaggagtgatgagactatcatagacattctacttaactaatactttcgattaggggttagtaactgtggctgtggaccaaatccagcctgctgcctgtttttgtaaataaagctttgttggaatgcagccatactcatttatgtaagtgtctatggctactttctcactataggcaaagttgatagttttgacagactgtagggtccacaaaggcctgaaataatttactatctggtcctgtacaggagataaatgtgtgacccatgtgtacagatttgagacttatacattgtaagatcagaggtaccggaaggtggttcatgagggtgcaataaattccaaggaaaagtaggatgtcacgtcagttttaaaacatacgaagggtgccaaggtaatgtggttaggaatcttaaaggaaggaaagtgttagtcatagcaaaagaggagacgcatgtcaagatcgacaaagatgatgcttaattaaggcagactggtgaatagaagattcatgagcttagagagaccaagatgggaaacatgacg

SEQ ID NO: 639728 - DNA, 871 bp, Homo sapiens
cctccactacctcactggtcccccaaaaagagccctctcttatttccgcggcgttaatatattccctcccttgttgatttcttcccctcccggagaaagttttctttcttttcttttcccacacagggagttttttttttggaggtgccccctttcttaccacacacatgtccgccaccgcttttggcccgctttttcccccccccctcttttttagggagggggcagcccccttgggcgcgcccccctacatcagcagagtgtgattcttacccccgccggttattatcaccccccccttagagagagtctgcgccacacccctctttcagcagaacaccccgcgcgtcattatttacgtcgccgcatcacgcggggggtttctcacttacccctgcggggtctcacccctatgtttgttgttggatgtgtgtagaacgcacacctcgctagacctcccacacatatatattgcacataaaccacctgctgtctcttttacacatctttttcgtggcggtgtttttttttttctgtatcccccctcttacacttgcccttgccggggtggctctctggtagttctcctctctccaccattttcccggccggcgatgttactggcggccggtacacattgtttgttgtgcgcacgcgaggcttccccggacgttcctccgtcttaattttggctgtcccatcttcttccccaatttgctgtcgatcatcccaccgtattttttcctcccttctcaacagcgcacaccatctcactgtgggcttctggcagacccccccccgtaatatggccttttttaaatattggttttttatttttttttttttcccatttttgagagaggggttttta

SEQ ID NO: 639729 - DNA, 391 bp, Homo sapiens
  misc_feature (213)..(213): n is a, c, g, or t
gaagccccccctgggccatgttcctgaataactggttcctcctgctttccgggggctgggacgccctcccaaaaaggggaaaaagctgttttccttttgtaggaaggccaaaagagcaaagtcccagaaccccctgggcaggtttaagcccaaaggaaagaaatttagacccccagcccagccctccttaggttggtggggcctttttggagntgagcacattgtggggcacagggttaccccctttgtgggcaggggagggtttgggggtttttgcccagcctgaacagacagttttggggccggcaggggtgggccctttaggtccttgggccttccaaggggggtttttgccccttggcaacaaaataaaaatttttggtgcccccga

SEQ ID NO: 639730 - DNA, 517 bp, Homo sapiens
  misc_feature (517)..(517): n is a, c, g, or t
tccatttaaaagcctgttattgtgcaaaagtttctctatagatttattttaagccatggatacaaaaaataaacggtggaaacttacaaaaaggaatatttgcggcacttcgaattttgcaccaggagcttattcttagccttcatactactttggaacacatgtttaccatataccgcagcctttgattgattactctaggctcgctaatactataaagcaattaaccatgccttgaactataagacacatgtcgtaacatgacactttaactctgggagctcaaggcctaggattatgcccgtgattactcaacggctcttttacaacacacggcaaggctatagctactgttgagagatctgaaaaggtgaggatttctgctagctcttttggggcccaggcggctaggatcttatgtattactcagagcagccatagtcctgttcatcttttttgacgataaccagacctgagaccgctcatataccttccacgaatgaaccgccaactgatn

SEQ ID NO: 639731 - DNA, 202 bp, Homo sapiens
ttagtgatatgaaacagtcctatgtggatggcagtagatacacaaattccacacattatgatgaaatagaactatacacattgcttggtatccgtggcaaaaatcccttggtttcctggcattggatagttccattagatgtgtataagttacccattgggcaaggaaatttaaaggaccacatgtgcattccatgtgttgg

SEQ ID NO: 639732 - DNA, 421 bp, Homo sapiens
  misc_feature (8)..(8): n is a, c, g, or t
  misc_feature (17)..(17): n is a, c, g, or t
  misc_feature (35)..(35): n is a, c, g, or t
  misc_feature (43)..(43): n is a, c, g, or t
  misc_feature (200)..(200): n is a, c, g, or t
  misc_feature (256)..(256): n is a, c, g, or t
  misc_feature (316)..(316): n is a, c, g, or t
  misc_feature (347)..(347): n is a, c, g, or t
  misc_feature (419)..(419): n is a, c, g, or t
aaaaattnggggaaccnggtaccccctaaaaagtngccctaancctgtagttaccttttaaaaagtatattaagaatattcaaataaaaatgtgttatgctgaaacaaaaagacacatgaaactgccttgaaaacttccattgatatggttaggctttatgtctccaccccacatctcatcttgaattataattcgcagntgttgagggaaagacctggtgggaggtgattggattcatgggggcagtttcccccntgctgttctcatgatagtgagttctcacgagatctgatggttttataagcatctggtatntcccttgcttgcacttctctctcttgctgcnatgtaaagaaggtccttgcttcccctttgccttccatcatgactaagtttcctgaggcctccccagccatgnca

SEQ ID NO: 639733 - DNA, 431 bp, Homo sapiens
gggcgggtcagaaaacacagaaatgctaacttacatttgcttagtttattaataaaggatatcataaaggatacagaagaaccagccagatggagagattcaaggaacgtgggagggggcacggagctttcatgccctctccaggcacgctaccctccaggaacctccaaacggttcagctgtctggaagctctctgaaccttgtcattttggagttttatggaagcttttttatgcagtcatgattgattacatcaccagcccttggtgatcagcttaaccttcagcttcggtctcctccctggagggatggtgtcccaccccgctaatcctgccttggtctttctggtgaccagccccttttctgaagccatctaaggcccccagccgccactcatctcattagcaaacaaaagataccacggctcaaa

SEQ ID NO: 639734 - DNA, 320 bp, Homo sapiens
  misc_feature (1)..(1): n is a, c, g, or t
ncttggcggaacttattttattttctacaaaggcgtgaccatttaatagaaatgattgattatataaaattgtttacacatgtataaaaactaggaacacgtatgtaggtaacgcaatcaaaatcatgctttctgttagaaaagctaacaccttctgcgaatagactgcatgacttcctttcaccccggatgcctgcgccggaccccggagacgctgaagaaaggaaaaaattcttctccgccgctccccccctccctcgcggggacgtgtctggatacccatcttctcccctctccgtccccctcttctctctcttcct

SEQ ID NO: 639735 - DNA, 431 bp, Homo sapiens
tcctaacccaaaaaaataattttattccaaaataacaaaataaataatctactgtccccaatctgaaaaaaaagaccctttaactgctaaaataggtgctgcggtccaacccccagttggaggaaaccctgagtccaacccaggccttccgagggggccagtgaagggatcccacacccaccgcccttatgtagggcggggaaaaaatggcaaaggacttgggggataaatgggaatgggagggcaaactgtaacacttgttaaattaattaaagaaacacaccagatgcacaaaaacggggaaggtgaggggataaggatcagttcctgtgttccctggcccccaattgtggtggcaaaatgtcgctacttaaactggactctccccgggaagcccactttttggccttgtagaaaataaggcctactgt

SEQ ID NO: 639736 - DNA, 433 bp, Homo sapiens
  misc_feature (433)..(433): n is a, c, g, or t
ggcgatctagaggatccctgcaggaagagagaactgaaaaacatagcacgagaaatcagagaagcatacagaagtatcaatagctcaatcgatcaagcggaagaaaggataccacagattgaagatcaccttgctgaaataaggtgtgaagacaagattagagaaaaaagaatgaaaaggaatgaacaaagcctccaagaaatatgggactatgtgaaaagaccaaacctacaattgattagtgtaactgaaagtgacggggagaatggaaccaagttggaaaacacacttcagagagacgtgaactctcaggagaacttcctcaacctagttcaggaaaacctccccaacctagtaagacaggccaacattcccattcaggaaatacacagaccaccactaagatactccatgagaagatcaaccccaagan

SEQ ID NO: 639737 - DNA, 184 bp, Homo sapiens
atcgccaggagggggtagagggtagaagcagcggtccagctgtgaagtagcttgggcaggagaggggatacttccacgtggtgatactagtagtacacacaggggggcctacctaagagcctagagacggggctagggccagccttcagcttctatggtagctgaagggacctagctacgtagg

SEQ ID NO: 639738 - DNA, 769 bp, Homo sapiens
  misc_feature (129)..(129): n is a, c, g, or t
actataggcgcacacccccacacccagctaatttttttatgtttttgtaaagacggggtttcgctgtgttccccaagctggtcgcttgaactcctaggttcaaacgatccacctgcctctgcctcccangatgctgggattacagagagccacggtgcctggcccaacattacttttaaaattaattctctagtttgacttcacatttagttcttcagtccaactggagttcacatttgtaattaatgttaggtagaaatctggttttatcttctccagatgtagcagattttatgtgcatcagtttctgccttcactgttggattttttgggggaaagcaaagtgattataattttaaccttggtaagtgatcaagatggtttcgtagcagggcttgacctgaatattttaatattctttagctgaagaggaggcaaatgaagaagatgtactgggagatgaaacagaggaagaagaaacaaagcccattgagctccctgtcaaagaggaagaaccccctgaaaaaactgttgatgtgtaattatcccttttttataatctgagtacagagcaggcagctcttttcttaatgtatttaatgtttaacctttgttttacctcttacatgttcccattggccttttccttttctgattagggtcatctttgtttcagaagggactacttcaaagtacttggtccagtgaagttaaagcaaatggtctctgagtatgtaattaggtaatgagggccaggtgattccagaaa

SEQ ID NO: 639739 - DNA, 1096 bp, Homo sapiens
  misc_feature (14)..(14): n is a, c, g, or t
  misc_feature (476)..(476): n is a, c, g, or t
acgaatggcaggangaggcgggggttaatcggccgaggggggtacaagatggcgaccgagacggtggagctccataagctaaagcttgccgaactaaagcaagaatgtcttgctcgtggtttggagaccaagggaataaagcaagatcttatccacagactccaggcatatcttgaagaacatgctgaagaggaggcaaatgaagaagatgtactgggagatgaaacagaggaagaagaaacaaagcccattgagctccctgtcaaagaggaagaaccccctgaaaaaactgttgatgtggcagcagagaagaaagtggtgaaaattacatctgaaataccacagactgagagaatgcagaagagggctgaacgattcaatgtacctgtgagcttggagagtaagaaagctgctcgggcagctagggtttgggatttcttcagttccaacaaaaggtctgtcatctgataacaaanctatggttaacttggataagctgaaggaaagagctcaaagattcggtttgaatgtctcttcaatctccagaaagtctgaagatgatgagaaactgacgaaagaggaaggagcgatctgggattgtcacaagttcagctggaactggaaccacagaggatacagagggcaaagaagcaggcaaacgagcagagcgctttgggattgcttgatgatcagtccctgatactgtctgttctccagtgatcccatgtctctccttcttctggtcacatatatgcgtaaatgcacagtcatgtgctacgtctggctccgcaaggagggaacattgaccccaggtacatccatgaaacgcgcggaacaagacgactatggaggtcaagataaaggaggaggaacagaggacggagaaaaggtacaaggtcactaaaaacagacaacacagagggcggggcactacagaaagacccaaggggaccaagatcagatcaccaatctgacaacagggtcacagagagagacaaaagacaacagcacacctaaaacgacgatagaaaggagacgaggaaacaacccaggaactgagcagacaaaaaacaaacgaatacaaaagagtgcaacc

SEQ ID NO: 639740 - DNA, 455 bp, Homo sapiens
atccccggctatcacattatctagcacccatcacactgtagtacactgcaaacgtacagtgacaattcgtctacacagaactatattcgatatatcttgaactgccgagagaaatcaagacaattccaaaaagtgattgcagggttgatttttttctccgaaacacttgagaaacagtacagctatttcaacaaaagtctggtcttggattgtcaagagttgaaattcacatttcaattaaaagagatccaaatcaagatcctcactaccccctacccctcaactatgccccctttagggccacagttttcttcttgctcctgagataaaaatttggaatttcgaatattctcggggatctgtgcacaccttgaattgggcaaatgtgttcagctcagccagcattttctgtagacctcatcaatagcaggcacttagggtgataatgtgactag

SEQ ID NO: 639741 - DNA, 1105 bp, Homo sapiens
  misc_feature (485)..(485): n is a, c, g, or t
gaggaccacagatgatgtatgagctgcggcccggttggtaattttcgtcacaggacgatggcgaccgagacggtggagctccataagctaaagcttgccgaactaaagcaagaatgtcttgctcgtggtttggagaccaagggaataaagcaagatcttatccacagactccaggcatatcttgaagaacatgctgaagaggaggcaaatgaagaagatgtactgggagatgaaacagaggaagaagaaacaaagcccattgagctccctgtcaaagaggaagaaccccctgaaaaaactgttgatgtggcagcagagaagaaagtggtgaaaattacatctgaaataccacagactgagagaatgcagaagagggctgaacgattcaatgtacctgtgagcttggagagtaagaaagctgctcgggcagctagggtttgggatttcttcagttccaacaaaaggtctgtcatctgataacaaanctatggttaacttggataagctgaaggaaagagctcaaagattcggtttgaatgtctcttcaatctccagaaagtctgaagatgatgagaaactgacgaaagaggaaggagcgatctgggattgtcacaagttcagctggaactggaaccacagaggatacagagggcaaagaagcaggcaaacgagcagagcgctttgggattgcttgatgatcagtccctgatactgtctgttctccagtgatcccatgtctctccttcttctggtcacatatatgcgtaaatgcacagtcatgtgctacgtctggctccgcaaggagggaacattgaccccaggtacatccatgaaacgcgcggaacaagacgactatggaggtcaagataaaggaggaggaacagaggacggagaaaaggtacaaggtcactaaaaacagacaacacagagggcggggcactacagaaagacccaaggggaccaagatcagatcaccaatctgacaacagggtcacagagagagacaaaagacaacagcacacctaaaacgacgatagaaaggagacgaggaaacaacccaggaactgagcagacaaaaaacaaacgaatacaaaagagtgcaacc

SEQ ID NO: 639742 - DNA, 201 bp, Homo sapiens
ttgaaaaacaccaatatcatgaccattaatcataatggaacatcatttagaagactggagattgatatgtttttattactcagaaatttgagggatgtgaattaaacatagcatcattcatcaaatcaaattggtaattcttagcttttgtaaattgatggttcagttccattcttaagagcatattttctagagtagccc

SEQ ID NO: 639743 - DNA, 145 bp, Homo sapiens
  misc_feature (71)..(71): n is a, c, g, or t
  misc_feature (97)..(97): n is a, c, g, or t
  misc_feature (110)..(110): n is a, c, g, or t
  misc_feature (128)..(128): n is a, c, g, or t
catgttttggatattaaccccttatcagacatatagtttgtcaaatatattctcccattgtcataggttgntctcttcactcagtttatgtttttanatcttttaatttntaggtttccactgtcatnttttttcatccctggga

SEQ ID NO: 639744 - DNA, 148 bp, Homo sapiens
gaccgcgcctcgagctgggcatacgagctagactccgtctcataaaaaactaagtctgccatggcaccccatagcatttagacacccagctattcacctactagtcccaactacacacctaccagttcttattggcccaggctgtagt

SEQ ID NO: 639745 - DNA, 226 bp, Homo sapiens
gcagcagacacgcagcacagacagacaggcaaaatgaggccactaaagaaagcactgtctggccagtgtgcggtgtgctcacacctgtaatcccagcactttgggaggccgaggtgggtggagcacctgaggtcaggagttcgagacgcagcctgaccaacaaggtgaaaccccgtctctactaaaaatacaagaattagccaggcgtggtaggagcctgtgcaag

SEQ ID NO: 639746 - DNA, 1070 bp, Homo sapiens
  misc_feature (1070)..(1070): n is a, c, g, or t
ggttgggagcggacgcgtcggacgtggggtggaggtgcgcggcagtaagagagtcgggacgcggggtgcccggcgcgtggtgggggtcccctggcgcctgcccccacggtgacccaagaagtgcctggccagggtaccctcctgcgggtagcccggtgggatggggtgtggcgcagtggcgccaggcggccgtggatgtggcccgggtggaccccacagcgggctggagctggtgtgccgtgccgcgacgggaccggatgctcgccttgatggggtcggctgggtagagctaacgtcgcgtggggcccaagtatcctcgaacgtgtaccatgtggcgacggttccaggtgctagtgttcagcatatctcagtggagtggcatctagccctttgcaaacgtcggtattgccggccggccatagcatagggctcgccggacggggaagcaggggggacttggccttggcttgcgttgccttgtgggcccaaggggtggggccgatcggggggttttgttggtccaaaacacggtcgttcggtatgggggctttacggatgagcgcctgagcgctagcagcccgggcgagaggcgttagccttgcagcacgccggcgatatgctagggctcctagttggccagagtgggccgtaggggaatcctttggtgttccagaggcgagccccggatcgttgacggttcgctgtggccttggtacccgttttcccggcccgttttccgagtcgtattcaggagccactcttgccctttgggcgcctaaggtcggaggggcacgtaggccagccgtaccacccgtagaaaggtaaggggggcattggccacaatttcgctttctataaagttaccagggggccgcgggtgtcgatttcggatagagaatcttttacccaagggatttgaggggcattggggtggacgtatccatgaaacacaagaagttcataccgcagagggcatccaagggcccttcaagatcccctcgggaagaggccttcgaggtcaagagcgcaaaatcgggaagcccacattgagacgaagacgaggctcggan

SEQ ID NO: 639747 - DNA, 524 bp, Homo sapiens
agttcgaggagactctcccgcctcagctccgagtagctgggattacaggtgtgtgccaccatgcccggctaatttttgcatctctagcagagatggggtttcaccatgttggccaggttggtctcaaactcccgaccttgtgatccacccccctcagactcacaaatcgctgggattacaggtgtgagccaccgtgcccggccttatctttttttttctttgaagagacagagtcttgctctgtcacctaggctggagtgcagtggtgcaatcttagctctctgcagcttcaaactcctgggcttaagcaatcctcccgcctcagcctcccaagtagctggaactacagttgcgcctggctaatttttcttattttttggtcgagatgggatttcacagtttgtccagactgctctcgaactcctgggctcaagcaatcctcctgcctcgacttcccaaagtgctgggattacagccatgaagccactgcagccaggagttcgagagtctccgtcgaactgggt

SEQ ID NO: 639748 - DNA, 114 bp, Homo sapiens
tctctctcggggatcttcacagactagcccaagtatgaagtatcctaagtgtggccataatcatctaacaggatgtttatccggtttcagatctcggatagacggatgttctca

SEQ ID NO: 639749 - DNA, 323 bp, Homo sapiens
gtctatttctactcagaaaaaaattaagagtacatagatgctgggccaggcgcggtagctcacgcctataatcccatcctattgagaggctgaggcaggcagatctctttaggtcaggagttcaagaccagtctggccaatacaacgaaaccctatctttaccaaaaaaatacaaaaaattagctcaggatggtggcacatgcctggagtcctagctacttgggaggctgaggcctgagaacccaggaagcataggtttcagtgagccaagatcacacccctgcactccagcctgggcaccagtgagatcctgtttggaaaaa

SEQ ID NO: 639750 - DNA, 327 bp, Homo sapiens
gggtaaaaaaaaaggggggggggggccccccccccaaaaaaaacccattccggggtttggccgcccaaaaaaaaaaaatttaaatggccccggtttttttttggaaagggggaaccctcccattttttttaaccgggaaagaaggaaaaacaggggctttgggccttttaaaaaattggggttctttttttccccaaggtcaaccttttgccccgggggggtttttcaaaaggaccccggttctgggcccccccaagggtaaaaaaaacggggttttaagttttggggggcaaaaccaaaaggaaaaaactttaattgggcccccca

SEQ ID NO: 639751 - DNA, 798 bp, Homo sapiens
  misc_feature (509)..(510): n is a, c, g, or t
  misc_feature (512)..(512): n is a, c, g, or t
  misc_feature (514)..(514): n is a, c, g, or t
  misc_feature (532)..(532): n is a, c, g, or t
  misc_feature (542)..(542): n is a, c, g, or t
  misc_feature (544)..(544): n is a, c, g, or t
  misc_feature (546)..(546): n is a, c, g, or t
  misc_feature (579)..(579): n is a, c, g, or t
  misc_feature (618)..(618): n is a, c, g, or t
  misc_feature (641)..(641): n is a, c, g, or t
  misc_feature (680)..(680): n is a, c, g, or t
  misc_feature (684)..(684): n is a, c, g, or t
gcacagatggcccgagactcttcacgtttgaagttcgtgactgatgggaagtgaacgaggaaatggagttcccctcagttgatgaagatgcgcgacttggaagtatcaaaggcactaggacatgagtgtcgtggggccctatacatactacgatccaaagctcttctgatccggatcaccgagcggaggaatgatgatgaatgactcatctgacgggagtccatcaaagacgacagtgctgtcgcaacagcgtgtacatccagccaacagaacgacaccatgattcaataccgtcaaggcgggtgcctagaatactgcaggggaactgatggtatagccactgactgccatcctggccacgctgaatgaagcgtgtgcccggctcaggggtattcctgggatattgtcgtccagagagttgggtccaaactctatcttttgacgagagagaacaacatcatgaactgttgacctccatgacagtagagatgagactgccaatgagcccnntnangatgaaggtaattccttnaattcacccngnancctggccatggaggcaacctacatcaaccacantttctcccagcagtgcttgagaatggggaaggaaagatncaacttccccaaccaaaccgttngtggaggacgacatggataagaatgaaatcgcctctgtngcgnaccgttaccgcaggtggaagcttgaagatgatattgaccttattgtccgttgtgagcacaatgtcgtcttgactggagccaacggggaagtgtccttcatcaacatcaagacac

SEQ ID NO: 639752 - DNA, 232 bp, Homo sapiens
gttgccccccgtgggtttccaggcctgcccaaataatcccttcaggcctctgtccctgggggccatcctcaggcggattttgaccaccaaagaaagacttttcttacccccttcaaaataaatttttcagtgggccaaaaaggagagttaaaaaccctttttttaaagggggtaacatctgccccccaaagggaatgggtctgttttatgcaaaataaaagtttttccaata

SEQ ID NO: 639753 - DNA, 111 bp, Homo sapiens
gaaactagaaatctagatagcatataaagatcaagttgagaaatcacatttgtatttttattatatgagaccgggtttcgctcttatctcccagggcttcactgcctgacc

SEQ ID NO: 639754 - DNA, 1128 bp, Homo sapiens
taggaaattccccagaatttttttgcaacccgggggttaggcaaaaagcaaagcagtccctgccttttcttcagccgggcaggtcgtcctgaagctggtgggtggaatacgttcttcaggggttctcgtctcaaactctatttgccaaaggaaactgtgcctttatcaccttctgtgcttgcaggctttgaatgtgccccagaggagcccgaaacctcccaggcttggtgcaggaaggaagagcccttcagcgagaaagctacatttttacaccagggaactggtgctgcagcaaaatggtcggagtgtgagagtgtgagaaagcttggacaaggccggaaactttaccggttggttgcacattcgactggtgccaacctgtccgaccgtgcatgggtggagacacgcgcatctccaagggttccatttccaccgccgaaaggcagctcctatatacaagttcccgtgcgtgttctgaccaagaaggccgaaaagacagaagaaagacgaaggctcggggcccatatattaaggaagcaagccacgtagagcaggcagggagaatgcccagagcgcttggaacgcgaaaaacgcgacgcagacacaggcaaacctcaacaaagccccggtgattctgaggacacgggaagaaccaccgtgcgatgaaccgggagaatacacaaaggagtccacagagaatgtcgtggagaacccgcgacacccaagataatggaagaaactcgtggacgtggacaaaacttggcgccattagaagatttggcccagatagaccaccccttgttgagaggggcccctgaaatggcccccccgacaggagagaagaatatcatgaattagcgccaacaaacgttgcgataacgtcgggaccaaatgcggtaccccggggcccacggagtgtagggagaaaaagagtaggaagaatcacaccacgtggccgaaaaaaacacagtagtcactccaaacacatgtggaagcacaccggggacaacaaacagaggcatccgtgccaacaccacacgcgacgcgtggggaaccccattaacaaccggtgctatcgaacacacctggggtgagagtgccaagcctaaacacccggggaaaagcgca

SEQ ID NO: 639755 - DNA, 121 bp, Homo sapiens
tgactccggggcccaggaacttcccggaaggagtcttgacactcaactccgccccatacccaaggaacgacagcggctcccggagcctgccaccctgggcttctcgggacgggggcagggg

SEQ ID NO: 639756 - DNA, 107 bp, Homo sapiens
tcccaagaatgagaaactgatactttttatttatttatttttttaaaagagatagagtccaattcctcatcctttcacatcacatgtctatcctaaatctatacatt

SEQ ID NO: 639757 - DNA, 268 bp, Homo sapiens
atgatgacacacacggtgtatcttctgatggttctgggcaaagtctactgaaaaccttctggtaaggttcatcatttctagatcctttaaagaatcatctgtaattcatatgaagtctaatttatccacattcaacaggagttcgggagaagctgattcaatccttcatggataaaccccgttgtagtggttctcaagatttctgtgggaggaaatcactgcatatctggaaatacctagaccactagaatgagcacagtggagcgtg

SEQ ID NO: 639758 - DNA, 111 bp, Homo sapiens
agcctttaaaaaaactaatggggggtaaaccctaatgccatgtgaaataattttagtgttgaaaccggatggggattttttttttaataaacctttgtggtcccgatttga

SEQ ID NO: 639759 - DNA, 855 bp, Homo sapiens
ctgttacagtgcgaattaccccagcggctcctagaaatggcatgtggagacccccagccaaactgtgaaggaggctgccctcattgccctccggatgcctgtcaactaggagcctaggtcgatccactcagtgtacgtggtgtcccgtgggttgccagtgagaaactatccttgctctctctggggaatcagtcactgccacactagctagtcgctagagccgtgccttctgccaaacgactgcaggaaactcattcacctccgtgaggccatgcccatatcatgtgattccacgattcctgctggtccagtcctccaagctttggttgccatgttctttcttacttctagcgtacacaagccgccaactcaactgaggagctaatagagagctagaaggagaagataaggctgccaactcagagctgagaacaagagactagcaggagatttagtatataaagcattcgttccttctcccagatgcgggatgttctcaaccagtaaatgtgattgctgtcggtgccagagtaagagtcctttctatctctacatccagggcctttactccaatagatgtgcctttaaactctagggacctgtctcacggagccttagggaaaaatgctcaacctgcaaagatctcttcctttctggagctcctttaatcttcccagcaggtttatgccttagacgtgctggccccaggacagtgatgaagacagagcctgtctcagctctaggctgtggggatcattgccatcagtccctgttattgagggattatcccttagccaacgattcctatctgtgggtgggcgtgcaagtgtctcttttatggggtgtgtgtgtata

SEQ ID NO: 639760 - DNA, 87 bp, Homo sapiens
aaaaagttaaaattgtttttaccaaaagtttatgtggggcttgattcccccttcatccattgggtggaaaatggattggggatttga

SEQ ID NO: 639761 - DNA, 119 bp, Homo sapiens
gctcgagtttgtatctctcgagtgtctctcgttcccttgtgtgaaattgtgctccggaaataatcatatctgatatcttcttcgaaatcacacttatccccaccttggtccttatcgag

SEQ ID NO: 639762 - DNA, 595 bp, Homo sapiens
tgttccgaggtgacacagtgttgctgaatggaaagatgagacgagaagctgtttgcactcgtcgctttctgatgatacttgtactgatgagaagattcggagtgaagtagacgttgttcgtgaataagccttcgtgatacgcctagagggatgtcatcaagcagtccgaggccagtgcgccatagatgtggaagtactggcagaacgtctccatgtgcgtgcccattgatgacacagtggaaggcattcactggtaatctcttcgaggtataccttaatgccgtacttcctggaagcgtatcgacccatccggaaaggagacattttacttgtccgtggctgggatgcgtgctgtggagtacaaagtggtggaaacagatcctagcccttattgcattgttgctccagacacagtgatccactgcgaaggggagcctatcaaacgagaggatgaggaacgagtccttgaactgaagtagggtatgatgacattcggtggctgcaggaagcagctagctcagataaaggacgctggtggaactgcccctgagacatgctgccctctttaaagggccacattgggtggttgaaagcc

SEQ ID NO: 639763 - DNA, 831 bp, Homo sapiens
  misc_feature (238)..(238): n is a, c, g, or t
cccgggggccgactctatgggagggccgccccactctataggggaaatagggaacatacccctcccatttatacacagggccccgcaaaagagttttcgggccccaaagggagtccctcacaggagtccacgggattattctaccctcgagagctctcttgggtctcacagatgtaataacacgcgttttcttgggccccggaagtgacccccaaactgtcgcaccaaatgttcaganaccacggtctttcgtttgaaaagaaggttgttttaatgaggtttcgccaccccataccggccgcccttctctgtgccccctctttcccgcgagtgagtttcccgcgagaagattgaaggcttttcctcggccgccggagaaacccatgatcggccgctggtttgttgggggaaccactataactgaatgaatgttgcgcggttcacagcgagggtataccccacacctgaaagggtaatgttgcacctgcgcgtgtagaccacaaccgggcccgccaacccgcatctcctccagaggccagaggggccaaaataccctccacatttctgacccagacgtggcccctggacatccccctaagaggcctgtggccacatgtccctgctcttctccggtcctctgcaagaggccggagaggtgtaccggcaattcggcaaggcccccagggaccccgcacagccaccacccaaaccctacgtccgctccaagggcccggaagttcgagcgtgcccgaggcccgaccgggccaaccgaggcgtaccaaaaactaaacctggatcctacttttttatttaaaagatttttgctgacca

SEQ ID NO: 639764 - DNA, 315 bp, Homo sapiens
tcgctctgtaaccgaagacgtaatattttaatctttaaactttaccatcaaatctccttttaaagtgaattataaaactctcctttggtgtacctattggatggcacttttatagccaggtttaataggttaaggaaaaatacagtttcttagtcttcatgtcaactgaagatcaatttctttaagttccaaattataacgatatgacagaaaggctgtagatgaagtttattagggaaaatcacattcaaatagaatagggattacaaaaaaaatcagcgtaatgtgataggtatcaattggtcctgggcgatg

SEQ ID NO: 639765 - DNA, 341 bp, Homo sapiens
  misc_feature (29)..(29): n is a, c, g, or t
  misc_feature (44)..(44): n is a, c, g, or t
  misc_feature (56)..(56): n is a, c, g, or t
  misc_feature (123)..(123): n is a, c, g, or t
  misc_feature (126)..(126): n is a, c, g, or t
  misc_feature (131)..(131): n is a, c, g, or t
  misc_feature (139)..(139): n is a, c, g, or t
  misc_feature (147)..(147): n is a, c, g, or t
  misc_feature (149)..(149): n is a, c, g, or t
  misc_feature (156)..(156): n is a, c, g, or t
  misc_feature (159)..(159): n is a, c, g, or t
  misc_feature (179)..(179): n is a, c, g, or t
  misc_feature (190)..(190): n is a, c, g, or t
  misc_feature (206)..(206): n is a, c, g, or t
  misc_feature (228)..(229): n is a, c, g, or t
  misc_feature (238)..(238): n is a, c, g, or t
  misc_feature (241)..(242): n is a, c, g, or t
  misc_feature (248)..(248): n is a, c, g, or t
  misc_feature (264)..(264): n is a, c, g, or t
  misc_feature (266)..(266): n is a, c, g, or t
  misc_feature (272)..(272): n is a, c, g, or t
  misc_feature (293)..(294): n is a, c, g, or t
  misc_feature (302)..(302): n is a, c, g, or t
  misc_feature (304)..(304): n is a, c, g, or t
  misc_feature (335)..(335): n is a, c, g, or t
ggtacggtggggagggatggaggaaggtnagtttcagagcccgnaggacatggctnccggggagaaggattatgaggaggttggtgtggattcggttgaaggagagggtgaggaagaaggagnggnatacnaaagttanaacgtcgngnaggtgcngcntttacggggaagcgtattcngttttaaacgntgaaaagttgtggtcngatcggttaatttgtatgtagnngtgtatgcncgnntatacnattactgaccgatgcncnaaaacntgaatgctttgttacagaccnnagctgtcngnttctgtgatgggttttgaataaagtattccnggtcgt

SEQ ID NO: 639766 - DNA, 100 bp, Homo sapiens
aaggagagtaaaataattaatgagtcaaggtctcaggagagacagaaggctgtactaaagggagcacattgttgagaaggaccggttgcaaatttccaaa

SEQ ID NO: 639767 - DNA, 516 bp, Homo sapiens
ttcaggaacgcttccttcaccacttttcctggtacgctagtatttctcaaggagcagtaagagggctagtgagattgtcaccattatcacccacctcccaaatcagggctttttgacctcgaaagggtctgagattcggactctgtcggtctggtctgggaatctacactctaagttaaagtgtcccaatggattctgctgcaggggtccctgtttgacttgattccttcttcctgctcgcccctagcctgtttccctaccaccagccctgttcagtgaaagaagaacttgctttcttcataggtagagtaataaagatcagtattgttataactgaggcatgcgcggtgctctacaatttgcaaatcccttttatattgatgtatgggtcaacaaacatttattgagtgcccatacatgcctgtccctgtgctagaccctgaatgtggctgcaatttgtcctaaaaatgttcacacttaaataaaatatacttacaattgaaaaagtaaaaaaaa

SEQ ID NO: 639768 - DNA, 923 bp, Homo sapiens
tgcagctggtggtggtcaatcgtctgaccgaagaactcggctgtgatgagataattgcagtagagagtagcttagagtgctgttaagagagagggggagaactacttgaggagggacccaacgtttccgtatatcttatgggttcgagtacgaaatagttatggtgccatggatagagaacttgaccctatcattggaaaatttgttgttcacgaagtagaatcgacaataggagagtgtactgcagcagctgtgcaatcaatggaagagaaatgcagttcacaaggaaaaagacacataagagatatttgatgactcgtgtgaaatcaggttgattgaagaacgtgctaataacagctatgggttttgtactttggggaattggagtccagattgattttccgtatggcaatggaggaaaatatctttcatatcttgtttggggtgtacaaagatggttatgcaagagtaagtgcatgatcaatgaaacaaaactgcaattataaaaagcgcactgatactaatgatataatgagaaagcgaaatgtgtaccaaggtaggagacctatctttatgagttattggagctgaaaggtgaagacggaattggagaactctatggagtgattctagtatcaaggcacaagtgatcaaggtacatgatgagtgtacgataaagcgtggagtaaagtccaactatgtttccgtgtgccaagtatatgaagaactgtccaagagcatcggcacatttgggtgtcctgatcctgataagataacaggcctgggatctttagatcagaaaatccctgccataccatgttaaagggagaacaagaggaaaaaagggcgccgtcggcctagactacacaacgggcgggcaggagaaaaaggacagtaagggagggaaggttacaaaggggcgg

SEQ ID NO: 639769 - DNA, 168 bp, Homo sapiens
tatctgaggatcctcggctcccaggggcagtcaggcggctcttcaggagtgacgtccgggacctctccccaggccctgttcatgctgtctcggcctgtctgaggagcagttctcccgccctgtgggtttgttcctgggctctgacgtccagtcgtttcgcgtggcgtt

SEQ ID NO: 639770 - DNA, 325 bp, Homo sapiens
gattaaagagacgagatgggaaagttgctgagaacataaaagcctagaactttaggctagatacaaaattcacacagtgtaaaggcacggactctgggtgagactgggaagtgtcctcagccattcagcaccatgcgtgacgagctccgccccatggtgcccgtcaccccgcacaggatatgcctcacaaactgcttcatatgttgatacaacccattgcatgtcctcactgcccatgccaccatgcatctctgtctcattctacttgaggggatccatctatgagtcagaccatgcagtgcactgcaatgcttgtgcacttggc

SEQ ID NO: 639771 - DNA, 365 bp, Homo sapiens
  misc_feature (17)..(17): n is a, c, g, or t
  misc_feature (35)..(35): n is a, c, g, or t
  misc_feature (80)..(80): n is a, c, g, or t
  misc_feature (234)..(234): n is a, c, g, or t
  misc_feature (244)..(244): n is a, c, g, or t
  misc_feature (257)..(257): n is a, c, g, or t
  misc_feature (299)..(299): n is a, c, g, or t
  misc_feature (305)..(305): n is a, c, g, or t
  misc_feature (307)..(307): n is a, c, g, or t
  misc_feature (313)..(313): n is a, c, g, or t
  misc_feature (318)..(318): n is a, c, g, or t
acattcaacattacccncccgatacacctgtgacnatttatattttataagaccctgtttataaaataatttccttcaanacagaattgtattttgaatattatttacgtcaaagttgaggacaggaatgcatttatctatggctttctgtacttcaaggttgtaagcctcacagaatgaggacaggaaagcccctgatttccagtaaacattgacttcctcttatgtgctagncctagggatngaaaggtgagggnttccacaatttagcgaggtacacaaatgaaggaggagggacnaggggngngggggngaganaaatgctaagagtgatagtagaggttgattacaagtgctaaaggact

SEQ ID NO: 639772 - DNA, 134 bp, Homo sapiens
  misc_feature (6)..(6): n is a, c, g, or t
tcaggnacagggtcggtgtcggaggcgctgtcagccttcttctgggtatgaatcttgctggatcacgagaccaccttcaactccatcatgagtgtgacgtggacatcgcaatgactgtacgccaacactggtgc

SEQ ID NO: 639773 - DNA, 370 bp, Homo sapiens
gctcgacgaatatgctcgccttccacgagaagagttgctggtggcacctcagcgctcaactcttcgccgtcacgcagcacaacgagcacacgctcgctaacgacgtccgcaccaagcgcctccatcagtgccgagtctggacgcactgcaatggcttctgcgccaccgttcagcacgtccacagcctcgtcatacgacgtcgacacgtcacattctacgatggggcggacttggcaggcacttgtgaccccatggcaccagcaatggcgccgtgcactgaatagctgaagccagctcgtccttcaccgaccaggcttcaacgtttgtatctgcactatcccaagccggaacaaaaggtgtcgattgctgc

SEQ ID NO: 639774 - DNA, 339 bp, Homo sapiens
tagtccccatttgactcttcctcttcagtagttttttgtttttgtttttgctttaataattggagatttacaggaggtttcaaagaaatgtacaagagaagtccctttcacccttctcccaatcttaatgtttcacacaattaaagtatattatcaaaaccaagaaattgacattggtacaatccatagagcttatttggagctcaccagatacacatgctggcaatatttgggtatgcgcgtgtgtacctttatgcaattttatcacatgtattccttggataactaccaccacaaccaatatccacaacaattccattatcacaacactcctttggg

SEQ ID NO: 639775 - DNA, 431 bp, Homo sapiens
  misc_feature (17)..(17): n is a, c, g, or t
  misc_feature (32)..(32): n is a, c, g, or t
  misc_feature (48)..(48): n is a, c, g, or t
  misc_feature (65)..(65): n is a, c, g, or t
  misc_feature (79)..(79): n is a, c, g, or t
  misc_feature (347)..(347): n is a, c, g, or t
ttttgccattgaacccngaaaaaggagttgancccggaagtgccaagntgagagtcttctacctngccagtaccgaccntaggagcaaatcctttttctcccattttgacctctgtttcctcatctgtaaaatgagtataaagtaatgtgtgttttccataccttataatggaggtagggaagagggagaaataagtaactcttcaggatcaaagtagataatgaattaagaaatactaagctctaaaatgtcatatacatgaaatagattgatgcaaacatttgtgcaaacacaaagaatgtcctactctcagggaatgagactgaacattgaagaggaaaccagntggcgcggtggctaatgcctgtaattccagcactttgggaggccgaggtgggcagatcacaaggtcaggagatcgagaccatcc

SEQ ID NO: 639776 - DNA, 400 bp, Homo sapiens
cctacggtcaagcatggtggtggcagagtcatgctgtggtgatgctttccagcagcagggactgggagcctgagatccttgataaaaacctgttccagagcgctcaagacctcagactaggtccaaggttcaccttccaacaggacaacaaccctaagcacacagccaagacaagtctctgaatgtcattgagtggcccagccagagcccggacttgaacctgaacaaacatctctggagagacctgaaaatagctgtgcagcaacgctccccatccaacttgatagcgcttgagaggatctgcagagaagaaaaagaatgaactctcaaaatacaggtatgccaagcttgtagcgtcatacccaagaaggcttgatgctaaaatcactgccaaaggtgc

SEQ ID NO: 639777 - DNA, 1128 bp, Homo sapiens
ggctggtgcttcctcctttgttgtctattatcctctgtggtgtctcctttcctcgtgtgtgttgatgtgggacgtactgtgtcttgtcttttctggctgtctgttttttctgtcctccttcttcctcggtagtgggccatttattggagccttcctatgtcgaattcgtgcttggtctttccttgattcctcattggtagtgggccgtgcccttgttgtcgtgctttgtctgggggtctcctctgtgctgtcttttttggtgtttccctcggctgtgaggactgtcaatcttttgcttgttcctctttgtgtcatgccctgtggatttgcgcgcgtctggcgaaaccctattgatcgcctttgtgcattatcaggatgtctttgtgtgcaggtttctctgggtccttgcaattccggtatttgttatacgtttttttcatgatatgttggggctgcttccttgcttggtttggtttgtctttttctgggattccatgtgatgtatgaatgattaccacctcttgtctcaattggtgtcatgtcatagatgtgtctcgttgcttgccaaaggccctctcttctattctcttgagatgggacgtccggtccttgccctagcccactcatccccatcgttgggcatcatttgtcttggtcctgcgttctctttgtgagcctgtgactcggctggtatgctgatggctcgtctgctgctgatgctggagtgtaggaagagctcagattatgttataaggagggagctactctcaggctgcaagcagtgacagtgcccagggctactgatatgtctctcacagcttgtaaagtgtgagacagctgccttgtgtgggactaagaggcaagatttgttctcctgcccttccctttgtgacttgaagaaccctgacttgtgtctgcaaaggcacctgcatgtgtctgtgttcttgtaggcatatgtgaggaggtggggagaccaccccacccccatgtccaccatggagccgctcggtcaggagggaggtttgtgagaccgctgacgggctaagagctctatctaccgatggaactctttgatgggccgtggcctgtcggtttaatcaatagtacgggcacctatatattaattgg

SEQ ID NO: 639778 - DNA, 474 bp, Homo sapiens
  misc_feature (7)..(7): n is a, c, g, or t
  misc_feature (30)..(30): n is a, c, g, or t
tggtganaacgcaagttttgtcttcacaantatctcccacataattttatttgacagaataataaggtgattcagagcttgggaattatataaaaaccagtttctgtatctttttagtgaagacttatctgtgaaagcatcggagtcaaggtgtgcaatttgtcagatatcaactgcagcattagtgattgatcagtctggggacatgtgaaaggagagagagagaaagcagcagccaagagcacagcagtcagagggagggtctggctacactttgcagtttcacttttgaggtaggggacaaggcagcctttggcaagggagcatgacctagggtcagtgttgccatttgagaaacaagggaacaaaagaaatatggatatatagttctttcgagaacacatctagactatctcatccagtcttggaaacgttagtgttttttagcagacaatcagttggagtgaaccagag

SEQ ID NO: 639779 - DNA, 254 bp, Homo sapiens
  misc_feature (193)..(193): n is a, c, g, or t
gataaggcgaaggacagttggcatatgccgttaccaggctcaggcagaaggaacagagagcagcgagaaacttctagtaggagatccaagctgatgttaacatatgttgacgccctcctgttccctgggcgcctttcctttacacccaaatatgttatgtggactagatctaaacattggcaaattctcagtnctgtattcagctcatccgtggacatttagtgaacattccactggctgatcctcatttccta

SEQ ID NO: 639780 - DNA, 1452 bp, Homo sapiens
ctggtttacaaactcctgtagctcaagcagtactcccaactgggcctcccaaagtgctaggattacagacatgagccagtccactctcggcacagtaagctgacttctggccccatggccacgacgtccagccagcacaggccacaaaccccagtgctggttctccatccacagcacacagcaggggcacagagcccttcccgcagtttacctgtctgctctgcagtgggctccgccactggctagcactgcattctcatcagtcttgctcctctcagcagcaagccctcaggccatggcatctctcatcagcgcacacacactttctcgcactcctgccttcggcccatttctccatcctctttcctccatcactctctaggccaccacagcagcacgtgcaatctgctgcccatcagcaggcaccagctgttcggtagtcggtctcacgtgcagctcccaccaatctgctcagcttcccattgcggagatccacggatagtacgcttccttagcccatagctctccccaaccattcaggccctgctcgctccctatacatccggcctacctgcgcactcgcaaactcctagcgggcctcttcgcgcgcgtagcgtagtcgcacacgccagtcctcgcgcgcgctaccctatcgcgacactaccattggcctcctggatcccgcgtggagtcaccccagcacccgtcctcgccgtccccaaagccgccctcacctgctgccccacgcgctgccctgacgctgccgcgcgaccaccgcgccagagacaacgaacttcaccacgcgtctgcgcacccatggtgcactaccctggctggcgaacaactcactcggcggcactacacgccacacacctgcgcgcaacacccacgcgcacccttcgcccaccaccttccactcacgcgcctacaccacttcgaagcaccccacggcccaactactaccaacatcgacacttcacacgagccgcccacacggtgcactctactctgcccgggctcacaccgcgctagcacacactcccacaacctcggccccacccccccaccctgccccacgccacaccctgtcacacactcccatagtctggccactggtcaacccacaagcgccgacctatcatacactcacacacatcactcttacacccctgggcccacacacccccacccacctctgcccccagaacaccacgtctcacttatccacagcccgcacccacgcacacgcacgccgacacaccaccgcgcccaccacctcttgacaacagccgacacaaatccggccccacatacgccacaccaccacaccaccgaccccccggaggacgccacacgccactccgtagattccaccactttcgtacactgccaccacactcccgataccccgctactcaatactcacccaagacaccacactgacgctacccc

SEQ ID NO: 639781 - DNA, 1092 bp, Homo sapiens
tctgcttcgggcttccacctcattattattcgcatattgcccacttctgatttcagccagatcgccaagaatcatgaaagtcagccagatggaagcaccgccaccgcacgccgcgggccccagctgcgcgctgaaggccggcaagacagcgagctggtgcgggcgaggtggtgcgctgtactgtcatgagcagagcgatggacatcatcgcgcatgcgccaggtgtggacagccaggggcagcggccatgacatgcaccttgctggcacagcagcagacagggtaaacgatgcatgctcatacgaccagtgaacggctgattactcaccgcctcaccggcagctgggtgcccacacctgaccccagaaacctgcaacgggtgacgcaaggtgcgagacttctcacagccacgatcatcgacctacatcaagggaaccattcagatcaggcagctgacactcgcgactccgacagtggcaccccacggaggcgccgagggctgaccggatccgggcatccgcatccagcaccctcaaacggccgagatcaagagcaccttcacggcacgaaggcgaccactgcggtacctgcaggacgaaccgcatcttgatgtccgactgaagacgcactccacccagggcacccgggcggacacccacaggcaaatccacggggggacacagacggaacttaccgtgactctgatgaggtcataccccaaaccgacgcatcgcccggactctgcagggcaaacacacgcaccgactcgggacgcgcccactggagacccctttaacctggcatcccagcccatgggaggttgcaggcctgcacggcacactgggacgaggatgaaggtgacgctccacttattcttaccacacccataacccagatcaccatgagaacctcacgcgcaggggctacggcacttcccaaccggaggttgatatcccaatcatttctggcacaacggcgagcacgttctgtccacacaaagtggaccaagggtgtgggggggatcctcaacattatctgccggacaacttgtctagggatcgggccatctcgaggggacacccatgctgacaa

SEQ ID NO: 639782 - DNA, 121 bp, Homo sapiens
  misc_feature (63)..(63): n is a, c, g, or t
aacttgggtggggtcacacgggcttattccgcgtgaagcccgggagatgtagccatgctcgtnctgccgctcctcgtgcttgcgggtgatctccacatgccatccttggtcttgaccgtca

SEQ ID NO: 639783 - DNA, 306 bp, Homo sapiens
tcgaccagtgagatatgatcacacctctgcatggcacctgggcgacagagggagtccttgtctcttaaaacaacaacagaaatgtaacaaagtatgggaagggtcaagtttttttcttcactttctttacaccaattaagaacttgatatgggccgggtgtggtggctcatgcctgtaatcccagcactttgggaggccaaggcaggtgaatcactttagcccaggagttcaagaccagcctgggcaacatagtgtaaccccgtctctactaaaatccacaaaaaaaaaaagtcgacggggccgcg

SEQ ID NO: 639784 - DNA, 105 bp, Homo sapiens
ctacaggaactactaccgaaccactgagccagagaagacagtcctaacggaatccaaggggctcaacagcataactgggcacccaaaaacctaggtccacgcccg

SEQ ID NO: 639785 - DNA, 398 bp, Homo sapiens
actctagagtatcccgtgatgttatcccaacactactaaaaatacaaaattagccaggcatggtggtgggcacctgtaataccagctacttgggaggctgaggcaagagaatcgcttgaacttaggaggcggaggttgcagtgagccgagatcacaccactgcactccagcctgtgagacagagtgagactctgtctcaaaaaataaacaaataaataaacaatatctttggggaatgttttagcctccaaattaagttcacgaactgagtgtgccaagggcgaggagagaggatcacttgaggtgaggaattcgagaccagcctgaccaacatggtgaaaccccatctctattaaaatacaaaaattagcagggtgtggtgttgggcgataacatca

SEQ ID NO: 639786 - DNA, 1140 bp, Homo sapiens
ggacatgtttattgccttttctcagctgagctagacctccgttagagatgtatctcacgcaaggaatagacagctcttaggcactggtcgactctagcagcatatgcagcgttaaggtcgcttgctggctgggccagactaggccgtggcctagtgcttgccgttagatcagtgtcccagggaccccgtgacatgggcgtagacctggtgcatctccctcggtagcgtccatcgaagatacctcgaggacctatacgacttgtgggattagtctagtttgactgtcggaggttccaggaaagtctatgttcacttagaaaccgcccgtggcatggctcattgcacccacgagtatcactggctgggccttcttttcctacgaccttgggaggtctagtgggctcctagtctctcacgaggccagcgcctgccctttggttgccctgcgcgtaaagggcgctgacgcgcattgcggtgtgcgccccagggcagaatggtcccaggggccttgcttgcgggtccctggtgctgggaagttccttggtggggcactgcgagtgggatacatgtgcaggtgttgggccgtgtcctgtggtgtacctgagggctacctcctctttggcgacctggtttggcttgtgccccctgggtgccctcgttgtgtagcccgtattaccccgttggcacccttttcttcgcctttgcgccgtgtctttgcttccccgctttttgggggcggcttagcactcgcgttatgcgtcgcgcgctttccccttgggtctctgtgggttggcacgtaagtgtttctctctttccagggggggggtgcgcgctcgttccttggtcaccgttgtgataagcttccttcggggttgtagtacgtttgtccgtcaggcgggggcatttgtcgtggaggtcgcctcaagcctcgaatagaattgggcatctgagtgcggcgataagtttccacggtcgcgatgggcgagaagtcttgttcgttccacttgtggtcgagacacgcgtgtgcggtagagtggcctatgggctgcattagggcacagttacagaggcggtttggccataacgcccttgcaagtcgcctgagcccggtttcaaggggagctgagtctggggcgatcc

SEQ ID NO: 639787 - DNA, 728 bp, Homo sapiens
  misc_feature (565)..(566): n is a, c, g, or t
  misc_feature (568)..(569): n is a, c, g, or t
  misc_feature (712)..(712): n is a, c, g, or t
ggatggagccaacctcacatggctgttataaacattgaattgacatactataaacactataaatatacatgtaaaggtcttggaacagtccttagcacataataagcattctttatgcattcgccattatactgttcctactaccaggaagggaatggatatggcccctgccttcaagtaatggagaagaaacaagcaaattcaatgcactgtaccaggagctgagctactgagtcacgaatgggggttgttccgggggcatattccatggctggttgaaaggggtggctcgggtggtttcccagaaggagacgataccttagctaataagtatatttgaattgtcactggagttagtgattccctctccccccgccaccatacttttcaaaaaatgtaagtgtggaagctttgaaaatgatttgatatgtaaatttgtgttcattttcagcaaatgcttttaggaacagatctgttaagatgaggtccatctgtatttgcccaatactgtggataacattgtttctgttatctgttcctgcgtgctatgtagcaaactgcaccnnannttcgtagcttaaaacaattatttattttgctcaggatttagtgggttccagagtctggggagggtttggcggtgcagttcctgcctgatccacatgggggcggccggagctggaggatcctcttcaaaggatggcttcttctncaacctgcttcctggc

SEQ ID NO: 639788 - DNA, 158 bp, Homo sapiens
cacctgcacatgaaaaatcataaaaaatatctaagtacactgtacaaagaaactgacaccaatatgcttacttccatagagaagtgactgcttcaacagctgtgtgtttgggtaaaagttctgaaagtatgcttatttttaaagtaattaggctttaa

SEQ ID NO: 639789 - DNA, 340 bp, Homo sapiens
cgctatcgtacggcatataggaggaaaggcgctcttagaggtacttgttggttagtgcttctgcctctggacgccgcagtgcatgtggctatccccagcacccagctcctgaagcaccaggcggatcagcagatgacctatggcaccctccagccctcagaagttgcgtaggagacacagcgcctccactgaggcacctctctgggaataacgttccccagcaccccaaatggattaccagtcaattcagaagcattttaccagtgaagccctcattattccagttcactgttaaagccagtaattctctatattaaactttccctgttcggtttatact

SEQ ID NO: 639790 - DNA, 553 bp, Homo sapiens
ctgcactgcagaattttacatctacctactggttaccaggttgtcccctgaacaaccttcctttgtgttttactgttattaaagtagtaatatttgtattcaaccatgtagtaatattttaagccactaaaggaatagttttacttatttagacaacagcaatttctactacatttttataagcttaaaacttacatgttttaaaacttaaaacgataaagacaataacaacattgatggagtatgatatgacagttcagaaagggttagctcttatcttccagtcgaggaaacctattgtatacaatagctggaggaatgtatgatcaaagaggccgggaaccgccgtgtaggatcgtacggctgtaacaggtataattgtttcattaatttgtcacagtcttactgtagaggaatgtaaaggcggaatctgcgtcattcctctggaaaccacagtgttgactctgtgaatctgtacgatatctttaaagtagtaactacgtagtcaaatgtgttcttgacgttgttcataactttgaataaaccatttttc

SEQ ID NO: 639791 - DNA, 623 bp, Homo sapiens
agctaccctaaccggccaaccaactcgtaaagccgccaaccaacgaatacctgctgttgaaaatgagctcgcactaccagtgcgacgtagctctcgtaaaggactccgccgacaaaaccggtagaaatgccgttataacgaagggaaatgaggagtaaaaagcctcggggtgtcaaagaaacacctagaaagcatggtaaaatacctagtaggactgtcggtcgtacaagtactaacgtctgttgtacctctgttaattaacctgaccctccttcgaacgccgcctaccgtagtacgaagactgcgcctttagttagtaattctatgtaatggaacaaagggaatcttgtcggtgtgactgttgccatgggcgcttagtccacgagtgatcctacgaacaactaggccaaaattagaagtactaaaagaactccgcacacttaattagcctaaaatgacaggtttccgtcgttagtctcgattcgatcgaataacatgccggccacgtattagattgacactgctcctttacctactactgattataaacggtgtaagacaaaccaagatcctacgaaaattacttagttaccttagcttccatcctagaatgggcaggtaaa

SEQ ID NO: 639792 - DNA, 754 bp, Homo sapiens
gagccccgggccccaaagctgcacaaggtcattggagcccaaggagcatccatgccaatgtgcgaactggtcttgctccacaccatgacactgcctggaccagccggggaactgatgatcagactaccctgggagacgtcaaggcgcaatggcaacgggggtttccgtggctgctggcatgggggagacgttcgtaggtgaaggggacatgggacaggacctgggggtgttgcagcgtgggatctatgtacttgctgggtcaccaggcctcgtagacagatgtccatgatcagcactgagtgtggcagctcgccaatgtgctttacgagcatggcttcgataccccggctgtatgtggcaggctggactgtcacgcgtgagccacttatatgtgatgggactggcgagctgccatgagcattgtgcagaccctgtctctaataagatgggcttattcccttggagatccgtttcctgcagaacccagacgctgcccaaggcttcgtgggctgcagcactccagtccaccatccagacgcttctacaagaacgagggaggtacatggtcagaggagaaggtgatccaggtgccccccaagaaagtgaagggctggctgctgccgaaatgccaggcctgatcaccgacatccgtgctctccctggacgaccgtttcctctacttcatgcaactgggctgcatggggacttgagggagtatgaccatctctgacccaagagaccccggttcaccaga

SEQ ID NO: 639793 - DNA, 751 bp, Homo sapiens
ctgtcgcctgggccccgccgagcggagctatgcgccgcgcgcagagcacactgctcgcgctccagctcccctccgtgcgcggttcatgactgtgtcccctgaccgcaggcctctggcgagcccccgccgcaggagcatcgggccgctccccgcctgccgcgatgggccctcgagcgaaggaaggacagggatgtgcgcgcttgtgctgcacccgttcggaggcgcctgcgtacactcctcctgtcgtcgtctgctctggtgtgcccatgcctgctgggtaccatgctgtccgcgcgctgcgcaccgcctgctctaggccccacttgactgcctgtgtgtaggtgcgggtgtcccctgcgtcggcgggccaccgtaccacaggccccaggtttctaattaacgtgaccgtgacccaaaggtgcagatgctcccactgtgtccacggacttcataccctgaaactgcatctggtgcctctgactggcgagtggtcctacgagatccatgtgtgagtaccagcgagccaagtgccgagacccggaccctgggcgtggggcatcgaggtagatgcaaacgatgctggtcgaggagcaagtgtcgccatgtgagcggtgctcagagcccttggaagcgaagccaaagaaagcctcaggaagctgaagtttgtgccccatagtgtggccgaggaatggctaccctttgacccatgtgccactgccataggttcacaactgggtactgatagagtgct

SEQ ID NO: 639794 - DNA, 270 bp, Homo sapiens
aaaaatagcggggcatgggggcatcgccggtagttccagttactcaggaggccgaggtgggagaaatcacttgagcccaggaggcgaaggtggcaacgagccgagtattatgccacgtgccctccaacgcctggcgagacagacgaaaaattccctctagaaaaaaaaacgaaaaggaaaaagaaccacataattggtcattttacttcgtgtctcctttttttttaaattaaaaaaatcaatatacatcacatgagaaaggggctttgg

SEQ ID NO: 639795 - DNA, 135 bp, Homo sapiens
cacgtggtgattacccgcttatttttttgttctggggaggacagcgcgtatgagactcctacgtctgtcagcggcaagaagagcactggcagtcctagccaggagacacaggcaccgtatatcgcgaagagggtg

SEQ ID NO: 639796 - DNA, 258 bp, Homo sapiens
attagacatagactagaatgattgcatccctgtgttccgtagacaggatctccgacattagaatcataaggctttgtttaaggatcgcttaagatgtttttcagaccacgagttccggtgaaacagtggagttcaaccagtttgaagaccccccacagaggaatgggatgagcatgagaatgtagtttcttcatctccttgtaccacgatttcaccagcactctcccaccaatcagtcaactccattacccttacaaa

SEQ ID NO: 639797 - DNA, 955 bp, Homo sapiens
gacaaaggaggccgtctgcctccttggtcctgatggggagtgagcaccttcgtcgccatgtgttcctcccccagtccaagcctctctcatctggggaatctggtcagaagtcactcgcagtcccgtcagcccagaagacgtaagagcagggctaccagcaaatttgtgagaactttgcaacaaaacagttgtgcaaggggaacagtgaggcttcctaattgtcatagcaagattgccattcacgagaagagcatttgggggggaaatcctggttgcttgttgggcctcctagaaaaactgaatgtgctgacggacatgcatcaggaacaattgtgcaagggagatgaacctctcttgaaaagttgtttcatccgaaaaatgtggcacccgggaaagaacaatctttggccacaaagttccctgtttgactgagatggtttacacccaggcgagtgaggtcccactctgtgggcccagtgccacccttgttttctggaggcttgtgtggttcacaaaattaaaaaacatgaatagcacggctcacgttggtacactctggagtgggagaccctaaggggcccagaacgagcacagaggcccggatcggtactgtgattggccttcttttatccagccaacccccaaggacttcccatggaagtagaggccttgcataacgactggcataggaacaaagtggcccaggacatcggtaatctccagataccaaaagtcctcgcggcccagggacgtaacacagggcgttcggagaaccgaacgtgaaccggaacctcgcggcagtcgacccacggacgggagggaatctaccctaagagaccgggggagcccacttgcgttatcaacttgcccggggggggaaccaggaggcgcacgttccaatgcccagtgacaaagtccgccggaagcctcaagaagggggcacaccggcgcacaa

SEQ ID NO: 639798 - DNA, 349 bp, Homo sapiens
gcttatcgataccgactacctcgcgttcttatcctttctatttacacacatattgaattctgttccagccccgaagactaggacggacctaaagttcacaaatgggaatgaagattgctaataatcaaagccattactgaagccccctcctttagcaatgaatactgaactgatttatacatatgaggcttaggaaggcggcgacaacaggaaccttggggactctgttccatggcaagagcccaagacttctaccaatttcatgctctttgcttccctgtagagagctggaacatgatgaggacagatgagagagaagagatactaagtgcaatacaggcagggaggg

SEQ ID NO: 639799 - DNA, 102 bp, Homo sapiens
gtttctgcctttccatttgttaaatgggggcccccttttccttagctctgtttttgagttactggggggaaataagcttataaatgaaaaactttttttcca

SEQ ID NO: 639800 - DNA, 225 bp, Homo sapiens
tacgcgttgctctacgaggatccccgagcgcatctgtgcctcccaggtttaagcgatcctcccgcctcagtcccctgagtagctgggactaccagcgtgtgccacacgcctgcgtaattttgtatttttacgtagcgagagggtttcacatttgtgtgggccatgtctcaacactcctggactcaacgggctccatccacctgtggcctcccagacgtgctacgg

SEQ ID NO: 639801 - DNA, 514 bp, Homo sapiens
gactccagactcattacatgccaccaagccagctattaacagctgctcctactacataagatgctctccttcccatccagtatagttttagataatagtacgcgatctcgtatgcgttttgtatactccacttgagctcttgacagaaggaggttcatggctcagtcttaggcactggttcgagaggtggagacggaggaggagagtgatgatggtgactcagcttcataagccccaggagagtctggaacgacttcatcttcactgctatcagattcaggacgttcgattcttctcctcttgttcctcatgtttgcagtttcctttgtctcatcatcagatcctgctactcgcttccccctttgttgtttccttctgcagcaccttaacaggctctgcttttcttcttctttcagtgcgggtcgtggagtcctcattgtcttaagatcattcatagcaggttttccagaaaagttgtgcgtcatattcccttacctggtgcctgttgctgctg

SEQ ID NO: 639802 - DNA, 467 bp, Homo sapiens
  misc_feature (418)..(418): n is a, c, g, or t
  misc_feature (429)..(429): n is a, c, g, or t
ccaaactaatataaatgattgaatgggaacaaatctcttgtgcagaagaatttcaaataatttatgtagatactccccacttagtggctctgcatagtgacttccttgcagagtataatatggaaaggggggaaaagagtaactttacagtggagaaatctgacagacaccagctcagccaggtgattgaggttaacatcatccatgataagcccttttgatagcatgtatccttgatagcatcacatcatacagaatgtgataagaatggcactttacctctgtggtcctcctccccagaactcagaacccaagtctgatcaggagaaaaacatcacacaaattccaattgagaagcattctttaaaatacctaaccagtacttctcaaaactatcaaggccataaaaaaccaaggnaaatcctgagnccatgggtcaccagccaaggaggaggcctgggaaggcc

SEQ ID NO: 639803 - DNA, 352 bp, Homo sapiens
  misc_feature (167)..(167): n is a, c, g, or t
aaatggggttttttccggggcctgcaaaaccaaggcctccaattggaattacaatttgatacaaccaaggaaggttttttcccttccgaaaacttttccttccccctggctggttttggggcctttttcctaaggggaaaatttttttcccccttaaatgggttttntgcccaattacttgtcaagggcaaaattttggtttttttcttttgccccgtgttggggctttttttaaccaaaaataaaaggaaagggttccaaaaacgttttggggtttttttttttgggtggaaccggtttttggttcaaaaaaaaaggctatttttccattaattttttgaatttttcagga

SEQ ID NO: 639804 - DNA, 800 bp, Homo sapiens
tgctggtacgtgcaaaagtagccgacaggccagagtttccacgttttcggtggcttcgtaggcttgtagcttctgaaatccgctaagaagcggcggtctcattcatcttcaagtacctagcctgactggtagggctgctcagacacttccgaaacatttcgaacctggggagggcgggcggcggtgaaacgaactactttctgtagagagtgccccatcggcgtcgcccctgctttgaaggctttactgtattagacggaatgcctgatacatttgtgtcctacttgctgacagcgcacaggatccttctaacagtatttctcaagtacgtgtaacacaagagagatgaacacttgaagtccaagccgtgctgcgtgattccgtctcgacaggttctaaacgagcgtgtccagaaactctgtaagccttctcaaaactgtacatttcaaagatcctgtgcgtttatcttcatttggctgggcatgaaagccaagagtactggactgcctggttcagggctgaacagcctagtacacctgctaacttggagcttcagagccatggcaacgcaaggagtcaagagacgccaaagcacagttggccctctcctcatcggccaatcagagcaaggaagtgcctgaaaagccaaagtatgctctcaaatgtactcttgtgggacacacggaagcagtgtcatcagttaagtatagtcctaattggaccaatggctagcaagttcttctgctgataggctaagtcatacacttgcggaccctactgatgcgccacgtatgcagaca

SEQ ID NO: 639805 - DNA, 106 bp, Homo sapiens
tgacacccatcgaacgggtgggcctgcaaatagcatccggtcaatctggtgttacctggcatagggaggctctgcatagcaccggctatagcggtgtcatgtcggg

SEQ ID NO: 639806 - DNA, 348 bp, Homo sapiens
  misc_feature (6)..(6): n is a, c, g, or t
  misc_feature (19)..(19): n is a, c, g, or t
  misc_feature (34)..(34): n is a, c, g, or t
  misc_feature (195)..(195): n is a, c, g, or t
ttttcncccaagaaacacnagtacccttgagganaaacaactggctcttagccacagctctggaacaactgctctgcgccaacacctggcccacccaagtggtccccaagcagtaggggctctgcagggggagctgaccattgcagtgaccagatggcaccagagggaatgtgacggggaaatatccaggtgganctaatgcctgccgtgataagttggcctcttccttttgttcttcaggcctaccggtggcagctgctccctctaatttttcccttgctggttcctatttctgttattcatctgtcacctgtgtaatcaagttcttgaattaaattctgtctgtca

SEQ ID NO: 639807 - DNA, 86 bp, Homo sapiens
  misc_feature (59)..(60): n is a, c, g, or t
agcttttctgtcttttggccagtgccgagtggaatgcctggtttaagaggagggactgnnttcagctgtggtactttgttgtaaaa

SEQ ID NO: 639808 - DNA, 107 bp, Homo sapiens
ggatttgctggtgcagtacaactaggcttaatagggacatgcaaagaacaagagaagacctcagatgtgaagtccattaaagcttcaatatccgtacattccccaca

SEQ ID NO: 639809 - DNA, 139 bp, Homo sapiens
cccctttaggggttttggcccccggggcccaaaatttgggtcccccccccgggggggggtttttcctcccccccccgggggtcaagccctttttcctgccccccataaacccccctttaattttttttttttttttcca

SEQ ID NO: 639810 - DNA, 775 bp, Homo sapiens
  misc_feature (363)..(363): n is a, c, g, or t
tgggggttttttttttaacccctctttagtttattgcgctcaaaaaccaatttaaacccccccccatgtgtaacgggggggcggggacaaaagcaaaaaggcagaaagccggttgggaaaccacaaggtttggcccccgggcaatttttggcctggttgggatttgggtgtttcaatcctggtccctggtgggtctgggggtgagagtgagagggtgtggagacgcctccgggggggagcattgcgccattggacgccccttgggaagaatttcaagagggggatggggggcagaagggccactggtccgggcctgggcttctggggagacagtggtgttggctccccaaaatgtctctgagnggcgggagggggggtttagggggacaggggctctctctcacgggttgtcagaaagggggtcgctcagagaggcccaggagagggggcgccccctgagcgttgggcctaagaggttgagcgccgagaaagtggaaaggggggcctagcaggttgggtgtacacacgagggagggtcccataaaggtcgggggacaggggggaccgactattccacgccacattggagaggaaaccctctcgtctttagcccctggggggacattttggcgccgcccttaaagaaacctgggcttggtttctcccaggaaggctccgaaaatccgtgcgggaacctctggcgggccaaggctgcggtcgcagagcccgacacaagaaggacgacacaggggcatcagaccccaaagaccacgat

SEQ ID NO: 639811 - DNA, 177 bp, Homo sapiens
gcctcacctgaggtattacatagtttcttttaaacctttccggcagtcaagaactggtttcatctagctctgactttctcttgctagccagatacctaggcagaacctatgacagaaaatgacctagttcatgttaattatcttgcctagatcaataccagttgtaacagtgctggt

SEQ ID NO: 639812 - DNA, 227 bp, Homo sapiens
ccgaggatctcttttcagatttcgttctgcacagagttaaggcgagggcgagaaaagtggaaagagaaatcagagaggatacctggttctacaccaaccctggagcttcctgcgccggaggagacagtgaaccagacgaggacaggatacgactgcgggagtcccagcccctgcatgagaagctaccaaggttagctgctacccttagcctggcggggaggcctcgg

SEQ ID NO: 639813 - DNA, 130 bp, Homo sapiens
ccccccccccggggtttttttttcggcccccagggggtgtgtttttttttttggggggggggaccccctttaaaccccccccccccttttttgggggggggttttttttttttgggggggggttttttta

SEQ ID NO: 639814 - DNA, 409 bp, Homo sapiens
tgacggataagctgtatcacttgcctgctacagctggcttttaaagcctataaactctccttaccattccctcatttcacctgtcctaaaggcagacaaggcttacaagttagttcagaatctgcgccttatcaaccaaattgttttgcctatccaccccgtggtgccaaacccatatactctcctatcctcaatacctccctctactacctgttattctgttctagatctcaaacatgctttctctactattcctttgcacccttcgtcccagcctctctttgccttcacttagactgaccctgacacccattaggctcagcacattacccgggctgtactgccgcaaggcttcacagacagcccgcattacttcagtcaagcccaaatttcatcctcatccgttggt

SEQ ID NO: 639815 - DNA, 151 bp, Homo sapiens
cctaccggcaacgcaaggcggaccagtaaccactccaacgggctgaggaactacccaggcttactgaaccagatcaacatgaactaggtccaaccacatgtatgtgtagtgggtcggtatttaaccaatgacacatgattcataagttggt

SEQ ID NO: 639816 - DNA, 1079 bp, Homo sapiens
ggcgagggccgaccgctcccttcctgccactgccgacctactggacgctgccctgcatgctgcccagccactccaggaggaagtcgggaggcgtggagggtgaccacaccttggacttctgggaacatctcctttgtgtggctgacccacctgccgcatgctccctcctctcctacccactggtctgcttaaagcttccctctcagctgctgggacgatcgcccaggctggagctggccccgacttggtggcctgggatctggcacactccctctccttggggtgagggacagagacccacgctgttgacatcagcctgcttcttcccctctgcggctttcactgctgagtatctgtactccctgggaagcctgtgccagacaactttgagccttggaccacactgaggcattaggcctctctgcctgggatgggctcccaacactcccctgagagatggcctggattcacagaccctctatgtaaccattaagagagctcaaagcccttcctaccgtctggttgatggataccacaggaaacaaagcatctttcacccaagatgggtggaacacaaccttgctgggacattggatcccagagagcttaatctcttcaagtgtggagagggcagggtccaccgccctctgctgtagacttattgaaattaactacttgaaaacttcactggattggaggacgcagacatttctcattcagcatgaggattacccatgggtcatcataggcaaggtccaacttgattagagatggagaaatatatccagcatcttaactaaggagacacaacgattcacgtcgcccaggctggaagtcaatagcacaaccatgacactggagaatatatcccacagtgaagtgaatatcacccaaagacaccaaaattaccagaatcaagcacgcacacaaactgacaaattgatataaaacacactttacaagtcaagaatcaactggacagaaacaacacacgcacaatgaatagtgcaactaccccacttgagattcaactcaacgactcacaaccacacaaacggcgcggcacctctcctcctccc

SEQ ID NO: 639817 - DNA, 144 bp, Homo sapiens
tattccagatggcagaatctgaggatctcagattattgcatctgaagattattatacaggatgatcagttattttgttcaaagacacaggctaggattctgccaggaatattctatcaggaatggttagctctatttggaatga

SEQ ID NO: 639818 - DNA, 819 bp, Homo sapiens
  misc_feature (74)..(74): n is a, c, g, or t
  misc_feature (189)..(189): n is a, c, g, or t
  misc_feature (640)..(640): n is a, c, g, or t
  misc_feature (675)..(675): n is a, c, g, or t
  misc_feature (680)..(680): n is a, c, g, or t
  misc_feature (751)..(751): n is a, c, g, or t
  misc_feature (767)..(767): n is a, c, g, or t
  misc_feature (774)..(775): n is a, c, g, or t
  misc_feature (779)..(779): n is a, c, g, or t
gcgggagggggcgtatcgtgcaggctccgactccggggctggcgccggggtccgggccgaggggaacccgcgancggacttgtgggggagaatgaggatgaaaacgtggagcttccattgtctagggtttgaccggccgacagggatttcgacgggggaccggggatctggggagggggtcgcactttntcgcctctttcgcggcttcccggcttctgcttgcttccctgaccgttcccaggtgcgcggcggcgacgtgtctgctccaggcggcgggggggatggggggtggaggaagttcagccccaagccgcccgcctttctccagctgattcctgcgggaaccggggcggcgggaccctgcctctctccagaaggccccgggaacgctggcgcggggccctgaacccacgatcgtttgagcgcctgctgtgcgcctccgccgcgagtcgcagggcccgagataaacaatgggtctgaaaaaggagggagtttcaccatcctctctgcatcatcctcctggctgtccctcgggacagatggtggcaccgccagggtctggggacagatttggattctggtcccatatcatgccacccacaggcttcatgacttggtatttgctctctaggagcttttntcccatctgcgagtaggactgataagaatcccganccccnagagtagcaggagggtcccaggagtaaatctcaggcgtggagcctggcgctttgtaaataatcaattgtgntgttgttttttgttgntttgttnntagnctccatctcaagaaaaaataaaataaagttgttctctgaa

SEQ ID NO: 639819 - DNA, 754 bp, Homo sapiens
ggatatttttctcaagtataaaaatggagaccattacacctcaagggaagtgagtatgccttgttatgggttttatcagaaacccgtgcgtcattaaggctgctttccaaagactgggttcacctagaccttctttactgttcaatggcatttttgccaagcatcagaaattgataccgtaattcaccatacatctgctggagtgatacatttgtgatgaaactcccctaattcattctttgaattgctgactctttccccttaataaacctttcattcatacagccctttgctgttcatatcttttataagtttggaacttaaagaaatttatcttcagtttgacatgaagactaagaaactgtatttttcctgaacaataaaacgtggctataaaatagtgcccaacccaaataggacacaaaaggagagttttataattcactttaaaaggagatttgatggtatatagtttaaagattaaaaatattttgttcttcatattgacagagcgatgaccccacagtatctgcctcacggtggaaaataccaagttcttggagattactctttggcagtggtctgtccccctgcactctttcatgatctaatttctgttttataccttataccctaaacacttactaccaacacagctgttaaacattctatacgacaacaattgtatgatctggtattaggaaattacagttcaactagtaaatatcaaagaaaaaaggataagttaactccc

SEQ ID NO: 639820 - DNA, 352 bp, Homo sapiens
gttggggtaaacccctctttaaaaaaataatgcttcgaaaagtaaagcaaaatcttttcccaaaataattctttcccttttcaaattgttctgtccccgagccagtgtaataaacaagtgaaagaatcccattttgtaggcttaaaaaatgccaaattattcctttttcgcttgcccttaatttgagtggaaaaagctaaggaaaataaatgcctcagaaattccaaaaaaaggtcggtttttgagaaaaagagaataaggccctttcgatagtttaacccatacttttttttaatattttaatgccagtggtataaaaaaaatatgaataaatgcctttcccagtacccta

SEQ ID NO: 639821 - DNA, 149 bp, Homo sapiens
ccacatttgcaggatggtagaattaattacaacatataaactagtaacctgttaatctttagtcagcgcagcaagatttttataatggacaaactgcttattcagacagtgatcacgagcacaactcaaagtgcagagcaatgaaggat

SEQ ID NO: 639822 - DNA, 174 bp, Homo sapiens
actcagtgatgtatttcattctgagatggagactcgttctatgcccaggctggagtgcagtggtgtgatctctgctccccgcaacctctacctcctgggtacaacgcgattctctctctctcacgcctcccacagtagctagggactacaggcggtaccgacgctcgcacttcg

SEQ ID NO: 639823 - DNA, 216 bp, Homo sapiens
  misc_feature (10)..(10): n is a, c, g, or t
  misc_feature (14)..(15): n is a, c, g, or t
gcaatccganttcnngcgccccccccccccccccccgccccccacccccccgttatgggctctctgagggtttttatgcctttgacaagaaatcagtggatactggatttgctcctgtcaatgaagttttaaaggctgtaccaatcctctaatatgaaatgtggaaaagaatgaagagcaccagtaaaagaaatatctagcgaaaaaacaggaagc

SEQ ID NO: 639824 - DNA, 479 bp, Homo sapiens
  misc_feature (2)..(4): n is a, c, g, or t
  misc_feature (241)..(241): n is a, c, g, or t
  misc_feature (272)..(272): n is a, c, g, or t
  misc_feature (309)..(309): n is a, c, g, or t
  misc_feature (348)..(348): n is a, c, g, or t
  misc_feature (409)..(409): n is a, c, g, or t
  misc_feature (411)..(411): n is a, c, g, or t
  misc_feature (437)..(437): n is a, c, g, or t
tnnncgggtggggttgacctggcgtttgcgcagcggtgagaacgcgttgaatcatgtcaatggatcactgacaaggactactgaaacttcccacgtaacagccggacaagctctacagatctctccttaaaacctctgcaaagtccttcgcctgattacacagtgcgagggattgcagatggttttctttgttaaagcccagggttttggggctgtcgcttgaacacggccattggcaggntggccctgaccccaatggatgccaagacggncgatgttgaaaccgtcttgcgcgactttagagagtgnctgaacacctttgacgactgggctgcgagcttctggagnttttcggcgctggattgtcgagcaggtgttcaaggtcggcgacgaggttggcgctggtcgngnccaccaaccgcggccattttcccagnagacttgttgctacctgccaggccaacggacgtgccccgggt

SEQ ID NO: 639825 - DNA, 446 bp, Homo sapiens
  misc_feature (432)..(432): n is a, c, g, or t
gcggccgcctactactactaaattcgcggccgcgtcgacgactgttccaattgacttttgtcacaagagaacctcttttcatgacaaccaaagagtaatgtggctgaggtgttaaagagcagcctgggacgttggtgaagggtgactcctcccccgtttttgggcgtggtggaaacagtgaggaaatcgccagagaaagtcgtcgctctcactgcagagattatggaacttttggcgaaggaggcgcagtcacagtacattcccgcaagcaaaggaacaacgggctatattcgccctacttcctattgccaaaatagacgggggggtgaggccaatactggatctacacattctcaacgagagtgtagccacaaagggccctttcgaatgcttacgacaaagcatctgctggaatgtgtccacaacagactnttgtataaaaggtc

SEQ ID NO: 639826 - DNA, 1011 bp, Homo sapiens
agacagatgaggcgagaggaggaggaggaggaggagaaggctctgggctcctctgaaaaaaaaaaaaaaaaaaaaaaaaaaaaattttggggcgccgggcagaaaaattttctaagcaccatttcgtgtgtggggcggggcgccaagttaggttatgtagaccagttggcccataggttggtgccaaaggagagaatcgtgggccaatgcgattagggtcgtctgggtttcttcacccaaaataaaaaaaccgccgggcgggaacacccggacgggtgtctttgaaccaatcccaaggattggggggtccggagacggcaatcaagtgggcctcttacaaagggggtggtccaaacgggacgcctcgggattaatcaaattacagcccgcccgcggggggaacatacacaagaaacggtggaggcaaacactcatatacaggcactttgcctgtgacacaaactagtgaataacacacaacaaagaacggctgatgtaatgaacaacagagaaagacgcgaacggaagcagcagcaaccggagcggaccactggagatatgtccaaatcgggcggcaatatgggagaagcgcggtggtccgaaacaaagctgcgtcacaaactgcagccgaaagcgttataaagaacaacactggggagacaaccaaccccacagggtagttgacacggcacgaacgaaacaaaacattattttacaatcaaaaaacccacgtctaggggcaaaaacgacaaggcaacgcgactcaaccgagtaaggcaagccgcacaagtcttttgagcaaattctttgctgtacaaacacggcgactgaaacactgcgcgtaggagtagtaacacccaaaagcgacgcaaagcggttacagtggtccatggcaacagcggtaaacaatggggtctggcagaaaaacccaatattccacagcccagtcgtttccttcggcaaagaaaacagcgagcgagatacatggggcagacaggttcaatagccgaa

SEQ ID NO: 639827 - DNA, 289 bp, Homo sapiens
ttttttatatatttataaaaaaaaaaaaagttggtgattgccttgggaaattcccagggtattactggacctatttggtgtattgttaaaccagtgtccttgtgaaactgttgctctttatgttcctgaaacaggtaaggaaacagttggtcaacttttatacaaagtatataaacagttcagtattgtttctgttcattttgtttttttttcattgacaaaatcaaaccaccattcccccttgtgtaaataaatgatttttctgaataaagtaaagtttttaattcca

SEQ ID NO: 639828 - DNA, 351 bp, Homo sapiens
caaagattcaagtcatagatgatgtatcagtagtgagtcagtccgcattcataagtaagatagtgtatatgttgtcaaaagagccatacgaagttcatctcccagcaatcaaagccacagtattgactctcgtcaaatttaggacagcggtcgtcgtagtaatggtcaggtaaaaaggaactcatcatgcaagataggatcataggtgttcacgtcacaatgaaggaactgtgcagtaaacgcacactggggggtgcactcagtgtagatgtccagatacacgagcgacgagctcagccagatggtccttgtggaccccataagcctcagggctataaaggtgtcgtgtgc

SEQ ID NO: 639829 - DNA, 721 bp, Homo sapiens
aagaggctgaatgggccagggccaggcgtgtactcacgcctgtaatcgcagcactttgggaggccaaggcgggcgatcatttgaggtcaggagtttgagaccagcctggccaacatggtaaaactccatccccaccaaaacatacaataagtatccaggcgtgatggcatgtgcctgtagtctcagctactcgggaggctgagaatcgcttgagactaggaggtggaggatgcagtgagccgtctcaaaaaaacaataataataaagtacagactgcattttaaaaatatgcgagtgtttactgtgtactaggggctgtataaaaggttttcacatatatcaaaagctactttcccatttgacattttaaacaaaatgctttatatgtaattagcattttcaccagtactttgatcacactaagctggcatttgtttaagcttgtaagttttataaaggctttgttaaaaatcaaatttttaagaatacttttgcactaggtctccagaaatgctttgggttcatctttcattgctgcaaggaacttccatgcctctaacactcatcttcaaaagactggtaagttattatttctcagtctacgccgcacttactagatgaagatataaattacatacatcgtataactgtggtgagttgttttcatttgttagtttttctctagtttgatagactcctcggttcttaaacatattgtacc

SEQ ID NO: 639830 - DNA, 120 bp, Homo sapiens
aagactagtcgaccaggtaaggaggggagctaagagatagagagaaggggacagaggcaagaaaagatagtagatcaagaaagatagagaaccaggcgtagagggctagaagcgagaatc

SEQ ID NO: 639831 - DNA, 294 bp, Homo sapiens
  misc_feature (283)..(283): n is a, c, g, or t
aactgaattgtgagaagcagtaatcacccaccgataggcatgattaacaaagcaacctttcccttcccccgagtggattttgcggaaacccccttttcccttcaccttgcttgagatgttccaaatttgagaaacttgaagttgcctacagaaaaaggaaaaaaggccgacaaaattccctctcacttgcagtaaaaataaataaaacagcacacaaacaaataaaatgaaataaaagaaacaaattgaaataaataatgtgttgtcacattaaataaaaatnaaaataaaaat

SEQ ID NO: 639832 - DNA, 274 bp, Homo sapiens
ccgtgaactgcgccgtagtaccggtattgtaagaacagcgtacccaaagtctcgtttctgtcgaggtgtccatgaatgccaagattcgcgttgctgacctggggcggaaaaaggcaaaagtggatgagtatccgttttgtgggcacatggtgtcagatgaatatgagcagttgtcctctgaagccctggaggctgtccgaaatttgtgccaataagtacatggtagaaagttgtggcaaagatggcttccatatccgggcgtcagtctgtgagg

SEQ ID NO: 639833 - DNA, 440 bp, Homo sapiens
gcgagagtaccattacgtaatcaaatacctgccccatgcaagaatccttctatgacattctgacaactcacatagtctccacttggactacacggtctgacagggacctcattactttgctataatgtctacttatattactggacagctttaactagttagaaaatgcttttctaaactaaaacaaaagctatcaccagtctcacaacccaactataactttcacataccggttttgattctgttctccaggacaataaaatctacttcccaaggatgatggaattttcatgcaaaattgttagacaaaggcattctttacataaacatttgttgtagatcagcatcatgatgttgtcatgagccaaacagtggccttattttcacaacatcctgtcttatatcagtacttgcttgtaccttatattcattcataaata

SEQ ID NO: 639834 - DNA, 198 bp, Homo sapiens
  misc_feature (17)..(17): n is a, c, g, or t
tgagtatggactcaggnctgagcgtggtgggacacgactgtaatcccagttactcaggaggtaggagaatcacttgaacctaggaggcaaaggttgcagtgagccgaggttgcaccactgcactccctcctgggcaacagaacaagactccatctcaaaaaacaaaaggtgcttcataaaggtactctctttgtgtga

SEQ ID NO: 639835 - DNA, 444 bp, Homo sapiens
acaggaaagtggagagagaaaaaatacgtttcaaaaactatagtacacccgtttttttgttgttgttgttgtttttgagatggagtttcgctcttgttgcccaggctggagtgtggtggtgagggaagagaccacctcattttgtcttatgcccaatttctgcctccaaagaaagaagaagtaaaaactaaaaggcggaaatgaaatctacaagcagacagcctggtgccacaccctgggcctggtagttaaagactgacccctgacctaatcggttatgttatctatagattacagacactgtatagaaaagcactgtgaaaatccctgtcctgttctgttccaacctgattaccagtgcatgcagcccccagtcgtgtaccccacttgctcaatcgatcacaaccctctcacgtggacccccttagagttgtgagcccttaa

SEQ ID NO: 639836 - DNA, 413 bp, Homo sapiens
ccgggcttgctcaggtctgtagacttttatttaataaatacttaagacagtaatttgagataaaacgtaataaagatcggaataatcaaatctctatcttagtgttactattctttagatcaatgtttgatgctttaggtgcttatcactctgaggttaaaaaacaaggcaaaaatctttcatcaagaaactaaaatttatgaccagcctgggctgggcgcggtggcctacgtctgtgattccagcactttgggaggccgaggtgggtggatcacctgagatcacgagtttgagacaagcctgagcaacacagtgaaaccccgtgtgtactaaaaatacaaaaattagccaggtgcggtggtgcccacctataatcccagctacttgggaggctgaggcaggagaattgcttg

SEQ ID NO: 639837 - DNA, 437 bp, Homo sapiens
tgaataatgctgaaaagttaaaatgaaagcaagaagcagccaccatctccccactttaaatatttatacccagtaaaaagtagcaatcaagcctctgcccttcaggatcactctctagccttcagtcccaacccaaagatgggtcagcccatatccaggttagctctggctcacctcccagggctctcctggaaaatgtgtgctctcatcatcaagagaggtcccacatttccaacgccagccagcctttgcaggacaactcaatcttgacaagtcagaatcaaggggtctgtaaaatcctccatcctccagacctggtggccactgagggacatgcagtaccccaggaaccctgaagggaggaaggtactgggtgcaccagcgccctggctcagtccttggcctcacccacctcctcttctggcagaaaaaaaaat

SEQ ID NO: 639838 - DNA, 1093 bp, Homo sapiens
  misc_feature (1092)..(1092): n is a, c, g, or t
ctgttttcttccttttttctctcttgcttgtatgcacaaggtagtgacttatcttcgtaagatacaaaatgccagtcattatctatatggccatgtatgtgaaaccaaatgcaacctgtagaatcggtcatgagcatcacgtaacaactaaacttattggtgcccatggacttgaaaagcttggagaggtgcacttacacacagtaaattgcgctgtggaatcctactgcaagtatctatcctgggatggccagtctgaatctctatcaagggactttgtgtacatctcgcacatgaacgtcctatctatagtagaaattgctctgcatttagacaactcgtgggcaaaaacgagcagttgtcctccaagattcttagcaactatattcttattttcaaaatggtttaccaaaatttgtcaggtacattgtaatcgtgtagaaagcatgtcaaagaatcagtttctatcaatcagcttgacaatcctagtcaagcatctctactcctttattatgtgtgtgtatcaaacagattaagagctcctttgcgtttcgaataaaataatttctcataattaagcagtagaagatctatcttcacaaagtatgagggatgccagatgttgataaacttactctttctgaatctggacaaagtcgactaaacagatttttctgatgagcatgttttatgaatccgtccattgtgctccagttctatcacatttgcatttttcatgttacactgcaattacttaatctttttcccctatccttgtaaaattactttcctgaagtgggaggtgtagtctattcccccgttaagggtatgcattaaatcaagcttttttagcgtgagtgtacatgtgcttaacccattttcttttcccatttttggtttaacagtaccctgccttcttttccacggaaaaagtgcgcatccaccgggaacggcagggtgcgtgcgggtcaagaatagaacgcgcgaaattttcgtgcgcgcggacacacttcagctcggccgccgcggagcttgggatataacgacacacgtcaggccgcgactacccacttacacatactgttgtcggtnc

SEQ ID NO: 639839 - DNA, 703 bp, Homo sapiens
cgcggccgccagcgccgtctgcttggcttcttctggactcatctgcgccacttgtccgcttcagcactccgccgccatcatggtgaagctcgcgaagtgcaggtaaaaatcaatggtgagccccaatgaaaatggctcctcctccaagaggaggtagaagaatgatagtgaagatgatggaaatgtcagagagatgaaagatagatgatagtagtggagaagaggtcgtcatacctctagaagaaaggtcaagaaggctgctgaaacctcaggaaatgaaggtgtgtcgtttgccccaagcaaaatacaggttgcacgttggctctcgaccagccaatgaaagcaagctgtcactcctaggcaaatgatgtgcagcattgcaacacctgcctagagaaagacagtatactgcaggcaaatgcagttacctacacctgtgcaagaaggggagccacaccatggcaaagcattggtagcaactccgtggtaagaagggtgcttgcatcccaggccaaggggggcaaagaatggcaagaatgccagaaggatgacagtgatgaagaggaggatgatgaccagtgagggaggatgaggaggatgacgaggacgaggatgaggatgagatgaattggaccagcaggatgaaagcagagtgatggccctgctcagaggtgaggacgtgaggatgagaaatgttgggtgg

SEQ ID NO: 639840 - DNA, 232 bp, Homo sapiens
tattctattctattctgttcattctattctattctattctatctattctgttctgttctgttctattctgttctattctcttctgttctgttctattctattctattctattctattctattctattctattctattctattctattctgttctactctattctattctgttctatttagttctattctattctattctattctattctcttctgttcacggtaacaccaca

SEQ ID NO: 639841 - DNA, 399 bp, Homo sapiens
tacatgagtagcctggatatatctcgtccattaatgagtactctcatgggtactgttataaggacaggggctgtggagcccaacagactgtgtcaagccagtctggcgagtaacttgctgtatggtagggacaagttatttaacctctctgtttccttaaatgaggtagatggtaacggtgttataggcttataacataggatcaaagagatggtgcatgtgaagtgtctggcaccaatggagtactaaataaatatgaacaatttgctgctttcttggtgggagagagggtctcgctctattgccaaggcttgacgtgtagtggcaccatctccatcttctgggctcaagcaattctcccatctcagtctcctgaggagctggaactacagttgtgtg

SEQ ID NO: 639842 - DNA, 477 bp, Homo sapiens
tgcggtctggcatcccttgctatatgatcatacgccatgaactgtgtgtgcaagtcctcgatcccttctgcatctcagagcttccatgtgggatcccttacctgccggctgaagtgcatcctttaggaattttgtacatgaggcacttcagtgaggctgatggcaaactgttggagtttatacttgtatgaaaattcagtcttggctgggtgtggtggctcacacctgtaataacagcactttgggaggccgaggcaggtggatcacctgagggtcaggagttcgagaccagactgatcaacatggtgaaactccgtctctacaaaaattagccaagcatggtggtggacacctgtaatcctaggtactcgggaggctgaggcaggagaatcacttgaacctgggaggcagaggttgcaatgagccaagatcacgccattgcactccagcctgggcaatggaggaagactccctctc

SEQ ID NO: 639843 - DNA, 289 bp, Homo sapiens
  misc_feature (278)..(278): n is a, c, g, or t
gctcatgcgtgcttcttttcatctcttccagctactcagttcctcgggtgtcctcatattattggtattcatggtatctagctccctgctcccgctatagatgtatttctcaagctgtgatgcagtatgcttctgggtttttccagtgctgacctgatagttgtactgtgtctggctcccccagagaacatgatggggaatggtaccccaagctatcactctcctggctccttcccacagcagcagtttggtgcactggagtggtggccagacctgangcatagccagg

SEQ ID NO: 639844 - DNA, 361 bp, Homo sapiens
gctcgacggaatcaagtggaattgaatcgaaaggagaggaagcgaatggactgaaatgaaatggaatggaattgaatggaaagtaatgcaatggaatagaatggaacgaaatttcacggaatggaatcaaactgaatggaatggaatggaatggaatggaatggaatgaaatgcaatggattcaactcgattgcaatggaatggaatagaatggaatggtatggaatggaatggaatggtacggaatagaatggaatggaacgaattgtaatggaatggaattgaatggaatggaatggaatggaatggaatgaacgcgagtgcaggggaatgtaatggaacggaatgcaatgggtcgacg

SEQ ID NO: 639845 - DNA, 707 bp, Homo sapiens
gcaataatccatgaatggctactctgatctatgttgataagggacaatggagatgcaggcacccgtgtggttgctagggatgggtctgaaggtggggtctggactcttccgacataccagaatgccttaagatgggagatctcaagtttcaacacgacgttatggcattgacgttcgatgtccccaccagccttacctaaaagctactagaaaggctgtgtggaactgtctaacagagctgagcagaaaatgtctgtaaagacgcaagggacccctcaaacaaaaagcagtcaagctgttctgccaaagagatgactgagtaggactgttcaaagcacaaagctctgttcctgcctccagatgatgcctatccaggaacatagaacaaacatggctttcccttcaatcctctagacttcgagagtttgagctgcctgaagagcaccagattgcgcacctccccttgagttggagtgcctctcatgatccttgaggaggagagagagcttgaaagagctgtgctcagctgggccccccttcacctgtgatgatgccctctccagcatgggaatccaagctgttgcagtctccttcaagtcattctgtcgacctgggatgtcgaattgccacctgtttgctgtgacatagatatgtcacatttcttagtgctccagagtttgggtgtatccgtaggaataaagccattc

SEQ ID NO: 639846 - DNA, 545 bp, Homo sapiens
  misc_feature (80)..(80): n is a, c, g, or t
  misc_feature (102)..(102): n is a, c, g, or t
  misc_feature (136)..(136): n is a, c, g, or t
  misc_feature (323)..(323): n is a, c, g, or t
tcggacggtcgatactcagatcgggaacgtaatattactctgatacaggccttcggcctcaccgagcagaccgtttttcnggcgttgcccggcctcggccangatccggttgtccacgctatagatagcggcgtgngccacgagcgggttcttggtcaggttgttgagcaacacgttgaggctgaggatgtcgttggacaccaacaactcagtcgccgaagtggcagtctgggttgtcaggctcgcgcccagggcgtcagcttgctcgtgcatggcctgcttgaactgcaaacccatcacgcaggcgtagatcaccagggccngagcgaccaggatcacgttatggctggcgatgcgcaatgcaatcggtacacggcgatggcgcagtgcccggaagatcagcaggaagaagttatcggtttttactggcgtgggccggttcacttgcgctcggctcttggtccgtgaagttgacgcgcagtatagcgacaggcccctggccggcaaagcgctggctgtgcccgatggtcactgaaagtatctga

SEQ ID NO: 639847 - DNA, 132 bp, Homo sapiens
gggtgctgtgagctgaacagctgcgggccaaggagcccaccaatgctggcagactgtctaccaggctgagctgggagagctgcggctgcggctcgatcaactcacctggcaacagctgccctggctgtgagt

SEQ ID NO: 639848 - DNA, 285 bp, Homo sapiens
aacagcaagttttttgtccctgcacccccaccattttggggacctacaagggcctggattcaaaggacagtgcacaggttaggcttggagctccacaaggcttggggaattgggacggggcccccttcccggacctgcagccttggacaaatggggaacattgtgcctccctgaacaaaaatggcaggggaggaggttgatgctttaaatgaaaaggatggtggggttgggaggtataaccctgttcctttttcccagtttgtgcaataaaggttgtgaagatca

SEQ ID NO: 639849 - DNA, 360 bp, Homo sapiens
gaggaggtgctatcagcagctcacaagatgaatcgctagatgtattaaaagcagatggcaacatacaggcagcgtggagaatctgtgactcacagaggtagaagagaggaccccacttccatgactgcaaatcctaagttttatcagagagtacctgatagaacaatgacatgatctaagataaactctgtacgaacaaatgaccgatctagagtaaactaaacaatctgacgataacgattgttaagttatcaagtcatgaagaatgaagttagaaagcatgcaaggaatcgagtctggcattaagtgccccactcgatctcgcctttaggagaagatataccctcgataagttgtcaa

SEQ ID NO: 639850 - DNA, 130 bp, Homo sapiens
  misc_feature (21)..(21): n is a, c, g, or t
ccttggttggatacagcaccnatccccgctagataccatgatgcccttcgctgctcaagtggccaactctggcctgagtgacagcctgaccaccagcaccccccggccctccaacggtgcgttggcccaa

SEQ ID NO: 639851 - DNA, 158 bp, Homo sapiens
taggcggagcatgtccgaacactacacagacacacatgcacacacagcacacacgcatgcacagcacacagtgaacacagcacacacacatacacacagcacacacgctgcgacacacacctacacacactccatgcgcagccccatacgcaaaacaa

SEQ ID NO: 639852 - DNA, 351 bp, Homo sapiens
ggacccgcggtatgtcttacggaaatgttgtgacgtagtttggcttcttttgacaccattaagatttctccatatcagcaataagactgtttagctttcttattattcatgtgtttgctgggttagcacttttaatctccttccagaacttttcctttgcatctacaacttggctgtttggcacaagaggcttagtttttgtcgtatcttggctcttgatatgccttcttcactgagctcatttctaacttttgattttaagtgtgagatgtgtgactatcattcatttgaatatgtagaggccactgtagggttgttaattggcctaactttaatatttttgtaattcag

SEQ ID NO: 639853 - DNA, 535 bp, Homo sapiens
  misc_feature (1)..(1): n is a, c, g, or t
  misc_feature (27)..(27): n is a, c, g, or t
  misc_feature (33)..(33): n is a, c, g, or t
  misc_feature (52)..(52): n is a, c, g, or t
  misc_feature (59)..(59): n is a, c, g, or t
  misc_feature (80)..(80): n is a, c, g, or t
  misc_feature (95)..(95): n is a, c, g, or t
  misc_feature (135)..(135): n is a, c, g, or t
  misc_feature (201)..(201): n is a, c, g, or t
  misc_feature (206)..(206): n is a, c, g, or t
nccagcctgccaacatggtaaaccccntttttncttaaccatccaaaatcancggggcntgtggcgaaggctgcattccnagttactcagaaggntaagccagaagaatcgcttgaacccagaaggtgaaggttncagtgagccgagattgcgccactgcactccagcctgggcgacagagtgagactccatctaaaaaancaaancaaacaaatacacccctcattagttaaggataaagatgaggggggcctgtcgcggtggctcacgcctgtaatcccagcactttgggaggccaaggcgggcagatcacaaggtcaagatatcaagaccatcctggccagcatggtgaaaccctgtctctactaaaaaaaaaaaatacaaaaattagctgggcatggtggcgcactcctgtagtcccagctactcgggagggtgaggcaggagaattgcttgaacccgggaggcagaggttgcagtgagccgagatcgcgccactgcactccagcctggcaacagagtgagactccgtctc

SEQ ID NO: 639854 - DNA, 296 bp, Homo sapiens
tgctgggattacaggcctgaaccaccatccctgacccaactatagtttcttaaaaaaaactctttttaaccttgccttatatgtaagggtagaaggatggctcagagcttcaaagagcaggactagcctaagacctgtctgtgataatttgaccagaggtgcagcctagctagccattcttcctcaccctgtggcagacattcacgggagactgcacgtagctgtagaattacctttggggaagaagccacttggtgaacttggcacacacccgtgtttgaggggcaaagaccctg

SEQ ID NO: 639855 - DNA, 408 bp, Homo sapiens
  misc_feature (8)..(8): n is a, c, g, or t
  misc_feature (127)..(127): n is a, c, g, or t
  misc_feature (158)..(158): n is a, c, g, or t
  misc_feature (260)..(260): n is a, c, g, or t
  misc_feature (285)..(285): n is a, c, g, or t
  misc_feature (316)..(316): n is a, c, g, or t
  misc_feature (379)..(379): n is a, c, g, or t
ctccttgntgcacgatggcctcgctccgggtggagcgcgccggcgcgcccgcgtctccctaggacccgagtcgggcggccggcagcgctccgcctcctccttctgctgggcgctgtcctgaatctcnacgaggctctggctcattctcttcccaccanaggcacaccatgggtcagaaggccttatagcatctctgcgatattgtctggagcaatttgcagagttgtttgatctgggcttcccaatcccttggcagatangattatctttgatactcatcagatntactttgcaactgctctctggtgcagcgcancttctctgtacccccagatgatgtactcctggccatgatcatagcccccatctgcctcatatncttcctcatcactcttgtagtatggtgga

SEQ ID NO: 639856 - DNA, 281 bp, Homo sapiens
  misc_feature (63)..(63): n is a, c, g, or t
  misc_feature (109)..(109): n is a, c, g, or t
  misc_feature (133)..(133): n is a, c, g, or t
  misc_feature (185)..(185): n is a, c, g, or t
agccacccacagctgatatctccctggtgctatccccaaaccgccactctcaactcttaaagnaaataaatcatctttgctggcagggctatgctgaacctccttaggnactctctaattggatgtcctgggncctcccaattcttagtcctttaatacctgtttttctccttgtcttattccgntcttttttcaattcatacaaaattgtatccaggccatcaccaatacttatataggacaattgtttcttctaacaaccccacaatatcaccccttac

SEQ ID NO: 639857 - DNA, 85 bp, Homo sapiens
gtgaatagcagaagctttctgtttattcacagtccagtaataataatacccgcagcacaaagcatacgtcttttctatacaaagc

SEQ ID NO: 639858 - DNA, 167 bp, Homo sapiens
atgtgaccttgccgtgcagtgtaggagacacggccatgtgtatcacagatgcgatgcgtgtcactgatttcatcctctaagttgccgcacagtgcccaccaaaggtctgtccgacaagcctggcagaaggcagacatcaatactcattacagccaggggataccgag

SEQ ID NO: 639859 - DNA, 387 bp, Homo sapiens
  misc_feature (114)..(114): n is a, c, g, or t
  misc_feature (135)..(136): n is a, c, g, or t
  misc_feature (213)..(213): n is a, c, g, or t
aatatcaacaaaaaaatgaagataaaaaaaataaaaagctacgtaagaaacatatgttgttcctttagtggttaagccggggagaaagaattattctttctttatttgagcatntaaacatgggttggtcctagnncaagataaacttgagtttaggatttttgctcggtgagctcaagagccccttgaaggtagagggaaaaactttgctcnaaggtatcaggcagaagggaggttctttgtcctctactatagccctctatcaaccattaatggggttttgtacaatccaattaaaccggcagtttggaaatgacgccaggggtacccggagcctccaaattccggtaatccattggtccataagccttgtttccctggtgtttg

SEQ ID NO: 639860 - DNA, 1571 bp, Homo sapiens
cacgaggagcatttgcccaggtggagagcagcctgctatgaaatccagctcccttccttgctgggacttgatgcctgacatcagtcagtcagtactggatgcatccctgcttcagaaacagatcatgctgggcttttctcctgccccaggtgctgacagctcacagtgctggagcctgccagctatagttagaccagagtttcccagacagagtgtggcagtacccctcgggaatttccgggaaaatggattctgtaccagggctatagtgctgcatatcaagaacacctcggagtgacttatttaaccctctcagaagaccctagtcctcgagtaattatccacaatagatgtccagtaaaaatgcttataaaggaaaacattaaagatattccaaagtttgaggtttattgcaaaaaaattccctccgagtgctcaattcatcatgagctgtatcatcagatttccagttatccggactgcaagaccaaagacttacttccaagcctacttttgagagttgaacctctagatgaagtaacaactgagtggagtgatgccattgacatcaacagtcagggaacacaggttgtgttcctgactggctttggctatgtgtatgtggatgttgtacatcagtgtggcacagtcttcatcactgtggccccagaaggaaaagcaggacctattttaatcaataccaacagagcgccagagaagattgttacatttaaaatgttcatcactcagttaagcctggcagtgtttgatgacctcacccaccacaaagcatcagctgagcttctgagactcacactggacaacatttttctctgtgtggccccgggagctggtcccctccctggggaagagcctgtggctgcgttgtttgaactttactgtgtggagatctgctgtggggacctgcagctagacaaccagctttataacaagtccaatttccactttgctgtcttagtctgccagggagaaaaagcagaacccattcagtgttccaaaatgcagagtctcctcatatccaacaaagagttggaagaatacaaggaaaaatgttttatcaaactttgcatcaccttaaatgaaggcaagagcatcctctgtgatattaatgagttcagctttgaattaaaacctgctcggttatacgtggaagacacatttgtatactacatcaagactttgtttgacacctaccttcctaacagcaggttggctggtcactccacacacctctccgggggtaaacaggtgttgcccatgcaggtcacacagcacgccagggccttggtgaatcctgtgaagttacggaaactggtgatccagccagtaaatttgctcgtcagcatccacgcttccctcaagctgtacatagcctcagaccacactcctctctccttctcggtgtttgaaagaggacccatcttcaccactgcgaggcagcttgtgcacgccctggcaatgcactatgccgctggggccctttttagagcaggtaagaacacaagctgagggtctgtgatgagctagagcccgggtagcccttaaactgg

SEQ ID NO: 639861 - DNA, 251 bp, Homo sapiens
gcggctgcctttttttggagatggttttctcgatggggggcgcttcgtgctggtctgtacgacgagctcaagaaggtgatctaagggccgcggcggctccaacacacacacacccgaggggaaccaagagaaccacgtagaatcctcaagcgtgcggaccatcaaccttcgagaaattccagttgtctttttcccagccgcatcctgcctgtagatggccgggaaaggctctcaaaaaagggggggccgtt

SEQ ID NO: 639862 - DNA, 629 bp, Homo sapiens
aatcgaggggcttttttgatggtctgttaaacggagattgagtgtctgctttcggggaaacgtgagcctttccccccccagggccgttttagtgaggagtctgttgctggccccccccgctgggctgtgcgtggctcaaaacagaacacctcgcgtgattcgcggacgcggctgaaaaaagctgggttcctgtctacaaggcgccgtggttaagagttggtgcgacccgtcccacgatagctccactttggtgcaggaagatttccccgcccccaccgtgcgagcgctatgcaaaattctcctcctcggggggaaccccgaggtctttgggcggggattcaaacaccacccgtctcggggggggacaccccttttctgggaacaacaggggtgaccagacacacaaaggtaatgtcgtgaacgcccagtcgtcacccccggaaggggggttcccccacgctaacacgaggcagggctcacaaatacagtgtcgcggccccgacccagtgcccgaaaaacatacaactggcaaaaaaggggcaccacgggtggcaaaatgaaacggggaggatgttcaccctattcattggggaccccaaacaaaattttatttcccccgaacaaaacaa

SEQ ID NO: 639863 - DNA, 193 bp, Homo sapiens
gcgccctgcagcagccgcggacccgagtggatcggggacggagagagcacgagcccatcagacgcagtggtgaagaaagggacagaaggaccagaagatcaacaaacgttctttgaagagctggccgtagaagataaacaggctggggaagaagagaaagtgctcaaggtagaaggagcagcagcagcagcaa

SEQ ID NO: 639864 - DNA, 165 bp, Homo sapiens
ctctacaatttcgctcgaaacagaataataccctgaaggaggcctgtacctggctgtgaccctggttggcaggcatctactggagtttgtcatcacgtctgtcccgtcattttaattatcacttcctccaccaaaaccatccggaggtcttactttgaagccacg

SEQ ID NO: 639865 - DNA, 448 bp, Homo sapiens
  misc_feature (397)..(397): n is a, c, g, or t
  misc_feature (448)..(448): n is a, c, g, or t
tggtggtggtaagaagacttaacagcacaaccctctcaggaaattttgaagtattcaacacagtattgttaattacaggcactatggtgtacagtagatctctaggccttactcggcttgcataactgaaactttgtgccctttgcctaataattccccatttccccctcccaggacgaatctataggatattacactgaagtgaaataagacacagaaggacaaacactacatgatgccactagtatgagaaatctaaaatagtcaaaactcataggagcagagagtagaacagtggttggccttgtcccccttcttgatactcagccaaggagagaaagggccaggcttccagcagtcatgtgggcaggggcttttatggagcatcctggattcntttgcccttgtactgccctctctctacctactcgtaatcctcctgaggctn

SEQ ID NO: 639866 - DNA, 700 bp, Homo sapiens
ggcgacccaggtttgccagctgaggagccgagggagaagtcctctcgagaaggtagaccgtagccaggagctgatgggaacctcgctgatggtcacctgcatagcctaccaacaccagataccgatgacaggcatctcccgcagaacctgggtgatccccgtggtcttggctgcagcccccagtacctcacccgctgctgcagctcattagtgggccaacatatgctgtccgtccagcagttcaacaaggatcagatgtctcacctgttcaatgtgggcacagacactgcgtatgatggctgcagaaggagcggagcctcgacatcctgaaggggaaggtcgatggccgtccagtgttctatgaaggtgagcacacaggaccagctagctcctttgcagcagccatggtccggctgggaggtgctgtgctcagtcttctcggaagccacatcgtccgtccagaagggcgaatcccgtggcatgactccgatgcagaccatgagctgctatgccgacgtcggtcgtgctccggaacccccagcctggagcagtggagctggccgccaagcactgccggaggccagtgatcaatgctggggatggggtcggagagcagcccagccaggccctgctggacatcttcaccatccgtgaggagctgggaactgtcaatggcatgacgatcacgatggtgggtgac

SEQ ID NO: 639867 - DNA, 461 bp, Homo sapiens
tgagtagctgggactactgcagatgcatcactacacccagctaatttttactttttgtagagactcaaactcctggccttaagctatcatcctgcctcagcttcccaaagtactgggattacaggcatgagccacagtgcccagcccccactaggtttttgaatctgtctggctgtgatatgattttcatgcagaaacacctagactatgggataaatgcctacaataaacaactagagaagctggagatgggatgaagaatccaggccacgtgctctttcttacccttgtgggatttttgcctgggcaagaagaagacacatttttaatgtctctgttttgaaatgaacataactcacctgatgtatgatctttaggttataattaggtttgctttttctgtgaactacattctgccttcaaatgcttcaatccatctgatgtgctggcaggcgggggcg

SEQ ID NO: 639868 - DNA, 110 bp, Homo sapiens
ccagggtggggctggggctggagacgacgagtaggaggattaagtccccctgtccctcctgggatgatggattgtctcgttttcctgccaaataaacaggatcagcgcca

SEQ ID NO: 639869 - DNA, 317 bp, Homo sapiens
gacggttataaacccaaaacggaaaaccgagtttgtttacacttttaggcttgaatccctaaccgagctttctctgtggactactgctagagttagctttctaagtaaagcgtgcggttatctcattccatgctaaacaaacaattctattaaccttcgggattaaataaatctaaccaaacccttagcttgtgacagtgccagccctcaatgctgaagaagcctagcgatgcttctgtacctagaatgcttttcgctttggtttctagatttgaaactcaagagattccaaactccgccctcttaccagggtcccg

SEQ ID NO: 639870 - DNA, 248 bp, Homo sapiens
ttgcttctgtggtactcctcccctcagaacaaaattataagagtatagcctctgaggccaggcgcggtggctcatgcctgccatcccacccacactgggaggccgaggtgggtggatcatctgaggccaggtgttcgagaccaccctggccaacctggtgaaaccccgtctctaccaaaaatacaaaaaaaaccagccgagaattgtggtaggtgcctgtaatcccagctactcaggaggccgccaga

SEQ ID NO: 639871 - DNA, 1100 bp, Homo sapiens
tattaaattcgtgtttaatttataaaaaattacagcaacaattatcaaagacaacattatgtgttacaaacgtttttagacaaacaagaacgattaccacatatcaggtggcagataagggcaagctgagagaataaatagacgtgagttcccgggcaagtgtctggtcctcaaagacattccaaagcgtggcgttcaggcagcttgaaacaggcttcttttcccaggtgacaagcaatatggtggctcagataattacaaacgagtggttaaagtgagggtacatacattaggcccagtgttaacaaacttcctctttcttccctgcgggttaggccagtgattacaagtgtggaagctcattcaaaataattgttaaacccaaggggattaacaaggcctattttccacatcttaaacctcatttataagcccttgtcacaatgtgtgtcgccaagtgggaattcaggtataactgtggcaaaagcgaatccccggggtgtgtggtcaatacgagaaatacgtgggtatattatacgcagcatatatagggcatagtgccaaatcccttataccttcagtgttgggccccaagtctcagggggttaccgtgggtaagtgttgggaacgcggaacaggggggcaataacaattttacgacaacgttggctttccctttcaaaggaccacgaaactggttgacgcacaacagacaaggggaaaaaccccccttgaggcccaggggactcctaatataagaccccgtgtgtgggttgtggccgccaaaaaggcggcacggggggaaacgggcccagcgacactctctgaaaaagggggagtaaaaaccggggtctcccctttatgggggccaggaaggggaaactcccggggaaaagcgggtgggaacaccccaagcttgggggatccctgtgggaacagcaataaaccgcgaaataccgggggaaaacacacccaaacgagagaaaatatacacctgatgaggtcccccgaagcgagggaaatacacacaatcaaaaaagggccacggaggagcaaccacaatatcgacaaaaaaatatgcgcccccaaaagataccacg

SEQ ID NO: 639872 - DNA, 271 bp, Homo sapiens
tccagaggatcccggtgttccctttgtcttatgaaaaatctgttgagaaatatttaataggctgggcgcggtggctcacgcctgtaatccctgcactttgggaggctgagacaggcggatcacaaggtcaggagatcaagaccattctggccaacacggtgaaaccctgtctctacaaaaaatacaaaaaaattagccgggcgcagtggcgggcacctgtagtcccagctactcaggaggctgaggcaggagaatggcttgaacctgggag

SEQ ID NO: 639873 - DNA, 1031 bp, Homo sapiens
gctcttgggcggctaataagtaaattaatagacaggtaatcctggcacagaaccaggcaagcagccaaagcccgtttgtcagtcttgaagctcttctcttgccatggtgtgaggacttcatgcatcttacgagtcagtcgacgagatagcacgactggaggacttgtagatcaatgtctagcaagcaggagcagagaagtaacaggttgagagtaatgtccgttggtgtaggcaagattctcgaggcatagagaacagtaaagatcgtagattaagttcttaggggtaactcgatcgtggacttggaacgtcgtagttggtgttactcgtcgttacgtaagactggtgcgtttctagttcatcgtagtacgactaagaagccttgaagcacgcaaacgtggtggctctcttagaacgctaattggcgcacgactatacggccgtttgcgactggtcatacgccgtcgtgggccctcttcagtggcgcagaccgttaaagcttggtaaccgagagagtcatcgacagccataggcacacacgtgtcgtggcggtctctgctacacgacaaacacttgcattcatcagtcatccatcattcaacactttccgcacaaacgcgtggcgcatatttcgtcgccgacaatgccgaaaattcgcttacaggaaaacgttagggcggcctactcggaagttggttcccttcaagcccaacgcttttcttgcacactgggggtctcattcctgaaattaagtctcttcagaagtggaaagtaaaggttgtccccgtgggacagccatctttggaccaccctgggatctaaattccacttcccggcgagttaaacgcaacacatttcctggcgactcacgttttggcacaaggttcattacaagttccctgcattacatttgtgcccctggggggtctaaggcaacggaaaacatgggcccaagggggaaaagcagcacggcacatgggcttccgcagggggatatacacaattagagccattttacacaaagacgcaag

SEQ ID NO: 639874 - DNA, 336 bp, Homo sapiens
cgatggaatgtgtaatttaaagtataaatctcagctgggcacagtggctcatgcctggttgagaccagcctggacaacataatgagaactgtctctactgaaaatgttaaatattatctgggagtggtggtgcatgcctgtagtcccagccataggggaggctgaggcatgaggatcaattgagcccagtaggtggaggctgcagtgagccatgatcttgccactgcactccagcctgggcaacagagagaaactctgtctcacataaaataaaataaaaggaaactcttctcttaaaaaaaataattataaagttagtatcatagaaaatatctg

SEQ ID NO: 639875 - DNA, 603 bp, Homo sapiens
  misc_feature (212)..(212): n is a, c, g, or t
  misc_feature (305)..(305): n is a, c, g, or t
tgccggaaccccaaaaaacctgtgtcttcctggaacagaccctcttccgtggtgcccaaagttctaatctattttttttgagaaatgaggaagcccgtgcccctttttctgttgaaaaaaacaagccccataccccctcggggcaaaaaatctccatgcttggtaaacgaatagatccaacactctattttaatctttggatccatcccacngatagcatttgaggggcaataccgacaacgccagaaccggttaggtgctaatcatggcacctcactgggaaccacaaagtttttaagcatccncaatataaaggagccaattaattttcataggattgtgaagcataccaaacgttgaattaggtgctggccatgtgacctcttaggtaaaatccaaattttgagatgaccgcaataataggtatggtaagatgtttcattttgtgccgttattaaactatgagttactctgccgggccagggggctgcttcttataccatcatcttgatcatgacctcataatcttccgctttgaagaagtgattgttattcgttcaacgtgaaaacagttatggaactttcacaagctatcattcccag

SEQ ID NO: 639876 - DNA, 1164 bp, Homo sapiens
  misc_feature (171)..(171): n is a, c, g, or t
  misc_feature (341)..(341): n is a, c, g, or t
  misc_feature (542)..(542): n is a, c, g, or t
atacagttccggtgggagaacgcggctgcgaggttttcggctttggctcctgatatgcagcgacagaattttcggcccccaactcctccttaccctggtccgggtggaggaggttggggtagcggaagcagcttccggggaaccccgggcgggggcggaccacggccgccntcccctcgagacgggtacgggagtccgcaccacacgccgccgtacgggccccggtctaggccgtacgggagcagtcactctccgcgacacggcggcagcttcccggggggccggttcgggtctccgtcccctggcggctaccctggctcctactccaggtcccccgcggngtcccagcagcaattcggctactccccagggcagcagcagacccacccccagggttctccaaggacatctacaccatttggatcagggcgtgttagagaaaaaagaatgtctaatgagttggaaaattatttcaagccttcaatgcttgaagatccttgggctggcctagaaccagtatctgaagggatataagccaacantacagcaatacttaaacaatcacaggcaaaaaaggaagatacctttgctaacatttctgaaattaactgcaagctcatgtgtcaggacatttggacaaaactttaggtgggttggataaattacccaaagatgtgacctggatggataatagtaaggctttgggattttaatggacaggattgtgaattagggaaaaagtggtaacttgcacattaagcttggaggcctaccctttttagggttaccggttcatatcttaaacattccggttccaaaggccattggcctttaaggtttttcagggttaacataaacatttgctcttttaaacaaacacctcacaaaaaaagttcggcctcttgccaacggttttgcctggcacgttacgtcggccgacatgggcctttggcaatgcctcatgggagtgcttcattacgggcgcgttaaacgccggtcgcaaaccccgggccccattaatgcctgggacaaccctttcgccgcgcctatagcaagcctccccgtgcttctcaaattccgaccatcgcccgcctttgagctcaattctgccgctaatcttcctccctcttttccaaggcagcagcactctcttcacattccgcc

SEQ ID NO: 639877 - DNA, 307 bp, Homo sapiens
  misc_feature (150)..(150): n is a, c, g, or t
gctgggtgatctagaggatcccgagctctctctgtggggtgaccgctctccgtggggtgacgctctctctgtggggtgacgctctctctgtggggtgacgctctctctgtggggtgacgctctctcggtgggggatgacctgattacctngcgaaataatggatgaacatctcacagacaaattcctctagactagtcaacgttctgactccagcgtgtgtccaactccagcagtcagccaagtttggccccatgcatttcctggcccccatcccatggggcccccacagagcagcagcgtcgggtc

SEQ ID NO: 639878 - DNA, 543 bp, Homo sapiens
tcataaagtattgaattttgtcagatgctttttctccatctgtcgagatgatagtatgattcttgtcctttattatagtgatacagtatattacattgtttctcatatattgaaccgaccttgcattcatggggcaaattctacttgttcatggtgtataatcctttttctatgctgctggctttggtttgctaggattttgcatctgtattcatgagggatattgggctgtagtctttttgtgatgtctttagctttagtcacgtcactactgacctcatagattgaggtgggaagtgttccctcccctcctattttttggaagagtttgtgaaagattgttgttaattatttaaacatttggtggaatttaccagtgaaggctgggcttttctttgtgggatttttttccctaattcagtatcttcatttattatagatctgtttagttccagtagtttgcatctttccaggagtttgtccctttctaggttctttgttgcaatctgttcatatataatggttcatagcattaaaaaaaaa

SEQ ID NO: 639879 - DNA, 150 bp, Homo sapiens
agcagactgtcaaggaaaataaacccccctctgctgagtaattagagatagagaagcctacgaaaataactggctatgcgcctaccatgatttccagcattccagggtttccatacccattacaatttccagcattccccctcaacccta

SEQ ID NO: 639880 - DNA, 298 bp, Homo sapiens
ccgccaccacgctggctaattttttgtatttttggtagagacggggtttcgccgtgttggccaggatggtctcgatctcctgaccttgtaatccgccagcctcggcctcccaaagtgctgggattacaggtgtgagccaccgcacctggcaaaatgctgttctttaagtcagcgaactgaaaaagtaaaagactgctgggtgtggtggctcacacctgtgatcccaacactttgagaggctgagggggaaggttcacccgaggtcaggagtttgagaccagcctggtcggcatggcga

SEQ ID NO: 639881 - DNA, 345 bp, Homo sapiens
gacctcaagtgatcttcccgcctcagcctcccaaagtgctaggattacaggtgtgaacgactgcgtccagccgaaacagccatttctatgatcagtgtgtgaacaacctgacttgttcctggatgcagagatgctcacagatggagaatcacggagccacaatgcatctgtgtgaaacaggaaaaaaactatgaggatgtctgccagttgaaggaggtaaactctcagacgaactctagtagtggcatgaaacataaaggcccttgtgattcaggtaatacagaatctgcacaccattcaattcttactaaagaataaaagatacagatgtctgcaaaaaaaaaa

SEQ ID NO: 639882 - DNA, 1831 bp, Homo sapiens
  misc_feature (132)..(132): n is a, c, g, or t
ctactggctgagtcctttgggcgttgacgggagatgcgtgagctaggtcgcgaggtggaggcgagcactgtcttgtggtaggcggaccttgtggctcgggactaaactgggaggggtggtcgccgtccccantcagtccatttcctgtgcatgggctgtcttcacagaccacatggtgtacacagggagaggtatgggggaggggacacagagtgagaataggatagcatctgattgcctgagaaccctctcctagacactgctcaaatgcgtggtatatgaatggggactgagcgctgggctactcagcaacgagcagatgcatcctcccatcggtagacgggcacgatctagtatcgcccaagctccgagggtaccatctttactctcagatctactgtagtatgtggacctcctgggcaaggatttctcaatagtaattttactgtgacctggggcaggataccgttcagtgaggtgcccaggagactgcatcccgtttcctccatttccacataccccacatctccatcaagcaccaggggtctgagttcgtagcagggtcctgggggtatcccaactgctatagctgtaactactgctgcccctcagtaatctgaggtgtctcaagtttaaaacttgaaggtccttgatgaccaatagactggtgagagcgggacaggagcttattcccccaggacactggtttataccattcacataccatggctgtgttccgacagctccaaacgggtacgagaagccaatcccaatggcagaattcttcaaatccctgcgttttgaagttttgttcaccccttcattatccgggcctgcaacccggtggacatcggctggggacctgggggtcagagaatcgggaaaaaccgctgtaggacaatacgcccatatgtggccacacatagctcgtaaacaaggtcccccacagacgcaggatagatacagcaaatctcgccactgtgatgtgtgtagcattaaacaacagcggcgtcaacacagcacgacgacaccaacacaccagcacacaacaccgaaccaccgaacagcaaccacacgacctagacaacaaccacgaagacaacacgcaggcaagcaagggccaggacaacgaaagacaggggaacgcggaggacgagacgaacaagcgagagaacgcagaccgaggacggggatgcccacgcgcacgaggaagaagaggggagcggagaagaggaggggagggcggcggagggacgggaggagaacaacgacggggaggcgggacagacgcagagcgaagcaggcgagggagagcagagcggggccagggccgacagagacgcagaggcagaccgggaccaggcgagcccgaggggccaggagggcggagaggcgagaagcagtcacagcaacaagaaggcaaaagcaggaggcgagaacgaggaaggagaagacaggcgagacgggggaggggacgagggccgaaaggggcgcggggaaggacagagaggacaggagaagagaggagagggagaaggagaaccgagacaggaacagcggggcaagacggagagcagagggacggggagagcacaggagcagcgcgagaggagaggacagcaggaagagagagccaagaaagagagccagcggggagcgaagcaggacaagaaaggagcggcagcagagggagcgcgagagcgcgagggagagcaggcaggcgagggagaggagagaggaggaagagtagagagagagcacgacggacgagcagcgaagacgggagcggaagccgcgaggggaacacagcgcgaggcaagaggcgaggcac

SEQ ID NO: 639883 - DNA, 828 bp, Homo sapiens
ccactgggggcccccccccccttgcgggcccctctggtgaattcccggcccccccaatccacggaggttcttcacggcctttccgtggccgcatcatgggaattgtcgccgccgctttctctctgcatgaatggctgcccctcagtattctctccggcgtgcttcaccgggcagttccccccgcgtgtgtgtctcactgcgctctcctctccagggggggcagcacacctcaggggtgggctccatgggatagtactcctggacgagattgtagggaaagccactccgctgtccagttatgtgtcttggaaacacctttttgcacccccgggagcagggctccccccgttcctggtgggaacatatgaccacacggtgggttcacgctcttctcgcgacggtccattggctctctctctcgaccacctgagctcgcctgtcccctcgcttttgtcgccacccccccgtcaccaagatagagtccccttgggtcgcctcccccggtgagagagagtctcttcgatctccccaggcagaccctgcgccactgatgacgcccgagagcactagggaccaggcttcttataccccacgcaagagtgtttcacactttgtgtgagattgcccctcctccccccctccctgcctacttcaggtttgctttttatgccaaaccaacagtctgctcgtacgctatgctcctcgattgcactgccatgcatgctgttacccacgattatttgtctgctgaccaaccgctgggaaaatgcttcatcacccgcgaggatacgcaaacacacaaaaaattctattctgtccccaaaacaa

SEQ ID NO: 639884 - DNA, 353 bp, Homo sapiens
accaaggagcctgagtgggatttgcccaccactggacagccaggctcccgtcaggaaggcttttcagagggagtgttggaaggagtcgtcgaggagtcttcctcacccaggaagtcttcctcaccgggtgagccccaacctgctggacctgctcagaatttgcccaacaggggatcctggttgactgaggtctgctaattccaactggcctacgctaaattctcccagaatgtcttcatcatcaatgaatcgctttccactgacacgacgcctggaagaacataaacactgtgaggataaatgccaatgaaataataataaaataaactttctttggtggccagagggaaaaa

SEQ ID NO: 639885 - DNA, 378 bp, Homo sapiens
aggattcggcacgaggagagagagagagagagagattgagacacacccactccctaaccggcgcgctcttcgcaccgcttaaaacatgctcccaccctcttaatacattacaccagtgctaacttcacacctttttacccacacgtccatataaaactacgagtcatctccttagcccatctcttgaaccgcacaccacttattgcggttcttacgatcacatttccaccccaacgctctccttcccataactctgcttaacacaccctccatcactatcctctcctatatcccagctcccaattccttcttctgtaactttcctgcacgcttttttttgtagcttactggttggtttggccactagactgcagggcg

SEQ ID NO: 639886 - DNA, 216 bp, Homo sapiens
aatagaatcgagccggtaccgaattcgacaagtgtgcaaaaggtcaagtgtcattctacccataagaggtaccgagagtagtcaaatttatagggacagaaagaatggtggctgccaggggctggggaaaggaagaatggggaatgagtgtttcatggggacagagcttcgattgggggagatgagaaagttctggagatggatggtggtggtggc

SEQ ID NO: 639887 - DNA, 134 bp, Homo sapiens
  misc_feature (53)..(53): n is a, c, g, or t
tgctctagaggtcccgaagcacagaggaggggcggggctgggggggaccactncgcctgtccgtcgtccgtacgtcagtctgccctgcccggcctctggctgggctcagtccttccagtccttcttgctgtcca

SEQ ID NO: 639888 - DNA, 340 bp, Homo sapiens
acggttcgcacggctgcgatgcgcgcgcatgcgatgccgagcggcagacccgcgacgagtgcggcggcgaccgagccgcccgcgagcgatacatgacggagcgcttcgcgccagaagtcgtcgctgcgcacctcgtattcgcgcatcacggagaggccgtcccaccagccgcttgcgagcggcacggaaatcgctgcaatggcgacgacgagtgcgacgaggcgccgccacgggccgaacgcgaggcgggcgagcgcgtcggcgatgagcacggcccatgcgaacagcagcagccagacacccgcatcgggcgagacgcgggccagcatgtcgtcgggtg

SEQ ID NO: 639889 - DNA, 416 bp, Homo sapiens
tatgtatctacctggatgacagagcgagacccgtctctaaaataaaaagggaaaaaaaacttacactgtctttttaatactaggaaagctccttgagattagaaattgggtggtgttttttcttaccgttttggtttattaattttttaacttaaaatattaatgtaatggaagaaatcactttggagggaatttaaaactaaaatggattcctactggattatggtattaagacttgtggtattacctgtaatgccataaaaaggcatgtgagggatcactggcccaattgattatgtttcaaatgggggaataaagaagctagaaaaaacaataccgggccacattgtgccatattttaacctttttagggtttaccatattgagttaacctgatacacctaattgaagccagc

SEQ ID NO: 639890 - DNA, 245 bp, Homo sapiens
  misc_feature (98)..(98): n is a, c, g, or t
  misc_feature (105)..(105): n is a, c, g, or t
  misc_feature (205)..(205): n is a, c, g, or t
tgagctgttaatactattttccactgacaacttgtgcacatcgaggacacagtgtatgtgaagactccgctgaaaacttccaacatcggtgggttttnctttcgnagtcggtttgacaattactttataggaagactcttgacgaatatgaccaccttctaagttgatgaggaatttccctttaagctcgattacatgtggaggngtgtgtcgtgggtgctgagccaggggaggggggtgagaag

SEQ ID NO: 639891 - DNA, 213 bp, Homo sapiens
agcaattgtgacacctacttgcattgctgtgctcggcccttctatacggtatgctggacgcccccgccaaccacggtgcagccctcgctggcatctttcttgggctcgtagccgccgctcggggaccggtagtgggactcgcacgggtgccgcccgcctctgcaccgtcgctggcgctttggcgcggtgtgcagcggtcccggggcccgtgcg

SEQ ID NO: 639892 - DNA, 693 bp, Homo sapiens
gggttggcgcagggtgccaagagaggcttcgcactacggactgagaggcgtgaggaattgtggggtcgactggatgtggcccatgagggggtcgatggggccaactcacagaaggggactgacagttggccaatactcacatcccactggttgctgttctgaaaccatctgattggctttctgaggctttggctgcgctggggactgctcactttggccatctctgcagcattggtacttgaccacgcgtacctgaagcgctctcgagctgttctgtaaatagctgtgtgctaacatcccatgccgctccctcctcacgagtgcacccaccgcccttgagggcccgtcctacgaatggatgtggggatggctcgctatttgtaagtgtgctggattctctgtgtgttttagctgtacccctctatggctccttaagactttcattttgttgcagaaccatgctgggctagctaaagggtggggacgatgggaagataggccccagcgaggctctcaagagaacgcacctgcgaataaaacatgtcttgtcggccagctgcccagggacggagctacagcagcctctgcgtcctggtccgcagcacctcccgttctccgtggtgacttggcgccgttcctcacatctgtgctccgtgccctcttccctgcctcttcctcgccactgctggcccc

SEQ ID NO: 639893 - DNA, 357 bp, Homo sapiens
tccactagtgtaggccttgtcagacaatggctataaactgaattaggcagtcttaaaaaataaataaaaaccggaatgggaacaaaaggaccgttccaatttggttaaatgcccaaaagggccggtttattttggaccagattatgcttacctaaggttttttaagggcgcttgaaggcccttttttcaataaaacctttattttcttttaactggggcaagggaatctttttgaggttttaaaaaaccgggaaaaataacttgcaatctttttggccgtaaatattcaggggttttgagaatggggggataacaaagaaaaatcttctctgggaaataaaagacctgtttttacag

SEQ ID NO: 639894 - DNA, 84 bp, Homo sapiens
cggacttgcagctggagcggatcagcgtctactacaacgaggcctcttctcacaagtacgtgcctcgagccattctggtggacc

SEQ ID NO: 639895 - DNA, 653 bp, Homo sapiens
gagtcgactagaggatcccccatgtgggcatcacggtgtcaacataacagtgggcacattcatggtctcagactatctagtggactgagagtgaagacgaaaagtggaacacctagaaaaaacggccaaatctcaaggacaaagactccaggcctgcattggagtaggagggttaatgaagttacaatcttctggttattcaatcaacaagtagttattaaacattcttgtgacctagtctcaagtggacatttccccagcactgcagccaaaataaaaatgtcagtccaaaaaagggaagaggagtgaatgacagaaaaaggacaggatgaggagctcaagtgatccccccacttcagcctgccgagtacctgggaccaccggtgcatgctaccatgccccagctaatttttggtattttgggtacagatggagtttcaccgtgttgcccaggctggtctcaaactcctgagctcaagcgatcggcccacctcgggctcccaaaatgctgggattgcaaggcatgagccagtgcacctggcctatatcttcttcagtgccttttaatttttggcagtcaagtggagcgtaaacagtagctgtatggtctgatatgcattcctgattcagatacgggaagtatcctcatatgt

SEQ ID NO: 639896 - DNA, 188 bp, Homo sapiens
acccggggttttccttgtttttttttcctttttttaggtgaaggttatgggggaaatacccgtgttccgttttgaaccataatagtttgtttattccacatttggaggatattcttttttgttgtactcctgtttcaaagggtattcaagtaggttttccggaatatagaaatggaatttttcttcca

SEQ ID NO: 639897 - DNA, 287 bp, Homo sapiens
acgacagaagatagggttttgccttattcaatcgatgaatcaattctggatgtcacagatacatgggagtttttttggtgattcaccagaatccgtagcgcgacaaattcaaattcgtgtacgtcgcgaaacaggaatctacttatcagtcggcatcggtgattcacctgttttagctaaaatcgcacttgatctggaagccaagaaggcaccaattttgatggctacgtggcactatgaagatgtttctcaaagctttggccagtacttatctcacagacatatgg

SEQ ID NO: 639898 - DNA, 730 bp, Homo sapiens
atcttggctcactgcagcctccgcctcccaggttcaagcaattctgcctcagccctcctgagtggctgggattgcgggcgtgcaccaccacacacggctaatttttgtatttttattagagacagggtttcaccatgttggtcaggctggtcttgagctcctgacctcatgatctgctcatacctgtaatccccgcactttgagaggctgaggtggacagattaacttgaagtcagtagtttgagactagcctggccagcatggtgaaactccgtctctattaaaaataagccggacatggtggcatgtgcctgtaatcccagctactttggaggctgaggcagtaggatcatttgaacctgagaggcggaggttgcagtgagcggagatcagataaaactaaatggataaaaagaaaaaactaaagccagaaaggaaaatcggaaggaaggaaggaaaaattattcagataaacctaaatggattaaacgcaaaaactaaacaaacgttacctctgagaccttgttaccggagagatagtaatgccgagcaggttaacacaaagtactattaatcatttgggctatgttaccacattgttcctttctaagcttggaataccccttctggggacctttactatacggttggataccactttaggcaaggtactactggcgatcctacaatagtagcttctcggggcgcttttgcccgcagggttcctgcg

SEQ ID NO: 639899 - DNA, 111 bp, Homo sapiens
ggtactctagagatccatacccggatctgggtagaaaaccaacacaatttcatttaaaagacatttgaactctgattttctcatagtgaatatctgagcaatataggttac

SEQ ID NO: 639900 - DNA, 179 bp, Homo sapiens
tagagggtaagagatgggtagaagagtatgcctctgaaaatttattagtttattcttgtggagaataccaagaaaatgtgtattggcccatggctaaatatgatatatgccatttggtatttattggtcccaagtgtcttttggtaagaggagaataaacaattaaggatattcactag

SEQ ID NO: 639901 - DNA, 320 bp, Homo sapiens
tgctgattccgaggattcattcggcagtatttgtctgggcagctagatataccgcggtgggatcaattgggtgagtacccgggaacgacactaccgctatctaggcatgcaatacattgttcgcccttcacccgtgtagacatagattggtaaatccagagttacgacatgatcccgtggttgccccagttgggtgacaggagtatttagagtcgtggttgcttgtggtatcgatgaataccccactctcatcccaggccccattcttgactcgaatgtactcatgaatgttacataaagcatcctgtttgcggttatcg

SEQ ID NO: 639902 - DNA, 114 bp, Homo sapiens
  misc_feature (48)..(48): n is a, c, g, or t
  misc_feature (81)..(81): n is a, c, g, or t
tcaatgaccatctgcagtcctctctcccagcccatggtaccagcattngactctttactgtataagggcagcttttatagngttccacatgtaagtgagatcatggggtaccga

SEQ ID NO: 639903 - DNA, 710 bp, Homo sapiens
aggtgttccagagcagtgccaactacgcggagaacttcatccagtagtactcactctccatgcggtggagccggacgcatgtggcgggatggctgatgcatgggtggtggcgcggggcacggccggttctacgtgagaggaggccatccaggctcatcgctcgcatcggtgtcgccgaacgggatcggtcgcttctggttatcggaccgagagtggacactccgtctccatcccctgctgtactccgtgcgatcatttaggagaagatagatcagaagccattggtgcgggatcattctgactagccgagtctacaacccagggggcccctagatggagattgtggtaacctcaaattcgaatcatttctaatggcaggtccttgctccacgaagcctataactgcataaagattttccaagtcagcgatgcactgttggccgaatatgcagttgtgccctgacctgaaagtagaccttggtgttctgggaaagcagccagttttgccttggaacatagtgttcagagccttcacgagtggcagaatgtggattcggtagaagcttatgctacaatgcttgagaagcatctttgatttcagtgcactgaaagaactactttctggggcaaaccgatgaagatccgcattgatgctatgcatggaggttgtgggaaccgcatgtttagaagaactctgggaagaactccgg

SEQ ID NO: 639904 - DNA, 759 bp, Homo sapiens
  misc_feature (590)..(590): n is a, c, g, or t
  misc_feature (592)..(593): n is a, c, g, or t
  misc_feature (596)..(596): n is a, c, g, or t
  misc_feature (603)..(603): n is a, c, g, or t
  misc_feature (613)..(613): n is a, c, g, or t
  misc_feature (616)..(616): n is a, c, g, or t
  misc_feature (619)..(619): n is a, c, g, or t
  misc_feature (623)..(624): n is a, c, g, or t
  misc_feature (669)..(669): n is a, c, g, or t
  misc_feature (689)..(689): n is a, c, g, or t
catggagtcccagtccccagcaaggctccctgtacccatctgttgacattatgtcttgtgcagcatctttgctgaggacacaaggtcacttgtaaacagaggacgagaacgggaaccgagtacaaagccctaagtctattgtaagtgaaaactgagggaattcctgtcttctttagtgagtaatgatccatagatctagatacggtggacatatcattcaaaatagtcacttgagctcacaaaaaaagcaaggaagaattctcatgtcctttgtcttccttctgtagccattaactgctgaatccatgtgaggaagacaggcttcccttccttccccctccttagtgattttttctttaacagcataagtaaagaggactttctggttcattttgttcgtctgtttctgtcccgttttgtttacagatgaggtcttgctgtgttgcccaggctgcagtgcggtggctattcacagatgctatcatagcacactacagcctccaactcttgggctcaagcatcacgcctagcagtttctggttcctttaacagcaaaaggaaagagaggtctgattcttacctcagggttntnnggntgtcatngtttcgtaangtnttngttnngacactgcagagcacaaggctaaggttacagctgagatctttggnaccaaaggcagagcaagcanagcccgttgctgggcccaacactgtcaggcaggtggttctaattcggccctctcataattgccataggta

SEQ ID NO: 639905 - DNA, 328 bp, Homo sapiens
tggctcggtcccagttacggttggctgccacggctcacaccagagggatggggtaggaggcgcattgcagccaggcctgcacagtgttctttcctgcgctcgagtgacggacagtacccgttcattccccactggggaccccaagagtttttcacgatccagtaagggatcccatttttttctccatacccaacagccagtactgcatggtttactatctggagttttatggcaggaagtactggagtagatcccgttctatcatcatgaagtcctgagtcacctcaaaggcaaagctcacagggttgtagagggccacagcctccac

SEQ ID NO: 639906 - DNA, 460 bp, Homo sapiens
  misc_feature (317)..(317): n is a, c, g, or t
ggcttttaaagagtattgaagatgaaagggtttttctttcttttttaaaaaagaaaaacaaactatggattgtagataatgaaaagctagggtttgccgctcttcatggtctactcgtccgttccaaagtagttatatccaagaactgtttttccctgctcccgctacgctgttcccccgcgtattaaaagtagagaacaggcgattgatgtaagtgtacccgctccctgaagataccatgtagaagagttgtgatacaaagagagtagtccttgcgtagtgacacacaactgacttcgtgtaaatcgtggttagancttttcatttaacacctttgggaaagacaatggtacttgtgaaagtgggttcaaccaaacttcacgccaattacccgttttcgtgggagattattgatgggagcttctatagttggtgggtagtgtatccttacgccagagaa

SEQ ID NO: 639907 - DNA, 329 bp, Homo sapiens
aggatgtcacgcacgctcacgtgtattggcaggatagatagactcgctgttgtggtccaggcacgaggtggcacacaccgaccctaatagcatagacatcaggacactgcagtattgaggttagctagtaagagctcgtttaggaaccgagcactggcctatgacatatcactggccagacatggaaggagccgttccaggtgccatctttaccggcaatgaatgacattagctcccaagtacctggggagggcatacactgtctacacactatgaactaaaactcactggttgaaactaggaagccattaagtaacactggtagaacc

SEQ ID NO: 639908 - DNA, 472 bp, Homo sapiens
ttaattcattcaacaaatattttcaatgccagctgtgtctaagcattgttttgtctccagagataccagagtgaacagatataaattcctgctttttcaagcttaaattgatattataaacaaataacatatatattgtgttcattgaatataaaggttaggtagaaaaatcaagtgggggccagacgtggtggctcacgcctgtaatcccagcattttgggaggccgaggcggccagatcacctgagatctggaattcgagaccagcctgaccaatatggagaaaccccatttctactaaaaaaaaaaaaattacccaattagctgggcgtggtgacgcatgcctgtggtcccagctactcgggaggctaaggcaggagaattgcttgaacccgggaggtggaggttgtggtgagctgggattgtgccattgcactccagcctgggcaacaagagcgaaactctgtctcca

SEQ ID NO: 639909 - DNA, 487 bp, Homo sapiens
tacgttgatgggaaggtgattgatcctaaaaggtgccacagccatgaaaacaaaagagccggttaaaaaaatttgtgttggtggactttctccagatacacctgtaagagaaaataagggagtactttggtggttttggtgaggtggaatccatagagctccccatggacaacaagaccaagtaagagtgcgtgggttctgctttattacctttaaggaagaagaaccagtgaagactatcatggcagagaaataccacaatgttggtcttagtaaatgtgaaataaaagtagccatgtcgaaggaacaatatcagcaagcagcaagcagggagcgatctaggaggaggattagcaggaagagctcgtggaagaggtggtgaccatcagagtggttatgggaaggtatccacgcgaggtggtcctcagcatagctacaaaccatactacattattccatttgcaacttatacccaacaggtggtgaa

SEQ ID NO: 639910 - DNA, 1892 bp, Homo sapiens
actgcgttttgttaacgtgtgcctccatgtgtctgttgggtgtttcgtctgtcgccgccttgttagtgtttgtgttaggggaggcgttgccctacggttgcggctgcgttgtgtgggtgggtgagttgtcctgctctcgagctgagtctgttcggtgtggcggacaaggctatagaatgtggtttcgggctgagatggttggtccccccgcggttggtagtctgcccgtcggcaggtcatctgtgtttgtggtcaggagtgctgggtgtgtgattgttagtgaggggcgccccgccgcttcttgtgtacgcttgttgggtgggggtgcatagggagtggtggtgaggtggcaggtagcttgttgtgagcggccagcacactctgtgtgtcaagcagttgcgcagcctgctggtgttcacaagttgctggtagggtggtcccagtggggcgcactttggcctgtggggggtctctctcgttagagtggggatgatctgcgtgcgcccgtagggatgagaagggccgtgggaggcgcccaacataaaggggggattatgtaagtaaggggggggtggccctgagaggggagcaccacaggagaggttgctaagccacaagtccccgatgtgttgtcccctgccaagagggaggcccctcgggcgacaatgttgtcgcccaacgcaagccacccataggggccccacaggggtggcgccgacgaggggtgtgtccgccgcgagagagcaccgctccacgatgtgggtgtgcacgaagcgtgttccgaacgacaccgccggagagcacgcaggggtttgtgtgttgtcagaaaacgtgtgtaggggtagatggcctcccctgcgtgagatagaaccaccgacgtgggggggcccacaaaaagaggtgctcaacggtggtggtgtaagactgttcgcccccgccgatattggggaaatagttggtgtgtgtccgcacgcacaatatatacgcgccccccaacggttgggagataagatgtgtgaaagagggtgatttcttggtgaggtgtaccaccaccctcagaggcgcgcaactatgtgggagatatattattgagagaccccccctcacctgggagtatatgggagagagataatataaatatataataggtgtgtctcaataagggtgcacagcacagtgggggcgttaccacacacacggacaccacccacgtgttttgtgtgccacactacggggtgagaaaggtggtgttttaggacaacacccacagccgtttgaagaaagggaggagataagatattctctacatatgggagaataagagaaaaatctcgagtctcgatcgtcataatatctcacagagttgttatatgtgtgggagatatatagtgaatatatatctctctccttaagagagcgcgctacatatgagaagagatattgtgactcggtgatgttggagaaacgtgtggtgctcctgaaacacccagacacgtgttgtgagggtgtccccgaatataaatactcatgctccaccacggcgcccaaagggagaacatgtttgagaagagatggataatttgttctgcaccacacaccaagcgtgtctacaggagaatatattgtgatatatatggggttatatttatagctgacacatataagagaacaccacgtagaataccacgaagacaccacccatgttgtaccggaatatccaaggatagataaagaggagaaaataggatagttaattggggaccacggaccaatatccacccagatacccccgtgaaaaaagaaataaagctcccacatttttcgcctttgacttagaaaaaaggaccccatagtccaaactggagtttccagaaaagcattagttttatccc

SEQ ID NO: 639911 - DNA, 661 bp, Homo sapiens
  misc_feature (24)..(24): n is a, c, g, or t
ggggcaggtccgcacgcaagtgcngcaggcatcctcgtcgctgccgtccatgcagtcggcgtctgcgtcacagcgcaagcgcaggaggatgcagtggccgctcttgcactggaactggtccatgtcacagcggggggtgcagtctttctcgtccgagccgtccgcgcagtcgtggtctccatcgcatttccagcgccccgcgatgcagcggccgttggcacaggagaactcactctcggagcagggccgaggggctgggaaggacagggggagacaggcccaggagggtgggcacaaggactccaggcctcagtagtgccacagtcccgagcccaaggcccatccccgtgtctctgaaggccacagctgactgacccagaggccgagccagtcctggcagagcccactggctgctcctatggaacagctgggcacaggcgggctcgcacttaccccatgggacagacaccagagaggacacaggtccctggccttgccctcagaacagactgtgtttggggaggggagcgggggcaagaccactgagacaagcaccagggtttggggagaggtcaatcaaggatgatgggtagaggcacagcacagggatgggggtggggggagcgcgccggcgcccgccgggctccccgggggcggccgc

SEQ ID NO: 639912 - DNA, 238 bp, Homo sapiens
ggttccgttaggggtttttgtttttaaacttttttttcccccccctcctgggcaaattccgggggggaatttttttttttaattttagggcccccaaaccattttttggggggaaaaaaaaaaaaatttctgcccggtttttttgtcaggttcccggcccgggcggattgtttataaaccccttttggaaaaaatttttttttgggggggaattaattccgggggggtttgcccctta

SEQ ID NO: 639913 - DNA, 636 bp, Homo sapiens
  misc_feature (71)..(71): n is a, c, g, or t
atatgaactaatgtgctttctccccttattcctggtgtgccatccatgatacacatctccgtcttgcgctntacgttcacatcacataatgttacctaggggaactcccgctgtggtttagtatggcaaatatgtcagctcaaagtatgtattgatgctttaagtttgcctagtaggcacaacaagtatttcttgttccttttgccctcatgctcatatgttttaactgaggtgtacatggccaacgttgagtaatatctgtggaactggatgtacagtagagccatgggtacctcatgtatcccactggaccagtcccctggggcaatcacatcagtggctcagatctagactgctctatcccagccagaactctgctgctgttcatttccatcgaggaccacccaggataagcacacataagttagccttctcattcattaggtcacctaatctcttggtgttgcaggatgagagcatatatagatctcctgtctacgagagtgtgttcataattgtacgaaagggatatgaataatggacataagccaagaggctgtgtcacttgtgttaacgaggatggccatggatgacctcataatgagtctcaacaaatactgggaatccaaggaactg

SEQ ID NO: 639914 - DNA, 622 bp, Homo sapiens
  misc_feature (227)..(227): n is a, c, g, or t
  misc_feature (309)..(309): n is a, c, g, or t
  misc_feature (326)..(326): n is a, c, g, or t
  misc_feature (334)..(334): n is a, c, g, or t
  misc_feature (351)..(351): n is a, c, g, or t
aagcggcaacgtgagtaggtttgtcaccaggaaggaatataaccttttttcctgaaggaaaacactcagcttgcccattattattgttcatatattaaaccatttcaatctaacaaaaattgtaccaggggcacagagtgctaccaaaagtttatcatcaggaaatatggtcccttcctagttttgttttagtcatattacttgccagtaattcatcttcctcttanttttttcccttgtgagatttaattttggtgtaaatgtagtcttctgtagaaaatgtaatattaataattattatcacaattnttttaaaagagtaaatnccaaatantcacaatgaactaagcnctctaacaaactttacattttttaattcaatccctacaataactctgtaaacttcattttacagataagcaaattatgactcagagaggttaagccagacccaggtcatgtagttattaggttatgaaaccaggatttctcaaccagcactttagaccaggtgcggtggttcacacatgtaatcccagcactttgtgaggccaaggtggaaggatcacatgagaccaagagttcaagaccagcccaggcaacatagtgagaccctatctct

SEQ ID NO: 639915 - DNA, 118 bp, Homo sapiens
tgcacgctatgtcattcaatcataacaaaggtatagaaacaatagacacatctcccagaatctctcctcccctcaccaacctcctagggtagatgaatgacctaagcacagaaaaggt

SEQ ID NO: 639916 - DNA, 388 bp, Homo sapiens
gtcgacttttttttttttgcaacgatccttacacgggattcatttatgttaacatggcggcaaccacagctgcagacttcagtctagggaacgtatcaagcaactcaactttttcttgtcatgtcatgacttttctctgcttcttgggagcacttccagcatcctagtgtaactctgtataggtgctatggtgttacggaggacttaggtattgcactaaacacaatgaaaactatgcaagaaccacgagagatcactttttactgtgatacacaatttactggagagacgaatagctcagagacaattagcatcacagagcgttttaaacacagcattttaagtggatacttgtaacacttgagctcaccgtaacagcaaaagaagg

SEQ ID NO: 639917 - DNA, 116 bp, Homo sapiens
atcagtgagcagagatcgcaccactgcactccagcctgggcaagagatgagactgtgtctcaaaaggaaaaaaaaattaaaaatgttgctggtattacatcaaacctactctggaa

SEQ ID NO: 639918 - DNA, 337 bp, Homo sapiens
gttggttttattgtagaataaaatcttcgccccctggcatttaagtgctgaggcaaacgtgttcttaggtgaaatacaccaaaacattctccgcaggggcttggatatggctgctgcaacacatttgttgtgggctccttaattaatgataaaatttaagctaacccaagcccaaaaatgaataggtttttttaatttttatttttcactaaacaggcaattgaaatacatggtacaaaaataagtggtaagataattgtaaaatgaaatggacagaatattcaattttcccatctatgaaaatttcccaataaaaatcatagtttactttgtaaaa

SEQ ID NO: 639919 - DNA, 287 bp, Homo sapiens
  misc_feature (49)..(49): n is a, c, g, or t
  misc_feature (69)..(69): n is a, c, g, or t
gataataaaagatattactgatttattatttactatacaatatactttnatattttacagtgtactccnttttatttaaaaagttaactataaaacagcctcaggcaggtccttcaggagatattccagaagagggcattgttatcatagatgacagctccattcatgttactgaccctgaagaccttcaagtgggacaagatatggaggtggaagacagtggtattgatgatcctgaccacgggtaggcttaggtttatgtgtgtgtatgtgtcttagtttttaac

SEQ ID NO: 639920 - DNA, 847 bp, Homo sapiens
atcactctctgtggggggtggccctgctgtctcctcataatcactggatgccttggaagttcgtctgtggcatctgtccatcctccctatgggccgctggtccatgagactcacgcgatgggcaggggttctgggtaggacggtcagctgtcctctctcctggactgtgtcttacccagccctaaaccctgccccatggaagcccacagtgctcgacctagtcgtgctgctcccatctgatggtctagggtgctagtcctagtgacctgactaggggcgccagaggacactgtcgcttgcctcctcatccaaccaaggccccagacagagctcatagcccctgtacctgttctccctgatcccacatggcacagaggcgaggctcctgtctacagaagcttcctcattgtactactgccttgggaggaccctgtgttgtgctcagggaaggcctctttcaatggtcgtgtgccggctggggacggagcgggtgtaggatcccaacctctgtctaagtaatgtctggaggatggagcggtctacgcgcctgattagggggaccgtagagcagtgtgctatacgctgtctgtaccatgctagtggctagctactgacctgtggtgttgcggcccttcgtggtggaaaatgactgtgcccacccgtgaacgagaattcgatgtgcatgagcgcgtggaccagaagctgatagcccttggtacagtcaccattccttggccagaatgatggggttccatgccatggggaaatcacccaaactgcgtcccttgttcacatgaggggaaagccaggaccatggtctgcatggtctgtaattgtcctggcccag

SEQ ID NO: 639921 - DNA, 981 bp, Homo sapiens
ctcagtcttccaactgccaatatagaattactgggtacaatcaagttgggaaaggtgttgggtggggcaatacccatgagtcgatagtgataagctcctaaggattttctaacttgtacttttgtgaacgaagagaatgcataaataatgtcggtgaggataaagtacagatatttcatgtagaattaattgctagttatgatgcgttggtgggtagttaacgtgttcctgtgtgttccagtcaaacatgatcatgctacgaaacagcatgcttcctgagagcaatgtcacatgagtacactgattgttcttcctgcagtcgcccttgccaagtatgttcactgtattaatgtaatctaatatcgagtgattaattgtgtagaacatttatgatatcatgggcaacatccgatctgatctaccagccttaagttcacacgataggtcttccagcaaagtctgattagactaacagagatatttcttctgggacaggcgccttctgtggtaatttccgacagttctttgtacaagttccttcctcaagtttcagttctttccagtgtttgggtagctcactgtcactcactgaatagagaagacgtgtgcctatagttcctgtgacaatcatttgtgctggacagaatgatggatgtttaagatatcgccaagagtacttcaaagaaaggtctggtgaggaccaggacgcggagacaccactgttcaaggactcagtgtttcagaataagcctagacggaatgggagccatactatgtcacggtcaaaatcagcatgtcaggcatgttgatcaaaggcagatcatgaagaaagcatacgtaggacgtgtgtggaagaccgtacaccaggtggggaaagggcagaaatcaaaaaaaaacacaagtccaaggaagagattagcgcacgaaaaaacacaacaagaacaaagacagaagagacgcggatacagacatatatcacga

SEQ ID NO: 639922 - DNA, 171 bp, Homo sapiens
aacgacttcgcagcagcagcagcagcagcagcagcagcagcagtgcatagatatcaaaagggtttagaacagtcaggtaggatcacacaagtcaccgtgaagcaatacttctccacttagccaaagctaacaaaagatttctcttctaggtcaacctagaagagatcacgg

SEQ ID NO: 639923 - DNA, 661 bp, Homo sapiens
aaaagccccaaagttcttcatagttccaaaaggctcgaaaatctagaaaatgtccaccatttggaccttcccaaccccaggccaaggcttctttcgtcttcaaacccgttctgaccagcaagggtatccctttaatcccatttcttcaaaactccccaaatctgcccaaagcgttttaacaattttgcttcatttttacttttaaagtcgatgaccaaaggttcccaagaagtctaatgccctcacatacacataccaggcaaatttatgtaagcgtgcttaaaaccacagaccaacctagaatcgttatgcgtgtgttgaactagtcatacccaagcacagggcagcaaaaaaccgtgttgaaactgttaagaacttttccacaactgttgtacaaaagtccgctacctctgacgatatggttccatgctggccacaacgtggttgatacttcgcaactgcaagtcggcttactttaggcttattacaaccattttatcagcctttgagcctactattgttagaataaatagcatatgtacatccaccgctgaataaggtggcttggtgttaagccggtgcacagtcaacaaccagtcctttatcatcgatttctccaatcgttatgagtccccccactgtgaatccattaataacatgt

SEQ ID NO: 639924 - DNA, 441 bp, Homo sapiens
agtttgcagtggtgtttctgtgcatggttatggtctgggtgaaaaaattatgtttattagcgtcccaaatctaaagatctgtgaaaatgagtttggaggtagtaggtgaaaaaccaagggcctagtctggaggagagagtctaattctggcactaagaatctggggtagagtcaacatttttccatgaactttgagaggaaatggttttggggagaagcagcaatgtgggaaaatgcagcacggcacagtagaaaagcatggactttggaataatttaaatctggtctgaggccaggcgcggtggcgcacatctgtaatcccagcactttggtaggctgaggtgggaggattgcttgggcccaggaggttgaggctgcagtgagccatgatcgcaccactgcactccagcctgggtgacagagcaagaccttgactcacca

SEQ ID NO: 639925 - DNA, 284 bp, Homo sapiens
tttaggctttttttggcccccggggggaaaattcccctaaagggggcgcccccccccttttttccccttttttggttttttccggaaccccctggggctccttttttttccccccccgggttgggccattaaaatcctattttggttttcgggccggtccttggccggggggggctttaggggcccccccaaaaaaaagggaatttccccccccccccaacctcctttttggtttttttccaaaggggaaaaaaaaggcccttaaggttttttcccccttttta

SEQ ID NO: 639926 - DNA, 407 bp, Homo sapiens
  misc_feature (157)..(157): n is a, c, g, or t
  misc_feature (208)..(208): n is a, c, g, or t
  misc_feature (245)..(245): n is a, c, g, or t
  misc_feature (289)..(289): n is a, c, g, or t
  misc_feature (317)..(317): n is a, c, g, or t
ccccggtactcgccaccttctaccgcgcccatcccaaggtcaccttcaacatcgtaatcgccagtgcatcggccaccctcgacgccctgtgcagcggcgaggcagacctgggcctggcgttctacctgcaagaacgcgccgacgtcgaagtcactgnccattgccagctgtggcaccgggtgctggtcagcgccgaacaccccttcgnccaacgcgaaagcatcgaattgagcgaactgcaaggncagcctctggcgattcccgactcggcctacggcgtgcgccaggncctggaagtggccgcgaaaaaacgcggngtcaccctcgaaccggtgttcaccaccagctccctggaagtgcagaaaagcctggcccggcaacgggcagcggtgctgattttgccccag

SEQ ID NO: 639927 - DNA, 861 bp, Homo sapiens
cagagtggccgcagtccgatctttgccctcgcatcctgttccaacgctgatggctggtgtgagtggcggtgacgccatctgtgtgggctgccatggcaaacggaggtgaggacagccctgtgcccagaggtccagccatatggacaagcagttcctggtatgcagctatctgcctggatcggtaccagtgccccataggttcttccttgacctgcactagccttgctgtgagagatgtcgtccggaaactatatccctggccagtagcctgacgctatcctgtccagtatgccgacagacgtccattcctcccagaagcaagggctagtcgtcaggctacttgcaggaacaatttcttcagtcatgcagcctcatggaggcaagtgcaagcaggcacctgatggggcccacgaccctggaggaccccctagaccgcttcacgtgtagtggctgtgccgtcctctctcctgcccctagtcatgaaggtgcaagacgactcgacgttttagctgtgatggcctgtgtagacggccctgtgtggtgatgtgccgtcgccgtggatgcatcgtgacgcatggccccggtgctgctcgagggagtgtggttgcgagcaagctccacattgctgtgtccctgcgaggcgccaggctcgcaggcctgtcgcgtggccgtattgcccatgagatgctccgcagtcaactggcctttagtccgggcagcatcccagccagccatctgacttggcagcgcaattgtagaacgcccttggtccagatctagtgcatcctttccgaggaccctgtgagcaaagcactgttggcagcagccatgcaggctcctggtccggaaacctggagacca

SEQ ID NO: 639928 - DNA, 148 bp, Homo sapiens
  misc_feature (97)..(97): n is a, c, g, or t
  misc_feature (126)..(126): n is a, c, g, or t
tctcgatctcctgacctcaggctatatgcccacttccacctcccaaagtgctgggattacaggcatgagccactgtgcccagcctggtattgataantttatattcagataatttgttatggctcnttaatatcccacaaggggctct

SEQ ID NO: 639929 - DNA, 107 bp, Homo sapiens
tatgtatgaggatcaactctatgatttttgattttttaatcttttatttttatcaaactccgtattatgctatgtgcttaattcatggcatgggcacattctccaat

SEQ ID NO: 639930 - DNA, 472 bp, Homo sapiens
tggctgattatcagatctagtagttttccggtggaatctttaggtttttccaaatataagatcatgtcatctgcaaacaaggatacttgacttctaatcctttctaattgggatgctctttctttctttctcttgtctgattgctctagtgaggacttccagtactatgttgaatcacagtggtgaaagtaggcattcttgtcatgttcccggtcttagaggaacggctttcagttataccccattcagtatgatactagccgatatataggtctgatatatatggcctataatgctgtacgcaggtatgtacctatccatacccagtttttagagggtttcaatcatgaaaggatattgaatttgatccaaaattactatacagcaccaattgaaataatcatttgtttagtgtcctgccattctgttgatatgatatatcacattacttgatttggcatgcgctgaacta

SEQ ID NO: 639931 - DNA, 895 bp, Homo sapiens
gcgctcgagaggcagggttcccgcgtttcggcgggttgtcctagagccagcccacgggtccaaccgccggtgggaaacttgtgggtacaaaatggttgacacccagacgtggagttaaggcccctgttagggggtaaaaagtgtctagttcagttgccctgatcttgatatccacagcgggcgtccaataatttgcttccctgggaaacatgggagggctcttcgtttggataactccagtagtccctacccctgggggtcttcccacgacaccccggccgccctgtgtgatctcccaaggccccaaacactttctgagacacccacaagccccctattactttatgcgcgcccccttactggagatattttggccggggacccacttagtaacgtactctccttcgggggcgaaacatgctccccagatcttccggggacaactcttctgcgctaaacagtcaccaactgcatgaagtttcattcccccgggaaaccaacctgggaacaaccacccccccaagcccgcagtaagtatccccccccgtttgttagggcacccctatcggtagagtccccaaagtggtgtctcccctatgtcaacaagctctctttagggagataatcccctaaacaataacccggaaacaagggagaccttgacctccatacagtgcccgaaatctgacgtaggggttcgaacactgcggcgggaatatatctctataatcgagggcccttgtatcaatggtctcttgatagcgccggcccaaagtgcttccgaggattcaatagcgagacacccgcatttaagtcgtaagaggtaagatccagaaaagccccttatttttcgcaaaatacggccctatctcctcctttcgccccacatagacaa

SEQ ID NO: 639932 - DNA, 1006 bp, Homo sapiens
  misc_feature (20)..(20): n is a, c, g, or t
  misc_feature (77)..(77): n is a, c, g, or t
  misc_feature (141)..(141): n is a, c, g, or t
  misc_feature (384)..(384): n is a, c, g, or t
  misc_feature (396)..(396): n is a, c, g, or t
  misc_feature (400)..(400): n is a, c, g, or t
  misc_feature (406)..(406): n is a, c, g, or t
  misc_feature (419)..(420): n is a, c, g, or t
  misc_feature (423)..(423): n is a, c, g, or t
  misc_feature (428)..(428): n is a, c, g, or t
  misc_feature (438)..(438): n is a, c, g, or t
  misc_feature (447)..(447): n is a, c, g, or t
  misc_feature (454)..(454): n is a, c, g, or t
  misc_feature (478)..(478): n is a, c, g, or t
  misc_feature (490)..(490): n is a, c, g, or t
  misc_feature (513)..(513): n is a, c, g, or t
  misc_feature (518)..(518): n is a, c, g, or t
  misc_feature (523)..(523): n is a, c, g, or t
  misc_feature (531)..(531): n is a, c, g, or t
  misc_feature (547)..(547): n is a, c, g, or t
  misc_feature (551)..(551): n is a, c, g, or t
  misc_feature (558)..(558): n is a, c, g, or t
  misc_feature (561)..(561): n is a, c, g, or t
  misc_feature (565)..(565): n is a, c, g, or t
  misc_feature (598)..(599): n is a, c, g, or t
  misc_feature (603)..(603): n is a, c, g, or t
  misc_feature (611)..(612): n is a, c, g, or t
  misc_feature (621)..(621): n is a, c, g, or t
  misc_feature (640)..(641): n is a, c, g, or t
  misc_feature (658)..(658): n is a, c, g, or t
  misc_feature (663)..(663): n is a, c, g, or t
  misc_feature (668)..(668): n is a, c, g, or t
  misc_feature (763)..(763): n is a, c, g, or t
  misc_feature (934)..(934): n is a, c, g, or t
  misc_feature (980)..(980): n is a, c, g, or t
tttaaaattttaatcttganattggttaaccttaggtaaacactaaccatatttttttatatacattatatacacgngaaataaatagtcttccaaatagcattttttaaaaagcatcattatatacaattaaggcttcangccaggtgtataaatatacaactcactgagaattcaatttgcaaagcttccattagtaaaaacagaagtcagaagtgaccaggatgtacagccaataatatgggttgggcaaccctaatccaaaaatccaaaatccgaaatgctccaaaatccaaaactttttgagcaccaacaagacaacaaatggggaagcccctcacataagttaccacaaaccatgcttcatgtacacaactatttaanatatcgtataanattnccctcnggctatgtgggtnnggngtggntggggcatcngtgggtttngtgtttnggctcgggtcctattcccaaaatntctcattatgtntatgcgaacgttccaaaatctgngaatnatctnagatttgngacacttctggttccnagcnttttggntangggntactcaacctgtacaagcttcgctttggctagnnagcnatcacagnnacaagagangcacacaattggcttgggnncatatcttgggataggnctcgnctggntatgtcttcagaagtttaacagtgatacaactttggcacgatacagattaaaacaatgtccttagaaaacctaagtacaaagaaaatcattcttnctctcctgcttggtgtcacacttcctcccgaatctcagccataaaaagtccaaccgttggcacagatgttctcctggttatacgttaataaaagggcttaggattttatggatggctctatataaaaaaaaagtccttgtttgtctcacgtctggggcatataggtgggantggctgcaaaagtcttcatggagtttcagagatagactttgcctcnggaaatctgagtcctctccctggctg

SEQ ID NO: 639933 - DNA, 617 bp, Homo sapiens
  misc_feature (168)..(168): n is a, c, g, or t
  misc_feature (171)..(171): n is a, c, g, or t
aacattaggtcaggtagcgaggcccgggtgttgagtagacgtgactttcaccttctgccggattgtgaggcctcgccagccacctggaactgatccacacccaagtccgctcatcaccctggagactcagaaggataccctattaaacttatgaaaacccatgggcgnacntctgtgtccggaactctggaagtcaaatcttatctcctgggagtggaacagcagaatccctggatggttctgtctttgaccttcctgtatccttcactctggacaccaccccatcagcccttcaaaaccctcatgggaaagaggagttgcagaccagtggctttggccagcacctgaggcttccagcagcagctccttacacagtggcgactcttaaagtccaatctgttagcccaagggacctgaacctccatctgcaaccagcaatggcacaaggtagactctcagcatttgtgctatgccgttggggaagagcttcaatttgtctgcaaacgatgctccatcagtctcatttggttccctgtctttggggagcctgggaatattgttctcgctccccgagttctgaatttcccaatgttaaagagatgttggaacccaaaaaa

SEQ ID NO: 639934 - DNA, 244 bp, Homo sapiens
gccactgtcgggtacaggaataagaatgtgagacagaagacatggcggcctaaccacccgcaagccttcgtggggagcgttcgcgagggacaaggctttgcttttcgagaaaactgaaatacagcaaagttacaggaattgctacggaggaaagaggtcaacgtcactggatctcattcacagatcgataccagatatctgaacatctcttttggctggggaggaagcatgggggcagcaggaa

SEQ ID NO: 639935 - DNA, 1261 bp, Homo sapiens
ggagagaactagtctcgagtatttgtatgttttatttttcggagggctgggaaatggtaaattcccttttgtacagttagtgctattaataatttcgtcgttgcaaatttacaaaggtgcacgttttataaagaaaagcccaagtgatgcacagagtgtgtgactccataagcaggtggtgcccacaaccaactccgtgccgtggtggcccttcatttcgtgccgtgctgtgctctaagaagggatacagcacaagagaggcgtggggacatcagaaatacccctttcgacagaaaagagagccaaaaccgaggttgtgacacagtgtgggggaagacatccaatgtataaaacaaagagccccgtggggaccaactgtgacacgaggcagagagaaagccagtagcccaggcgggaaacgcggcgcacgagagcacggagatcatatacacggcggaacaaccagcgcacaacgggacaaacaacgcaatgggggtctgaagcgccatacatattcaccacatctagcagacaagatacacacaccctagggggcgcactgagacggcgacacaactgagaggaccacagggccaaacaacatcggggcgctaacggctcgaggcaaagttgggagccccatacatcagcgggtgtcgggcacgacaaacacacgtgatggccccctacaattgagagcaagaaaatcataagcaacgcagaggcgcgccgcaggaggagaaaaagaggcccccgtggcagacatgctggaccccaacaggcagcgccgtggcacgggtagaaccacacaaaagatggcaccccacccgtacgaagcgagggcacgggggcccctccaagaaacgccccggtggaacacaccacaacaagcaaacagcggcatacgtctgcgaacgccaaacggtgcgaacggcctaccaacacaagtagggggagagccacgacattaacgaaaagccaacgatgtggataatgatggtcccccacagacggaagcaaacaacggggggcggctcataatagtgagatcgcacccacactaccagcagcagattaggatacgcggcaaacagtaggagaacaaaccccaggcgggggtagcaagctcgtggaggagggacgaaaaaagggggagggcagcaaacgaaagcggggagggagacaccctccctctatagaagaaaacaaacagggccgcgagaaaacaagcacacagaggggccatcaacacacgcgatac

SEQ ID NO: 639936 - DNA, 135 bp, Homo sapiens
gggcgtcagaggtccctgtatgcgtctcacggataaatgatcagatgaaagggctcagaggtgacacaaacctactttaaacagtttcgaaaacttaggattttagcctaatacctgaacacaactatatctttc

SEQ ID NO: 639937 - DNA, 597 bp, Homo sapiens
ctctccaccttactatcagacaaccttagacaaaccatatacccaaatgaagtataagcgatagaaattgatacctggcgcaatagatatagtaccgcacgggaaagatgaacaattataaccaagcatagtatatcacggactatcccctataccttctgtataatggattaactatgaataactttgcatggagagccaaagctatgacccgcgaaaccagacgaggtacctaagaacagctaaaagagcacacccgtctatgtagctagtgggaagatttataggtcgaggcgacaaacctaccgagcctggtgatagctcgattgacaagataggatcttagtgcaactttaaattcgcccacagaaccctctaaatcccctagtcaatctaactgttagtgcaaagaggaacagctctttggacactacgaaataaccttgtagagagagtaatgctgaacacccactatctataataatcccaaacatataactgaactcctgacacccaattggaccaatctatcaccctatagaagaactaatgttagtttaagtaacatggcattttactgcgcatgcctgcggtagg

SEQ ID NO: 639938 - DNA, 658 bp, Homo sapiens
  misc_feature (209)..(209): n is a, c, g, or t
  misc_feature (212)..(212): n is a, c, g, or t
gactgttgagctagaggaagatggtcctgtgtgtattaacctcagtgctcaacttcctgatggattatttgagtttttctgtttctgctgtgaagtcacgggatcccgaatttttcttcttgaggttggcgggatccacacccaagtccgctcatcaccctggagactcagaaggataccctattaaacttatgaaaacccatgggcgnacntctgtgtccggaactctggaagtcaaatcttatctcctgggagtggaacagcagaatccctggatggttctgtctttgaccttcctgtatccttcactctggacaccaccccatcagcccttcaaaaccctcatgggaaagaggagttgcagaccagtggctttggccagcacctgaggcttccagcagcagctccttacacagtggcgactcttaaagtccaatctgttagcccaagggacctgaacctccatctgcaaccagcaatggcacaaggtagactctcagcatttgtgctatgccgttggggaagagcttcaatttgtctgcaaacgatgctccatcagtctcatttggttccctgtctttggggagcctgggaatattgttctcgctccccgagttctgaatttcccaatgttaaagagatgttggaacccaaaaaa

SEQ ID NO: 639939 - DNA, 1372 bp, Homo sapiens
  misc_feature (28)..(28): n is a, c, g, or t
  misc_feature (38)..(38): n is a, c, g, or t
gtgcagacccgcgtgtggcgcaggcaanggacctcaanataaacagcctctaccttgcgagccgtcttccccaggcctgcgtccgagtctccgccgctgcgggcccgctccgacgcggaagatctgactgcagccatgagcagcaatgagtgcttcaagtgtggacgatctggccactgggcccggtgaatgtcctactggtgtgaggccgtggtctgtggaatgatgaagcctgtgcgcacgacgcgggcatatatccgacgggcctatatgcgtcaagtcccagtcaggatcgtccgtgtcccatgtacccacctcatcttggtctaccttccggccgatgcatgacgcctgcacgcatcacttgggcatccataattccatgtgggccccccacacggcggacaccttctggcgtcggaaccttccaatcttccaatgcgtgcacagcgcggaacttagggccaccgtatgggccctgataaacctttacaccgcctttgggccaggcggacctaaaccgcaacactggtgtggcattggtgtggtcccccaacgccgaagcatattcataggggccgccctaagctcactggctgtgctaaatccccctaggggccacacacaccggatggcgccaacctgggccggcacacccaagaccactgtcgcacaacgggcacaccggccaacacggcccctctggggacacgtctgtaaacttggcgccctcacacatagcgctttggcgccccgatatcatggtgccccacctatatacacgtcccacacctacaccccccgctttgtggcaccatcaggggtggcgcacccacagacatacagatccgccgatcccacaagttcgtgcggggtgcctacccccgaagcgtataaccccacatgttggttgtgcatcccagtttaaccctcggcgggtatttggtgcacaaccaccacctgactagtgggccaccccctgagaaagcacaccgcgccccgaaccagtaattacggggcggcccacaagcaaccgcgctccaccgctcttcctcgggcacaaccacgcgcaccccaaaaggacgggggagcaacaccacagcgcccactggtagtatggggcgcccgccgctttaagaacctgctataacaccccccgcagcatttactgtggggcggccccttctgctcgcctgtgcatcaaaccttgctgccacaccacaagcgtcttacttatgtaccccacaggtgcggacggcgaacacacattcccgaagacctccaagaaacacattttatccagtcccaccatagggcaaccgtcccaatgcactaccacacacgccggtggacacaacccccatgatacggg

SEQ ID NO: 639940 - DNA, 262 bp, Homo sapiens
aggcatagtggctcaggcctgtattctcagcactttgggaggccaaagcgggtggatcacttgagcctaggagttcgagaccggcctgggcaacatggcaaaactccacccttacaaaaaatacaaaaactatctggcatggtggcacacctgtagtatcagttactctagaggataacctgagcccagtaagtcaaggctgcagtgagctgtgatcatgccacagcactccagcctgggtgacagagtgagaccctgtttc

SEQ ID NO: 639941 - DNA, 164 bp, Homo sapiens
gcgtcacaacatataggtaaagaggaactgctggccacgagtacggggtgtggccataatcctgtggagcatccttttggagtgtgtgcaaccagcagcacatcggcaacgccctccaccatccgcagagatccccttgtggccgctaagtgggtctcattgct

SEQ ID NO: 639942 - DNA, 1659 bp, Homo sapiens
ttttttttttgagactgagtcttgctctgtcgctctggctgaagtgcagtggtgtgatctcggctcactgcaatctccgcctccagggttcaaatgattctcctgcctcagcctcctgaatagctaggattacaggtgtgcgctgtcatatccagctaatttttgtatttttcgtagagacggggtttcaccatgttagccaagatggtctcgatctcatgatccacccacctcggcctcccaaagtgatgggattactggcgtgagccaccatgcccagctatttttttaaccaatatattagctagcttttttccccagaataattttccaaaaatacatttaatagggaataaaagttaaaagaactttcagtggtttaatgctgttacttttaatatttcaagaatctgactgcagccatgagcagcaatgagtgcttcaagtgtggacgatctggccactgggcccggtgaatgtcctactggtgtgaggccgtggtctgtggaatgatgaagcctgtgcgcacgacgcgggcatatatccgacgggcctatatgcgtcaagtcccagtcaggatcgtccgtgtcccatgtacccacctcatcttggtctaccttccggccgatgcatgacgcctgcacgcatcacttgggcatccataattccatgtgggccccccacacggcggacaccttctggcgtcggaaccttccaatcttccaatgcgtgcacagcgcggaacttagggccaccgtatgggccctgataaacctttacaccgcctttgggccaggcggacctaaaccgcaacactggtgtggcattggtgtggtcccccaacgccgaagcatattcataggggccgccctaagctcactggctgtgctaaatccccctaggggccacacacaccggatggcgccaacctgggccggcacacccaagaccactgtcgcacaacgggcacaccggccaacacggcccctctggggacacgtctgtaaacttggcgccctcacacatagcgctttggcgccccgatatcatggtgccccacctatatacacgtcccacacctacaccccccgctttgtggcaccatcaggggtggcgcacccacagacatacagatccgccgatcccacaagttcgtgcggggtgcctacccccgaagcgtataaccccacatgttggttgtgcatcccagtttaaccctcggcgggtatttggtgcacaaccaccacctgactagtgggccaccccctgagaaagcacaccgcgccccgaaccagtaattacggggcggcccacaagcaaccgcgctccaccgctcttcctcgggcacaaccacgcgcaccccaaaaggacgggggagcaacaccacagcgcccactggtagtatggggcgcccgccgctttaagaacctgctataacaccccccgcagcatttactgtggggcggccccttctgctcgcctgtgcatcaaaccttgctgccacaccacaagcgtcttacttatgtaccccacaggtgcggacggcgaacacacattcccgaagacctccaagaaacacattttatccagtcccaccatagggcaaccgtcccaatgcactaccacacacgccggtggacacaacccccatgatacggg

SEQ ID NO: 639943 - DNA, 1279 bp, Homo sapiens
  misc_feature (447)..(447): n is a, c, g, or t
  misc_feature (496)..(496): n is a, c, g, or t
  misc_feature (623)..(623): n is a, c, g, or t
  misc_feature (811)..(811): n is a, c, g, or t
  misc_feature (831)..(831): n is a, c, g, or t
  misc_feature (835)..(835): n is a, c, g, or t
gaggccgcaagatcctgaccttggtggttggtgaaagcaaagttgaactgtggctccattctcaggcttcatcgccctctgtgggatccctggtgctgctgttggccatagccatgccgtgttggctactggcccaaggccaccagggaccaatcgggaggggcgtaaccagctgccgctctgcgggcagcagccaccgggtcccaaccacggccaacagcagtagcagtggcagcaaaaaccggtccagggagccaccctagagctccagggggtgtcaactccagttccgcggcgcgcccaggagcacgcctccagcacgagccgcctccccttcctcctcctccacgtccgtgggcttcttcttccgcatcttctctggctacctgcactctgacaagctcaaggtcttcgggcccctcatcatgggcatcggcatcttcctcntcatctgcgcaaacgcggtcctccacgagaaccgggacaagaagaccanaatcatcaactgcgggacctctactccaccgtcatcgacgtgcacagcctccgcgccaaagacctggcggccgccgcggccgccgccgcggccgccgccgcctcttcgtcgtcgtctgcccccgccncggcgccccccggggccataccgctcaacggcttcctcagctacgtgcagtcgcggggcctggagctgaagcccgggggctgcggtggctccggggacgccttcggagcggcggcgatgctggccaagggctcgtggcctcctcaccccgcggcgccgagcggcggccgccctcggggcgccgcgtcnccgccggacctggcctcttncccncgctgtccgcgggagcccccgagcctggccgaggccgtgtacagcgtctaccgcgagcgctcgggcgtggcaggcagtcgccgggccgccgctgccaccgccgccgcagccgctagcagctgcagcagtccggcgccctgcagcccacccgagagctgggggcgccagagcacggccagctccttcgtggactcctcgctgagcgccttcgcgctgctgcccttgcaagggggccgcgataggggcggggacgcggagggcgcgagctgcagctggcagaggcctccgggggaacgcggctcccaggagatcccgaggggcgagctcgacctgagcatgaccaacctccgcggcgcagtgggcagcatgcgcggggcgcgccgggagccggaggagcccgagggcgcggtagcggcgcgcgccgccagggggcagggcggccgc

SEQ ID NO: 639944 - DNA, 326 bp, Homo sapiens
  misc_feature (116)..(116): n is a, c, g, or t
  misc_feature (125)..(125): n is a, c, g, or t
  misc_feature (132)..(132): n is a, c, g, or t
atgatcagtttgattgcccggctttattgcctttacaggaatgtgatactcagggcttactctataccccaatgagttttctttgatcctaagaccccccctgaagttgtttaggntcttttggncaaacangataaacttcttcagaaactttttttttcctttggcaggaaggggtcttgctgcaggtaactaatgaaaaagtggtcccccccagagttttcaaaaaataagaaattttggcccctttgaaagtagttcttgttggggccttcatttaaaaagccctctttaaaataaaagggaaatgttttttgataaaccca

SEQ ID NO: 639945 - DNA, 505 bp, Homo sapiens
  misc_feature (116)..(116): n is a, c, g, or t
  misc_feature (125)..(125): n is a, c, g, or t
  misc_feature (132)..(132): n is a, c, g, or t
atgatcagtttgattgcccggctttattgcctttacaggaatgtgatactcagggcttactctataccccaatgagttttctttgatcctaagaccccccctgaagttgtttaggntcttttggncaaacangataaacttcttcagaaactttttttttcctttggcaggaaggggtcttgctgcaggtaactaatgaaaaagtggtcccccccagagttttcaaaaaataagaaattttggcccctttgaaagtagttcttgttggggccttcatttaaaaagccctctttaaaataaaagggaaatgttttttgataaacccacccttttgttggggttttttaaataaacccattcccaaatgagtgttgtttgtaaacccgtaacccccaattggctaaaaagataaatgtttcctgtttttaattaggttttgtgagtagaccgattcccattttttttttaaaataaagtttttaaaataaaacccttttggttccca

SEQ ID NO: 639946 - DNA, 884 bp, Homo sapiens
ggcctcgctcaacatggcggccttctgtgcccgccccctccgctaacgggcacgtaactccgtccgaacgcgagtagacgagggcggcggagatggcggggggatggtggcttctcgcaagaactccgcgacctactgacccggcgattgacaggctccaactacccgggactcagtattagcccttcgactctcactgggtcctctgcatcgaagaggcggcttccggatgtagccctcggggaagccccagacgcacagctatgagtcccttcgatgtgacgtctgcgcagaaaacatgttctgatgtccagctcaaccggcccaacaagaggagtgccatgaacaaggtcttctggagagagatggtagatgtgcttcaacaagatttcgagagacgctgatctgtcgggcggggtgatctctggtgcaggaagaaatgttcatctgcaggtattgagcctgatggacatggttcggacatcctgcccgcccaatggagatgatgtggcccggatcagctggtactccgtgacatcatcactatacgcaggagaacttcaacgtcatcgagaggtgccccaagccggtggaattgctgcggccaaggggggctgcatggcggaagggggacttgtgaccggctgtgacattcggactgtgccaggatgcttcctccaaggtgaagaagtggccgtgcggtggtgcgaagtaggacacgggccggccaaggtctcggaccacagcggcacagagggctacgccgcaaagaggtgaagccagggcagggggcccgcgtcccacaaagaagcggggccacgggaaacaaacccgggaaacaagtcgcagagggacacaatgagggacaccaggaaaaacatccc

SEQ ID NO: 639947 - DNA, 415 bp, Homo sapiens
  misc_feature (15)..(15): n is a, c, g, or t
  misc_feature (20)..(20): n is a, c, g, or t
  misc_feature (47)..(47): n is a, c, g, or t
  misc_feature (61)..(61): n is a, c, g, or t
  misc_feature (77)..(77): n is a, c, g, or t
tatgcccaaatgttnggggnaattggcagcaggaccatatggcaggnaggaccaaaggtanagtggccctcaaggancaatgggagggtaaacattgtccatgttcccctatccttaaagaaatgcatcggctgggcgcagtgactcctgcctgtaattcccagcactttgggaggctgaggcaggaggactgcttgagtccgggagcttgagaccagcctgaacaacatagcaaaaccctgtctctaaaaaatttaaaaattagcaggacatggtggtacatgctgtggtcccagctactcaggaggctgaggcaggaggaccactcaagcccagaaggttgaggctgcagtgaatcatgatcacacaactgcactccagcctgggtgacaaactgagaccctataaaagaaag

SEQ ID NO: 639948 - DNA, 1039 bp, Homo sapiens
  misc_feature (730)..(730): n is a, c, g, or t
tggtcccagtcagtccgaaggctgcggttgcaaaattaccgcctgcggattaactgcaaaaattgttttgtccgtgccgctgttgctagcggcctgtgtgtccgcgcctttcctacggggggccgagatctggtgtctccaaaaatggcttgggtgtaccatctttcattggctggcaagggaatcttccatggctcttctaacatctctattcttacaaaaaatctgggaatctggctagaaaattgtcctctctatttttcttgaaagagacgcgcgatattattctgtgagagctctagatataccactctctgatgagacttctttgcacaacaaactcgtggggccgttgtctaacagcatatctcgcgcggaagaccttgcgatatctttggccccgcggcgataccattggtgggtcctggacgagacagtggttcccacggcgcgagaaaacaagcaacaatgtggggtaacacaagttattacactatataccaaggcgcataaacaaacggggggataatttgtctacccatgttgcaaaccgttgtgagacacccctgtggcaccaacactggctgtagcgtactagtatcactgccaccgacgatgcatcttggcgcggaccaacatgtcgcaacttaccacccataaattttcaacaccgggacaaggcggaaccacattatacttcggtgatgaaacaatcaagcgcgacaaccanagtgatcaccaccccatattgtgtgtgtgaacactgacttaaccccaaatgtttagggtgattttaaagcgtaacacaccccgttagatataggagcgactaacaaatgcataactcatccgaggaatgcggcccccccatgtgtggacataacaaacgtgtctaatttatattgtgaacgatagctaaacccacgaggggggcttccaaacaatgaagtgggtgaaatctcccccaaaagagccacaacagcccgcatatatacgggacacaaacaagtatgcggtgaattcatggaaacagacatac

SEQ ID NO: 639949 - DNA, 340 bp, Homo sapiens
tgatacgactcgagctcggtacctgtgggtagcagcaacctaggatatttgcaggtgtaaagccatttaccaagatagttgtaggtaagaagggcagatttattagagaaattgtgaaaatatgttgcagtgggcagctcagcagagaaggggctacctgcaaagaggcgagggctggaggaaagttttatagggtcctgctgaagggtgctacgtgtgaaatgaggtcattgtgcccgcaggttgtttgtgattagctgtctctaacaattgttcatacaataattgttcattattgttctcaacttggggctctccccaacctggggacccttcctta

SEQ ID NO: 639950 - DNA, 473 bp, Homo sapiens
agcagtgtggggcacccgcagtgatgggggtaagcgctcacagatcaacaggatcccaaggcagaagaatttttcttagtacggaacaaaatgaaaagtctcccatgtctacttctttctacacagacacagcaaccatccgatttctcaatcttttccccacctttcccccttttctattccacaaaaccgccattgtcatcatggcccattctcaatgagctgttgggtacactacccagacggggtggtggccgggcagaggggctcctcacttcccagtaggggcggcagaacggccacttcttgaaaccttttctggccctccctccccagctttacagcagggctggtctgtgcttaccaggctccccacagtgtgtcacaatctattacaatgccgtgcttagaggaggcaagacaataaacccccacagcgagtgcctcgaggggagatccctctaagagtcgac

SEQ ID NO: 639951 - DNA, 114 bp, Homo sapiens
ttcgtccggttgagaattaggataccgtctgcccgcaaggagctcgttgcggtgcagcgggtctcctcatcttctcagaactgggcggctcggcacatatcctcgtcagcttcc

SEQ ID NO: 639952 - DNA, 446 bp, Homo sapiens
gcctcttcccacccgtccccaccttccttttcggggggcggcccgcgcggcgcggctgacgaccgcgtgtggtgctgttctctctcccccccaccgtcttcgacctcctcgcgcgcacctcgacctctcctcctctccctctcgctcgacgcaccccaacgatgatgcctcccgccgatcgtctttgagctatggactcgagtgcgcccacgcacagcgctcaagcgtctctcctctctccctacgccgcgcccacgcgccccgcttcttctccgacttgctggcgcgcgccacgctccgcgccagccacacgccccacgctcgcgcgcgctgctggcgtctctagctcgcctacacgcgggcccccccccttctccgacgcactcacacgcgcgctgctcgctcttctcgcgcaagcaccttctcttttcctcccctcacctact

SEQ ID NO: 639953 - DNA, 446 bp, Homo sapiens
  misc_feature (446)..(446): n is a, c, g, or t
caggatggtgagaacttgaattgaagtgtactccaagtgtaaaatataccctgattttgaagactcagtaggaaaaaagaacaaaaaatactaataatttttaaatgagaacaagttcatataatagcattttgatatattgggttaaataaaatgtactattaagattactggtacatgcttggttttacttcttaagtgcggctactcattttaaattacacatgtggcttgtgttgtttctactgaacatctctggtttatattgcgctggcctcccctttcccatcctttcttgctccctttaaactctaatcagactagagatgcccttcttactgggcgtctaaagccctcggaatcttttattggtcacagcaggatctcctgggtattttgtatttgtcctcactgatattccttagctgtgttgatcatgtcatttn

SEQ ID NO: 639954 - DNA, 1049 bp, Homo sapiens
  misc_feature (581)..(581): n is a, c, g, or t
ttcgccctggcattgatgagtatctgcgtgtactcgaccgggtgctgaattagccgtttgctggagggtagctagcactcaatcatggagatatactacaggaatcacgctgtatataccctgcatctgaatgtgcccagcgcctgtaagactgtagaatcatatcacccttgcggtatgttgatgagggttgccacgtgttccggaggggtgcagtgttcatcattgttcgtgaggtgctgtggttcatcatggtcagtcgtcacggagatagtggacctgccaaatctgccgtcgtagtcgtcgagaaggcgtggaataatctcgacctattggattcatcgtaaatcatggtcctatctagcaaaacgcacatgtcgtcacgcaccaggcgagtggtagagtgtggcgtcgctgaatatctctcgtagtttgtatcctggagtcttggttagggtgctcagtccgcagaccgccggaaaagcccgctcgagttataccattcgtgtccatagtgtttcgtggtgccaccttgtatcagcaaattcttctactacctccacttgtgtgggacgtgttancaggccatttactggcatattgatgttatggttatccacagtcttgaagtaactatgtttgtagcttgtgcggcctccgtaatggtgtagagcatcaggcaatcaaacagagattgtgagtgccatacgtgcgtacgtagtcgaatattcatgccgctgtctactgatcatcctacgtgcggcactggagcctttaagctaccctgaattgagtctggcatgcgtggtgtcctgaggggaactcttaggctcgcacagcagaaagcgctatacttgcgtgaactttcgagagcgtacaagtgacgaacacagcccccaggtagggccgcacaagccatggaccagcacattggtcaccgctgtgtatattctcaaccaatacacatgtcaagacacagcaacgcaccttgtcgttcgtgtccacaaatatcaaaccactaatgactgcagcaacggccagcgacacac

SEQ ID NO: 639955 - DNA, 731 bp, Homo sapiens
atattatactaagcatttaccatctcacttctaggaattactagtatatcgctcactcctcatatcctccctactatgcctagaaggaataatagtatcgctgtcattatagctactctcataaccctcaacagccactccctcttaaccaatattgtgcctattgccatactagtctttgccgctgcaacgcacggtgggcctatccctactagtctcaatctccatgcacatatggccatacacttacgtagccataatctatacctaatctccaagtgctacaaactaatcgtcccaacaattatattactaccactgacatgactttccaaaaaacacataatttgaatcaacacaaccacccacagcctaattattacgcatcatccctctactattttgaaccaaatcaacaacacctatttagcatgtcccaaacatatattcgaaccactaaaacaccccttcctaatactaacttacctgaataacctaccatcacaatcatgacaaaacaaacgccaatttatacagtgaaccacttatatgaaaaaatatctaacatctctatacttatttcgtacaaatctccttaattataacattctacagcacacacaccataatctatttatctcttttcgacatcacactatcccaccatcggtatatacccgcatagatccccttatcgcctaaccatctacttctatttaaacataagtcta

SEQ ID NO: 639956 - DNA, 152 bp, Homo sapiens
ttttatggggccaaaaagggggtgttttccagaaaggtaaaatttaattttttttttccttggggtttgggatttcaaccagcctacaaggggggccttggtaacaaatcagaaatatgccaattaatgattaaagggtgggattgccccca

SEQ ID NO: 639957 - DNA, 426 bp, Homo sapiens
agcagactcttcttttaaaaaaaaaaaaaaaaaaaaattttaaaacagcctgaccagtataagcttacgtccttgtccattcctggggtgagagggataaatttaatgtcttggaatagtctacttgcaaaggggcatgaaacagaaaaatcagttaaagggctgccctttccatgggggtaagcacccatactgttttctgtcacagcaggggtctagcccggtgcttgataacttactactcagttatcaattttcttctgtgcagtatcgcacgggctagaatttgagcttagaattagaagggagcttgttttggccttagggccttagctttggccaccttcaccctagaccgtattctcctgtctcatttcattggtcacctagagactttgtttttcacatttcctttatccccttcct

SEQ ID NO: 639958 - DNA, 394 bp, Homo sapiens
tgtatagaaagtatttcacaataaaatagtacataagtacatattcagttcctgccactaatctatattctcagcatctactctggaatatctctctatatgactaatcagtggcgcccttgcagtataatgttctgtagatcatcaaatctatattccacacaaaccaattcctttatatctatagacagaactattttcaacatgccttcttgatcttaaaacaacagtaaatagacatttgcactccaactttataaccagctgcaagtttctttctttctttctttcttttttttgaaatggagtcttgctctgtcacccaggctggagtgcggtggtgcgatctcggctcactgcaacctccgcctcccgggtccaagcggttcgcctg

SEQ ID NO: 639959 - DNA, 926 bp, Homo sapiens
gggggctgtgcagagggaaggctcggctaatcggtccgcatccgtgtcgaccacctgtctggacaccacgaagatgccagccgtttggcgggcaaatagacggccaagaagggcatcctagaacgtgtaaatgctggacgagattgtgattggaagatggacgggtgagactttgcactggacaagacgggctacgtaagacggcaggtgatccctggagctcctgaaagctgaatcatggaggtcatccataagacagtaacagccagcttcatcgaccaggttcctcagtagcttggttgcaacaaggtctttgcaagaccttatctaccattcattaatgtcgtacgtttggatagtaccccaagctgagacgcaaatacggggggccagcttcatagtccctgtgagcaggaaagaatgtatacttgtgcgcggggatagtcccaatagtaatgcttgcttggcgaagtatgggcgcccgagcaccgttgggtcgaatgaacgggagaatagctattggagtaggacaagggaaggtaggatagagatcgagacaatcccttttcatttatccctgttacgagtaggtcccagaacgttggaaagactttgacatgtttccggaaactgggagtatttttacatcgggcacaaacatggcgaaaagggtccttattagttggaaaagaagaggaaacggagtgtgagcctcttctgtaggaattcgcgaagcagttaattggtaaggaatccaccgggtaggaaatgaaaagcattggtgcatgggtgccaatatgtggaacaatccttttggattacggtaatacgcgggataaagactcctgggaggggaggcaaaatcgattagttagcagtatgggccactagaaaagggaggagttttggaagtgggatggtaggcc

SEQ ID NO: 639960 - DNA, 556 bp, Homo sapiens
  misc_feature (275)..(275): n is a, c, g, or t
aaagggcttcggaaagggaaatccctatttatccctcgaaggttttttttttccaggatttttttgagccttttaccattccagcctagcccctaccccccaattaggaggggatgggcccccaaaaggtatcaccccgttaattcccttaaaagtccccttcctaaacacatccgtattattggcatcgggggtatcaatcccctgggctccccatagtttaatagaaaccccccgaaaccaaataattcaagcccgggttattccaattttanggggttttttttttcccctcccacaagcctcagagtatttggagtttcccttccccatttccggggggatttaggggtcaacattttttgtagccccaggcttccccggacttcacgtcataatgggccaaacttttccccaatatttgtttcatccccccactaatttttccctttacatccaaacatccctttggttttgaaccccccccctgaaacgggcattttgtaaatggggtttgactatttttgtatgtttcccttttttgatgggggtttta

SEQ ID NO: 639961 - DNA, 125 bp, Homo sapiens
ggaagactcgggaggtgatcagtggtatatggtacattatattaccgggtctctagagataggaaacatgactagaagtttatcacactaagcactgtaagaataaaggcaagagctaatcatct

SEQ ID NO: 639962 - DNA, 270 bp, Homo sapiens
cctctctgtaggaaggctggagagggcggtgggcccatggcatcaggagcgggatgccaccgagttctcaaatgaccttgtccgcccggcccttcctgtccggcctccagtgggcaccagatctccacccagtgcgtgaccaccccctccccaccaatccctcagcgagattctagcagaggggagagagccaggggccgtggggacccagtggtgcgaaaggggctggcagagagcagggagtccacccagggtcaggttcaggcctgc

SEQ ID NO: 639963 - DNA, 1164 bp, Homo sapiens
  misc_feature (154)..(154): n is a, c, g, or t
aaaaaaaaaaaaagagaatcgtacgtcgactttcgatttttcacagcctcagccttaggaaaaagtggttctcagtgggattaaacagcgtggtattgtgtattctaaaacttcaaattgggctcacattaaatgtgccacggcatttccgaangtttggatttgtgattaacatttgacaggattacttggtgttgttttaattttttataaaaaccgtgaaccacgtggtgattatatgtggggttttgggtaatttatagccagaaacctcttatacgtggttagaaaacaaaattagaaccgtgcaattatagtgtgtgttaacctatttgtgtggacaagggggttataacctcttggattatctcacacaatctaactctcgagtgtgcacacattcacaattctcccatgtgtggctacacagtctgtggctacccaaaaacaaaacaacaacacacagacacacacacacacacacacaacacacacaacacaacaaacacaacaaaacaacaagagagagagggcgcggcgcgcgcccccagcagacacacatctctctgcgcgagcggcgcgcgcgccccacgccctcacgagcgcgccccccgcccgccttctctggtgaaacacacgcgcgcgcgggcgctcacacaagtaagagggagagcgaccgcgcagactaataataaaacagccctactggcggagcgccgggcccgcgcgcccgaccaagcaagaccacacacgcgcccacgcgcgcagccgggcgtccataacaacacgacgggtaggacaacgaggggggccacctctctgcgcgcgtccccgagagcgccccccctccaccacatcaacatcgcggcgggtggcgccgtgacccccccaccccccacgcgcacacaaccacactccccaccccccccagcgcccttctacaacaagcgccacctaagaaggcagcacaaacaatccttatcaacaaaacttagctacaagcgactctgtccaacaacacgcggcgcatactcacccccacctaagccgcacgacaccccatcccctacacccccactgaaccacaaacaacactcctctccaccgcacaccgacacaagtaccgcaagacctccgcaaacaaacgaccctaactaccaaccg

SEQ ID NO: 639964 - DNA, 418 bp, Homo sapiens
tcggtaccacggttggctagttagtggtgagactggaacttctgaaccaaatctagtggttccttttctaagaccataccgtttcttacaaaatcccacattcccagccctcagacttggtactgatattaggttaaactctttggtcattagaaagttcagtgaacttattttctccagctctttttacctacttggttgtaagtactaagtatgtaaagaaggctaaagaaagttaagcatggacagcactagagaggggcaagtgtccaaggcctatacagggatgttaaaggaagagttaactcccagaattggatcatctacactggtcctctgcctgttgttactctttcaatctctgcaattgggaatgggatgtgaaaggtgaattccatagcagccaaccgtggactag

SEQ ID NO: 639965 - DNA, 90 bp, Homo sapiens
ggatttgctggtgcagtacaactaggcttaatagggctcgaattcgagcctcgaattcgaggctcgaattcgagctcgaattcttctaac

SEQ ID NO: 639966 - DNA, 342 bp, Homo sapiens
agctcgcgcacgtgtagcagggacactatagaagatccgcgcgcacagcacacgcgaggaggcaagaacttgagtgagtgagatagtgtgtgagtgtgtgaaagagggtgtgtgtatcaggctctatgggctgtgactaattggccggactattactggacactctgagacttacgtgctgacaggacatgttcaaagatgaccttagacacatatagcggagccacagtgaccctgttcaagactcttatgatgcagcggagcccaggtcccgcacaggagcagcagttaaggcacccttgacggaacctacgatagaaaggcggagagcgtgcacatcac

SEQ ID NO: 639967 - DNA, 936 bp, Homo sapiens
atcttgggcttcatttacaggctcatgtgtcagatctgcatgcatgcttgcatttttctggtatctgaatgtggttccttgttccaggaattcaacattaatttccaaaagtatcatgggacttgtgacaatacaagacatgaatctatgtataacaatttatcggcctttctcatttacctgctctagtattatgtattgtgtgtgcgtgcgtgtgtgatgtcaggctgccacgtaaaacttcagagaaaaatcttaaaagcagaccatccttttttgcatgctctattctaagtagaatgttcaatgtaactggataaaattgcatgttaaagatatttaggtataccacagtgtctctcttttattcctcattcggttctcagtttcctgtatatttgcttactgtgccgtttaagtggttctaggatacaaatgcactggtgaagcaaactgtagtgccaacagaaggtgatttcccagtcgtaaactgttcatgcagacatttgaagggactggtgttttcttaacacaacacaactcacagtttactttctaaaaccagaattctcattctcctctcatcgtcctcattgtcggccaaaccaagaagtgcatggcgctttcaatctctgaacactgtagaacccattacgaagactggtccgcatgttcacacttgtagtgcttgaaaagcacttcttaagctcgcatgggtcttcaaccgacactgcacaggtctccccaaggacaaactcagaacaattattattaccacagacataactgcgtcgaacatgttcgtggtcctctgcgaaatgcggcgccctgggttcacaccaataatgccgcggaacggattgtcttggatcacagcactcggctcctcttcacattggtatggcccttcttaagtcgatcctctcacattactcc

SEQ ID NO: 639968 - DNA, 956 bp, Homo sapiens
ctcttctggtgctccgcgcttgcggggtgctgcgctgcggcctgtgggcccggggcccgagcctgctagtgcgccatggttcgggagggccctcctgggacccgggagcggaccctgtgtggcggtgaagcccgatggcgtgcaacggggctcgtaggggacgtgatccagcgctttgagaggcggtgcttcacgctggtggggatgaatgatgctgcaggcaccagatgagctgtcttgcgagagcaactaccaggacctgcggagaggaagcccttcatacccttgccctcatccgcctacatggagcttctcgggcctgtgggtgcgccatgttctggtggaatgggtccatagtgtcgtccgcgcctctagggcccatgattgacacaccagactcggtgaggctgccccagtgaaccataaggggtgacttcagctgtccacgatcagcaggaatgtcatccacgcaaggcgactccgtggaggggggcccagcggggaaaatccagctgtggggtttccagaggcagtgagcttgggtgagctgggcagaacgggggggccagcaccaggcatgatccacccgaggcctgaggctcaaggcttgccattacagcccatccccggagcaggaaccaattaacctccgtcagcaagaacccaaagcccagatctaatactgccttgtccaaaccatttactttcccttgttcacctctgcccccagcccaagcccaagagagttttgagcccaccaagtttcggtgccttttcttgtaccccaaggcaagcccaagaattgggaccaatccttttttgaccaaagtgccggacaacctttgtgtgggcggcgggacctcacattattataacccctccttctagggggcgggctaaattccttgtccccacttggttgtcaccaattttatccgccggttggaaaaagacct

SEQ ID NO: 639969 - DNA, 298 bp, Homo sapiens
aaagctcgtgtagaggcaatctgcgtctctacgcaacttggttcgctggcgcatctccttaggctccttcattctcgtggcgaaaagtgacgcatattctgccgcctcttctttatttcacttggtgcgctgcttcttcagcagcgatacgccgccgtatgtgctcgcaggacaggtggtctaaatgcaatcggtgcatatcgggatcgcgattgccttgactgggtgggggctgtttatgaaggtagctaggtgtacctggaatcagtctaaatgctagcagtctacatggaatcag

SEQ ID NO: 639970 - DNA, 423 bp, Homo sapiens
atagcgacaccgtacccgagaaacgaggtctggaccagtgtgcagcgctcgaacacccagttgtccagtgccatgcgcgacaggtcgacgccacttaaatctactccgatcaagcgcaaagggccgctgtgccggtcgatcaagtcttgcagttcatcgcgctgcaaggcgctatcggcgacgtcggtgtattgcatcggggcctccgggtaggcggaaaaaagagggggcgattctaacctgccatacccacaaaaaacccggcagggcgccgggttttctgcaaggggaaaagtcctactccagaaccggacccgttgcgccaatagctgaccgcgccgtgcgcttgttcttgatccagtaacacactgccatgaacgctacccacaccgggatcgcatataccgacacctgaatccccgg

SEQ ID NO: 639971 - DNA, 119 bp, Homo sapiens
gtggggcggcagttgggtaaagggaggaacggatcacaggtgaaaacaccttccgaccaaagcccttgttgcctcggggtcctccccagagctgtccccactctcgctgtcggtcaccc

SEQ ID NO: 639972 - DNA, 202 bp, Homo sapiens
  misc_feature (57)..(57): n is a, c, g, or t
  misc_feature (87)..(87): n is a, c, g, or t
  misc_feature (98)..(98): n is a, c, g, or t
  misc_feature (160)..(160): n is a, c, g, or t
  misc_feature (176)..(176): n is a, c, g, or t
gcacaagctcacactggggaaaaacatgagttgttgccctggagcaagctgcctgtntgccaggccagtagtgaaccagcccctttnaaatgctccanacctatgagaaccaaaaaaaaaaaaaaaaaaaaaaaaaaaaaggggaaaaaaaggtagcttnagggctgacacatggnagctgcgttctgggagttgggctact

SEQ ID NO: 639973 - DNA, 326 bp, Homo sapiens
ttcaaaatataaatctggtcacggggtaggttggtcatcccctgctgagctctcatcgatgtctctttccctgtgtacaggacatcacctgttccaacccagtgtgatctatgggctggagcaggaagaggagtcgagggcagggcggagagcagttctccaagaatggcgacttaaaagcaaagggccagcacttcggcaggatagatctgggtccagagcatcaaatgagacacagacggcaagaagccacaagggagggcagctctgtgaccgcacgcagtgtggagaagctttcagtgaacactcaggcctcagcacacacg

SEQ ID NO: 639974 - DNA, 430 bp, Homo sapiens
gacgggaaaaggggcgagcaggaaagggaaagggaggagcaagtgaggaggagacaagaggaagcggggagggaaaagggcagaagcagtcaggagaggataagagggggacgatgagtggaggagaaagaggaagagaaagaaagaggccagatggtgaacgggaaagcaggtcgagtaagaaatggcaggaaggaaaggacgggggggtgaaagcggagggggagcagtcttgactgtgaccggcaacaggagagacagaacagaagggaaaaggcagttcgagcggacctagagtggccgtaggggaggtaagagacaaggttataggatctcggagaagtcaggacaatgaatgagagctcagggggaaagacacgacacactctctctctctctctctctctctctctctctctctctctctctc

SEQ ID NO: 639975 - DNA, 184 bp, Homo sapiens
  misc_feature (22)..(22): n is a, c, g, or t
  misc_feature (62)..(62): n is a, c, g, or t
  misc_feature (121)..(121): n is a, c, g, or t
cagcagacaccctggggatggnactccacacacgatagagatgccaggggccagggaagccncagcgctcggtgccttcgtcccagggttaaaatcggcctgtggggtgtggtgagaaggncaggttgtgcgggtgttgaccgatgtatcccttaaagttattataataatgggtaagtcaata

SEQ ID NO: 639976 - DNA, 1418 bp, Homo sapiens
ggtgctgctccgctcctcgattgttattgtccggtggtgtccccgccttttccggagtgttttgcgggacgatcgggtcgctcgtatggggcgcctcggtggcgtggttgattgtgccgccgggtgtgtagggagtgtgggtcgcgtgtgcccccctgccgggttgtgtccccggttgttatcacctccttttctctccttcttcctgtttgggttctatgtgtgggtcattcctccccccctcttctgcgtcccgagagccagcccttctttctcggcgcgggggcccccccccacacggtgggggagtttgtccccccccgcgtgctgtcccctctcttggtgcgttgtctggtattgtcctcggttttccacttggtttatatgcccctccctgcttggattggggggtccccgttttttctcccgttggttcctgcgtcttctttcgctggcgggggttgggtcttgtctctcctttggaatgccaccactctgcggtgtctattttgataccgttgatagcttcggtgatgtacacaaattcgggagctagaatgtctctatcggggctcctttcctagcgggcgggtccctgccccccttgtcaaacaaccctttgctctgggggggagtgccccacatggggggggcccccccaccgcacccactctcctcactgttacacactgggaatgaatttctttggggaatacaccacctgggggctcgctcttgtgggagtcaacacacacacgtggttgccgaccccaaacgggtgtgttagtctccccctcctcccatatcccccccccacgctgttctgcccatctctcaatcgtgtctcgcccaacccttccacacgcggcttatggattacacccacccgctcacgacgtggggaggaaattttacttgttttctggcgctcgccgtttcgcactcaccacgctgtactcgccgcccctcggcctctctctcccctcgcttctctcacgcggcgtgccacgcgtctcaccacgcgttgctccccctcgggggattttctatggcccccccctgggcgggcgcagtggttacccaccacccactccggctggtgttattgtttgcggcggcgcgcgtatgtttgttggtgggggaatgctgctggtgttgccaccgctgctgtgtgttggtggtgttggtgtgtgctgtgtgctgtgtgtgtttctgtgaccctcctgttcccacatggtaacgtcccacccctcgtccccacagagtcccctatttccctccaccacatataccacgaaaccacactccccgggagcttctggggaagaggctgaggaccaatacctgctgtcactcccgaggacattttttttagccataaaaattgagtgtccaactatttaaaaaaacaaaaaaaa

SEQ ID NO: 639977 - DNA, 336 bp, Homo sapiens
tgcaccaaattcagggcagcttggtggatgctggcatcgtgagtgtccattgaggttggtgatcatgaatatatagtgaagtcagtcagctgggttatgtgatttttcttcagcaacattcagctgatggggcataggcactagaaaaggcagacaatgggatttaaccaggatgggagtggtgtcaggtggcagtgatggagaggacaaatgatggagggtattggcaagggagagatggtaattatggaacacggcatcaaaatgggacaaagagggtgcagaaccggagtgggtagataatggaaaaggggcatcgaaaacaccgggtaccga

SEQ ID NO: 639978 - DNA, 689 bp, Homo sapiens
aaaatccagcccataccctttgaggtaaaaacttcgggccaggcctcccttcataagtgccaggcctttcaaaaccacgtggatttttcttttcattgggaactgggccactaaaattttaagggctatatcaaaacacaagttgcatgcagttttcagtaagggttcaaaaaggtaaaatgcaatgctttgtaatttacaaaggaagaatatttaactgctcaaattacatgccgggtcactgcttttaatttaaaaaataaaagagcgtcataagaatctggtttctcttgatacatagtaaagggtgttttgtgtctgcatgcataaggtgattccaggggaggggatgaaagatatgtgacatcttccctgaaattttatattgatatgcaatgctttgtcatttaaaacctaagctaatgttttctacaatccataactctgagtttatctttttggaaacatagaaggggatgacattgaagataaaatggatacagcaattgctgaatgacagtttgcccaaattagtgcagttaaaatatgctgacgcccctgcatggccaggaagacttttgctccatgcacacaagcaccaagtatcaagcgaccaccaacacgttcccattcctttaggccaccatagctttgcttttgctttctgtttcctgaactaaaaaaaaaaa

SEQ ID NO: 639979 - DNA, 125 bp, Homo sapiens
gctaaaaggctggaaggatttgttggtgtgatctatagattcaacctgaagaaaagagagcccataaatacaggcctacgcatatatggacaactgatttttgatagaagcgaaaggcaattcag

SEQ ID NO: 639980 - DNA, 167 bp, Homo sapiens
ccagctactttaggggctgaggcaggaggatcacttgagcttgggaggttgagactatagtgagtcctgaacatgccactgcattccagcctgtctgacagagtgagaccctttctctaaacagaaactcaggctgggcacagtggaatacgcttgtaatcccagca

SEQ ID NO: 639981 - DNA, 217 bp, Homo sapiens
  misc_feature (99)..(99): n is a, c, g, or t
  misc_feature (132)..(132): n is a, c, g, or t
  misc_feature (150)..(150): n is a, c, g, or t
atctacaggatctcggaattgtgtggtgttatgggtacccatttgggaacacccataattagtttatactgagtgggtggttaaagttcatcccgaggncccagcgggatgtcggttcaaacatgactaatntatcctgtaagtcgtaancacatcttttttctttcttactttttttgacaggggagatcacccaatgttaatgccgggactcgaa

SEQ ID NO: 639982 - DNA, 221 bp, Homo sapiens
cgttatccctttgtgcctgatcggcctgcatggtatgactctcggaatcatgcgtagctgctccgtcatttgagtgctcatcatatgcgccttgatgttgatcatagcctgactgctggtcatctgaatcttgttgaccctcgtcaggctgatcatcaggaaggtgcccttccaccttggattcctgatgattccatgttatgctgctgtccctggttcat

SEQ ID NO: 639983 - DNA, 340 bp, Homo sapiens
gctgggcagatggtgaaaccccatctctattgcaaatagaaatctttgccaggtatgtggcttgggctccttgtaatcctagctactttgtacgctgaagcatagaactgcctgaaccctggcaggcggaggttgctgtgagccaaggtcgccccaccgcacttcagccttgtggttacagagcgagacgtccgtctcaccaataaaagaaaaagcagctagctcatacatagttgtaagaacttatagatagatttcaaatgattagaacagtgcctggagtatagcaagaactcaatcattgtagctgtactatttagaaaaaaacaattgtggtgag

SEQ ID NO: 639984 - DNA, 572 bp, Homo sapiens
ggtcttgaactcctcagctgatccacctgccttgtcctcccaaagtgtgggattacaggtgtgagccaccacgcctgaccgtattttattattttattattatttttgagacaggttctccctctgtcacccaggctgggggacagttgacgcaatcatggctcactgcaagcttgacctctgggctcaagtgatcctcctacctcagcctcctgagtagctgggactacaggcttgcacaccatgcccaactaattttgattatttgtagagatggggtctctctattttgcccaggttggtcttaacctcctgggctcaagcgatcctcccacctcaacctctcaatgtgtcgggattacaggcgtgagccaccaacccagcccactttatttttgcttagtcacaagaacaaaatggttttctttgttgagataaagtctcgctctatggcccaggctggagtgcagtgggcgatctcagctcactgcaacctctgcctccaggttccagtgattctgctgcctcagactccctagtagctgaactgcaggcatgtgccatgcatccag

SEQ ID NO: 639985 - DNA, 474 bp, Homo sapiens
catttggctgccttggtctagactcagtgtgctaatcaccatttgtctaattagtactgtgggaccatcacaggataaatggcacagcactcaccattgcagacttgtgcccaggcccccagacacctgagttgggtgtcctttactgccttacatagaagcctgggctccgaggttcagggacctcccaaggacctaggtgtcactacatgtgctgctgctgactgaaagtgctgacggagttcataagctagtcaggggccgcagctttaaggctgggttctggtcacaggctgccttccaggtacccaggaggaagctgggggcttgtgtgtgctgaggaagggacctgaggcagaggagaggggttgccttgacagtgctgtggcacacatggcggagtccgaggcagatcttatggatgttgcatttattgcaaaattctacaataaagacttttaaaaagttaaaaaa

SEQ ID NO: 639986 - DNA, 189 bp, Homo sapiens
cccccgggccccccccccccattttctccggccccgcgggggttcctttgtggggggccccggttgggggttcccggcccaacggggttcccttccccccccccccccccttgcccttttttaggtttggaggggctttggtttttttttggggggtgggttttggggataaaatttttcccctcttta

SEQ ID NO: 639987 - DNA, 645 bp, Homo sapiens
  misc_feature (630)..(630): n is a, c, g, or t
aacatggagaaaccccgtctccactaaaatacaaaattagctgggcgtgggggcgcatgcctgtaatcacagctgcaggagaatcgcttgaacctgggaggtggaggtgtggtgaaccaagactgcaccattgcactgcagcctgggcaacgagagtgaaactctgtctcacaaaaaaaaaacccaaaaaacaaaaaaacaataccaaatttgggccaaagatgtttacaaaccggaaccctaggacaccgtgggtagacattggtaaacaatttcagccaccgttgaacaccagttctggggcctcctccaaaagttaaagagaatggtcatatgatcaagcaatggattctaagaaagacacccaaaagaactcaaagcgggtatcaaacaatttatggtacacaagtgttcacacgaactattcatggtagccaaatatgtgtcaacaacccaacatatttatcaagtgatgaataaccaatgtggtggggtatcacatctggtggaatggaaatattattcaggcataacaacagaatgagtggtgtacatgcccaataattgaccttgatacttgaaaataacagagccagaaaaagcatatacgctgatccatttaacaaaggncagatagtaatagag

SEQ ID NO: 639988 - DNA, 251 bp, Homo sapiens
ttttgccatcggtatagcactaacaaatcaaattagtactcactgacaaaatactttaaaaaggagagggtcacaaagctcccctccaaccaaaaaaatgtaaaatagtcccagaagagtgaattaaaatgctcattttagttttcctgaggtctaaatctcctcaggcaccttctgtgatcttttatttagagggaaaaaattttcggctgtccgcctgtactttctccatcaggcattcagccccaaag

SEQ ID NO: 639989 - DNA, 1034 bp, Homo sapiens
gtctgttggtggtcgtggctgccgtcttcgactccgttgccgctggttattcgtgtgtgtgcgtcttggttctgcattcgtctcttgtttggcgtgttgaccggggctcttgtgtcgtttgcgtccgtgttgttgcggtcgtggttatctcctgcttggttggttcccgtctcgtttgccgtgcgtcttgcggtggctgtctatggcattgatgcttctggagtggcttttgtgcccgggcatggttatgttgttgtcttttctctttccagcgttgtgctgttgtggtttaacgggggtgctcttctgttgttgtctgcttctgtctgggggtagtcgagcgttcggggctctggatggttctctggtggggtttcggttatgtggttggtcttgtgcttgctagtcgcttgggtctcttggttttgctcatcttcctttggtgtgaggtgcggtgtgcgtctcttccgtttgctgcttctccggtcctctttggtgtagagtgtggtgcttgcttggggtcgctcgatgggtccttgacactggcatgggccctccatcagtggaatctggggcagtctggaccctccatagcctcggagtgttctgttagctctgtggccctaccctacaccatcctctacgccttcagactcagctctctagtacagagacctgctgccaggcacggtggctcacgtctgtaaccccagcactttgggatggctgaggaaggtggatgacttgagcccaggagtttgagaccagcctgggcaacatggcgaaacccctgtctctacagctgaatttttaataatattagccaggcagccaggtgcggtcacagcactttgggaggccgaggcaggcgaagcacctgaggtgcacggagttcgaggccagcctggccaacatgacaagacgccgtcgtccactaaaaatagaaaaattagctgggtgtaggggcgcacgcgtgtaatccccagctacactcaaggagcgctgtaggtacggagtatcgaccttgaagcctt

SEQ ID NO: 639990 - DNA, 601 bp, Homo sapiens
tggcgccccccttttttttttttatttaacacaaaagggggggggggggggcccgggtgggtgggcccgccccccacccggcccccccccgcgcaaggagcgcctcggccgataaaaaaaaggggtacgctgagcggcgagcacacaccaagtaccaacccacgaagaagaaaagaacgagatgccgcgaaagaaccaaccaagaggcggggagaaacacaggaactcattggttgccgagagaaagccgtcccccgcaggagcaaaagatagagcgaggcgacgaggggggagcgaaacacagaacaaacaaaagaaaagaacgcacacacagctgggggcgcccacgagcgtggaaaccccaccgaatgtggtggacgcgaagagcaagggggggaacaacacggagctagaagcagcagtagtgtgaaaggacacacaagtaactgcagcgggaagacagcgcaaaacaaaaaacgcgcgtggcacaaaaacaagcaggagcggttcacacactggtggaaccagccaccacaacaacaggaaggcacgagcgaaaaaacggactgcccacatatggctgcccgcacaccaacaaaca

SEQ ID NO: 639991 - DNA, 122 bp, Homo sapiens
ctatctatctctgcagagatggcacttctgcatcagtcattgactccaagaatgctctctctagtgccacgacaccacgtgctccagctagatcatgcaggtgatctcccgtaaagccatag

SEQ ID NO: 639992 - DNA, 422 bp, Homo sapiens
gccgcactgtcatcgtggacaccagccgtgtgcagcctatgatgctgtctagggcatcgatggtactgggcaggaccggatgtcaggtactgtgcacgcaggtgcacgtggaattgatggtctacacgagcctatgcatcatgcgcggtgtataacgccatacgagctagggcgacatgctgaccattgaggagtcagagcgagaagcccggcggttagcctgagcttggctgatcgctgggtctcggatgtacggtacaatcacttgtactatgggaatggattgacacactctgctcgtgctgattgatcggcgactgtactggtaagctgatgttcatggcgtcgagcacaagctaactcactgactttgctgggctatacgactcacatgatgggaccctcactactcacgcctctgt

SEQ ID NO: 639993 - DNA, 216 bp, Homo sapiens
ttgcaaatactggggcactcagacctacgaagacagcaggctggaccatactgggtgtgctccaggactggatttccttaagagagtaccctggggcacaccaggatgctgattaccaaattatcctctgctgtttgttctcttcacttcttcggccaagaaaaccactggttttcttgttccaggaaagccagatcccccatcctggagttttaa

SEQ ID NO: 639994 - DNA, 810 bp, Homo sapiens
ccacgcgtacgtgcagactttgaaaagcagtagatacaagtggaagaagaacaagtgcttgaaaagtaatgcgaagcttttgtgagaagtttaatgagaaggattagaaggagatggattaagatgagccctaatagggcagcacttaaagacaccaggatagatctttgagtagtttgtagaatggatgactaatattggaagaggagtggctggagatcatgttggaaacccatctcaagggtgaaacttctttgttgccaggtacagatggtagatgaaattttactctatataattaagggagggcaaatcaccaaaggggagaaacaaatgaatatcatgtaagtgcggtattaaagttactcttagaagttactctgtcatgtgaagattttctacagatgagagacagacactagagagaatttggctaggaagtgccattcaggaggagacagagtccatctgaatgaaatatggacagcagctaaaagaagggaggctgaagataaggtagcgtacatctttagggcaagataggtaaccaggagcaaacggaatagaagaaaacattaaagttgaactccaggatgacaaacggtcactttcgcaacgaactggcaaggaccagacctgcgagagacaagaccccataattgggcccaaaaggaacatcgaccgaaggggctaaaaggcgtacaggaggagccataaacataacgcgcagactacatgcatccggacaaaaggcgaacgaaggcagactaagaacagaccaccaagaccccacaaaaagcgacacctgga

SEQ ID NO: 639995 - DNA, 423 bp, Homo sapiens
gagagagagagagagagagagagagagagagagagagagagagagagagagagagagagagagagagagagagagagagagagagagagagagagagagatatagagctgtgacttaagtcgatctgcactgatacatacgcctgctgcatatcagtgacagctatcctacgtggtgtatccctgacatctgtgtgtggtgcggatggttatgggcctgcttgttgcctccagctttgtgattcctccttgtaccatggtgctcttcacttatgatctggcgtgttcaggtggatttctgagtgcctggatctgctctgtctgttcgatgagtgtgcacaccttatcctgcatgttctctcggtccagatctgtgtcatgctctttgtattcgcattcgctgtcctttctttggttgcgtcct

SEQ ID NO: 639996 - DNA, 1021 bp, Homo sapiens
ttttcccccgggttcttaaggtgtaccccgtggtggggccgaccggcaggttgttgtggccgcagcggatttgacatgattgtgttcttctcaccgtttctttgctcggggggttgttccccctagagcgcccctctagagctttcctcacaagaggggggtgctcccaccccttctgttgtgggcgcacccacgccccgagaaagtagacggtggtctccccccctcctctgagtggactccctccctgggaggccgcgttgtcgtgccacaaagggtggcccccctcttatttttttgggggccaattggcaatctctctgcttttgcgtgtagcgccgcctttttctttgtggcacacgaccccttggggcacaacgtagaagggcgcttcccctttctctcccgccccttgtgagaggtctctcccaccacagagagggaggtttttataaagagattgtcgcccacagggggcgtctccccttttttttcacacaggaccgcgcacaaacctggagtatctcacaggacccaaatagcctctccaccctcgagacttatttggagccctcattttctttgagacacacagagagctacttcacacacacctctctttggggggtgcctttttttgccccactcattctggtggaaaatgtgaccaccacagagcttttgttcactacgtcttgaaaagagctctcttttgtggtgggagacaacagaaaaccgggggggtctcacccctctccgcgaagtccttgtgttggtgccagaacagaagcggccgggcttgttgtgagaaagatttgtacccttaaagttctcattgacaccccacacctcccgagatttggcccctggcccgcttctcagaccctggaggagaaagaaaacacgcatttatggggcccctgtaagaaaagaaccccatttccaagagaaaaaggggctttattcccgggaccaatttttccattgggggggtttccaaaaaagtttttttccccctgga

SEQ ID NO: 639997 - DNA, 215 bp, Homo sapiens
  misc_feature (134)..(134): n is a, c, g, or t
catcactttctcaaagagctggaaattaagggacaaagcctaccacctaggtacggacatactaagagggtaggaaggatactactagagtactctacctaggtacctagttttccacataaggttagcagggnaaagcccagaatagaccgagaccggaataggtagcaagctacttcctgtaagtagcatatcagtaacaatagtaactaggc

SEQ ID NO: 639998 - DNA, 285 bp, Homo sapiens
  misc_feature (216)..(216): n is a, c, g, or t
  misc_feature (225)..(225): n is a, c, g, or t
agcgtccgctatgaaggactgggtctacggcttggactcaccctgacagacccgcaagaaaaacaactggttcttgccagcctctagagaaatccagaacactcagccctgacacgttaatagcccgtgcacagatcagaggctgtggccacacataccaccaagccacagatgtcttccacaagcacgttcttaccttagccacgaagtgaccanagcccacancgtacctaaaggttgaactcaaagatatgtacagggtattaaacaaatccaagggacagt

SEQ ID NO: 639999 - DNA, 658 bp, Homo sapiens
gtaaagccaagaatgatgcggaacgaaacaaaattaataacaagtttgcaaaccagatagcaatgtcagtcaagttaggcaacggtattacggatccgagcatgaatataagattagccaccagcatcgagctagcaaataaaaacaatgtcagcaaaaaagttattgagaacgccatccggaaagcttctggaagcagcgcatcgggcaaggactcaaacgcttctgagctatgtgtatacgagggaagggggcccggcggggtcgctatagtggtggaagcgctgacagacaacaagaacaggaccataggtctgataaggagtgcatttaataaagctaatggatcgatgactccaacgttgtttttcttcgacaaaaaaggatacgttacaatggtacctccgaagatgttagacactgaggacaaggtgctagaaagcgtactggagattcaaggcatcgaagacattgcgcctgtgcaggaagacgcagaagatttagagtgtgataccgaaactgaaactacaggccaaacttacgaagcggtgatggaacctgccgataccaataaggtggccgccctactgaaggagcgtggtttccacatcagagacttgggcatcggctacaatgaaaagccggataggaagttttc

SEQ ID NO: 640000 - DNA, 97 bp, Homo sapiens
gaattctgtcttgttgccttttgattcctttttcttctgcatttgtgtgtttttttaagacttgagagttttatacttgcatgtgtttttattttgg

SEQ ID NO: 640001 - DNA, 121 bp, Homo sapiens
tcgtctcgagtacttcgtttcgagtacttcgtttcgagtacttcgtatcgagtacttcgtttcgagtacttcgtttcgagtacttcgttacgagtacttcgtttcgagtacttcgttacga

SEQ ID NO: 640002 - DNA, 746 bp, Homo sapiens
agatcgacagtatcatgcaacaaggtacacgaccaatgaagaattgatctggacagtactggcggtgaaagtttgcacccattgtgcgagtgaggagccatcgaaaatatggcccaccgcgacgggcgccttgtgtgcatatccacatagctgacgtggttctgacgaggattcacttatcaagatataacaattctacactcgaatcagtttggaaatattctcatccttagtggggatgttaattgtggcagacagtgattttggcatatacccgggcatcatgggcagtggcaaagaagattacattgcaaagatgtactcattccgggaggtggagacggaggcatattgtgtgaaatagtcaaattaaaaaccaaagatgttcactatggtagagatggaccaaattgttgatttgatgggtgtacgaaataaatgcgaaaaagtgtgggggatgtctaagacaatcttaaaggaagagtgggaatcaggttctaattagaagactgtatccgggtatgaagaggttacgccaaagaagggagagaagacttgtgacttatgtgattaactgattgaaaagttgttccaatctccagttccaagaaagaaagaatccaattgggagtttctaagactggattctggagctctcaattgacaggtgttggaacaggatgggcaaatattttacaccatgggcactgggttaatctgcacagaaggattgtgtctattgaaga

SEQ ID NO: 640003 - DNA, 123 bp, Homo sapiens
gtaccctaggcttggaactttgaatagttacttaacctaagcctgagctttaatctataaaagggaagataacatctggtagggatgtgtctgtcacatgtaagcgctccaaagcctgttagg

SEQ ID NO: 640004 - DNA, 192 bp, Homo sapiens
agccatcctggagggcagacacgctcacagagtcagaggtttgcattgtggacagtgatagggaattgaggggcagagaatgagaaggagttgaggggagacgcatctcacagatagtcagatggagagacagagggacagtgagtaaagactgacacaggcgtatcaatgacagagatgcagactgggcgc

SEQ ID NO: 640005 - DNA, 1242 bp, Homo sapiens
aaacaagcaccaacaagacctcaaagcaaacacaaacaaccaacgcagccacaccaaccacacgacacgcagccaccccaaccgacgcaccccaccccacccacacacgcccaaaaacacagccccacaccccatcttcccccctccacaccccacaacccacacaccatctaacaccctcaactacgacaaacacccacaaacaccatcccccgcccctcaacatccccctacacacaacaccactactcacactccccagcaccccacaacaccgccgggcacagcgcccgaacgcccgcacccccccccaccccgccccggacagacaacccactcagacccacgcacggcccccgacgcgacgccgccatacagtgacctccacagagcggagggcgccggacaccctccccccatctcccaccactccgtgcgatcagtccccccccccactgtggccacaggctcaacctacccacacgccctgcagcggcgcgccagccaccgcgccgacccgccgccccctcaccgacgcccccccgaccccgcaggccaccccccccctcgccacccaacgagggccccgcaaacccgcccccgccgtccgaccccgccgccggggtggcgcgcgggcagtaactagaacagtgcgcccgccggcccgagccaccccgcccacgaccccacctccgaccgcacaacggcgcgccccgggtacgctgctccagcagacagcgatgctagacaggcaacacgcgcgcgacctcccctcacccctcctccctccgctggcgaaccgccgggatagcacgggccagaggtgcaggcggacacaaggaagtgccgcacgacggaggcagcgcgccccttcccgctcgccccgacgagcgaagccgcgggacgcacgcgaccccctcgccacccccgcagccgcccgcagcggagacacaccccgcgcccaaggactcgactggaggagtacggccgctcaccagacgcgagcttccctccgacgcagccacagcacaggaggccaagacccagacccatcccccgagaccaccgcccacctacgcacggcccccccccccgcccaccaacgccgcgagcaccagtgcaacccgccccgcacacacacgacccccccacgcagtgcccgccccgacgagcagcctcgccgaaccgacgagccgacatccacacacaacgcccgccacccgtgacgagcaaccccccggg

SEQ ID NO: 640006 - DNA, 386 bp, Homo sapiens
  misc_feature (29)..(29): n is a, c, g, or t
  misc_feature (47)..(47): n is a, c, g, or t
  misc_feature (68)..(68): n is a, c, g, or t
  misc_feature (80)..(80): n is a, c, g, or t
  misc_feature (144)..(144): n is a, c, g, or t
  misc_feature (196)..(196): n is a, c, g, or t
  misc_feature (269)..(269): n is a, c, g, or t
tgtcccctacaaaaaatacaaaagttaancccccagcgtggtggcanacgcctgtagccttaggctanctctggtggcanaggtgggaagcttgtttgaaccctaggaggttaaggctgcagtaagccgagattgcaccactanactccagcctgtgtgacagagtgaaaccgtgtctcaaaaataaaaagtgaantcaggagttccagaccagcctggccaaaaccgtgaaaacccatctttactaaaaatacaaaaattcgcctggncagatgcactggctcgcacctgtaatcccagcactttgggagccaaggcggggatatcactcaaggtcgggagttcgagaccaacctggccaatatggtgaaaccccatctctacta

SEQ ID NO: 640007 - DNA, 749 bp, Homo sapiens
agaagacagacacccttgaagacttgtatccaagccagccaaaatcccaaatcctcgatttcagagattatttcaggtgtctgctgcacagagctttacatccccgggagcctctataccccctaattcatgacagcatattatggaatatgctgaatcctcccgctgaggtgacaactgaaaagtcagattcctcatctctaataataaagaccctttttcctctgattgagagccaggaacaaaggatcaagtgactgctcaggagattttccaagacaaccatgaagatggacctacagctcaatacattaacatgactgagcaagggggagcccacttcagcgtgctccagtctggctgaaggcagggtcacctctgtcggaagtgtgaatcctgctgaaaacttccggtgtgctagtgaaacagaagaaggccagctttgaggaagcgagtaaccaggtcataaaattcacatctgaacagtttttggatgctaatgaaacaccgtatttgatgaagagcatagactgtgtccgagactttccgggaagaaggccattaaagtttccagaagaagcaggctttaacaagcttcctgaaagccccttcaagagaacagtgcaacttcacccaataaatcattctgggaacttgttgtccaggatggaattctctgatcaccaagaggaagccctggaagttttgttcaccgtgaggagcccaagagtttgggccccaagaaaaca

SEQ ID NO: 640008 - DNA, 327 bp, Homo sapiens
cacaaactgacaatgattccttccttattttacagctttattactgatttccctctaaaaagagactcaagtgtggagctgactcatctatagattaaggaatcacaaagtaccatagtcacttaaaaaaaaaaaaaaaaaaaaagcaattgttttacctttcaactgctgatgttatgtacaatctatcaccaaaagcatagctgtgcaatcatgagccgagtatatccacccctaggaattttggaaccggcgcattttaagcaatgggaaacctccttaccttacaaagtaaaagcattttctattttaaaatttttatttctg

SEQ ID NO: 640009 - DNA, 496 bp, Homo sapiens
cggtgggcgtacaccaaggcacgatcaccaaccttctgcattagaacttttcattctgcttatttccagctctaaaacttagctgtggttcagttcaccttaaagatagggtaattcgtaaatggcaaagttagtgttgaggcttttcctcaataacttgcttcccaggcctattaggccatctctaaaatagatctagctgctttatttttacgtactcttagttggatgtaagaaaccttacgatgagctcccttttctaaggtgtttgtggtttatgcatgtcagcttttttcctgttatttcgtttctccatttacggccgtggacccatgttttggatgcgcgatgtttatatgggagaacacaaagctgatgtgtagcccccgcaaacagagaagatccttttcttgtaaaacacaaggctctattatggaccacgaagtccgacccttcatcattaaaaattacctgcattcctgggccccaatctgcc

SEQ ID NO: 640010 - DNA, 385 bp, Homo sapiens
cgcggaatgactggacaccctgctcagatgggaaatcaagctccgcgctcctgtgactggaaaacatccagatccctgacgcacctccggcgattcccaaggaggccaggaactattacttcggctataactgttactcgaagtgggcggggccagacatggccctttcaaaactgggacaacttggtaacaggagagagggatggaaacacaaccaaggcttgggaacggtctttggtaaaagggaaactgtgggtccacattcccttcaggattaactctaggcctgggaaactttcaggccctagctgggatcttggtcacccggcctgattctgttcctcaaggtcctcctcaagctcggggaaccgagggctcgaaattc

SEQ ID NO: 640011 - DNA, 271 bp, Homo sapiens
cgggggggggtttttttttgccgggccttttttttttccccccccctccccggggggccccccccccccttttttttcccccctttgaggccccgggggcgctcccccccccgggttttttttttgggccgggggggggtttctttttttccccgggggccccttttcccccttggcccttttttggggcccttttttccccttttttttccaaaacggggggggggccgggccgggttttccggggttttttttccccccccgcccccga

SEQ ID NO: 640012 - DNA, 223 bp, Homo sapiens
gtagcagttctacgtataacctagcataaccattcttaattcaacgtatgtatattatcctacagtactaccgcacttcatacgtactcaacttaaactccagcaccacgaccctactactatctcgcacctcaacacaccgctaacatgactaacacccttcattccactccaccctcctctccctaggaggccagcccccgactaaaccggcattttagcc

SEQ ID NO: 640013 - DNA, 179 bp, Homo sapiens
ctgtgttgtggcgggtcgcttcctcttcaccttcacatgcttctggctgcgcaggttggcgctggcccggtgcagagcctgccacctcctatgtgcggaccaccatccatatgattgctcgcgccacgctcagcagcctcagacacatcatccgctccacctagtatcgcaccgacctg

SEQ ID NO: 640014 - DNA, 772 bp, Homo sapiens
gggcaacaatgcgagagaagcccggaacccccagagatacggctgaacaggaaagaggcccagggtgcagacacagcgtaggaagtgcctcgttccggtacctgggccgggtgcaatggcgcgtgaacccctctcggacaccggggcggcaggcaccgcgtatccagaggagcagtggcctcacacctaggggcccctatccacacggtatgcctaaggcatcggggtattgctgctgtcagcgtctgctgtgcagactcatttctcaaggtggccaagccgggcaccaccgtatctcccattagaggatgtactttgtaggggtgtaagtgcaccgacgaggaggtcctcgccccaacacagtgtgtcaagctgtgctggtgccacccatctacccgctagaccggtgctgctatgggaaattcctgctagactgtcgcacaggctggacccctggaagatgcatggaagcctggaaagctggtgggtggctctgacggggaaatggaactgcgcccttttgctcctggttccagggagtcctgggcatctgcggtgtgagcaatagcctggcttcagagctgagagtgccaggggccacaggaaaggcaggaacaggaccttatctctgcaaggcccaacgcaggggcccttactggctgcagcaatagatctgtttccttataccagatcatcagtcctcactaaagacagcgatatgggagacaccagggcctggcccgccagcacaaagatgtcatcggagagagaa

SEQ ID NO: 640015 - DNA, 343 bp, Homo sapiens
ctgagaaggcatggcggaccctttcgtcatcgtgctgcccaggtccctgatgaccacctcctgaaagagcagcacctggccagcctccatcaagctctgtgggtattaactacccatttaactacactaagccaggtaggaaggtagtccactaactacactaaccagcccagaaaaacaaccgtattagactatactaacgtaccctgtgaaaccagccctagtcaacactaagccagtgggatactagtccattaactatactaaccagcccaggagaacgacccattaagtacactaatcagcccattatcaaccaggccattatcgacactaactatgt

SEQ ID NO: 640016 - DNA, 259 bp, Homo sapiens
  misc_feature (33)..(33): n is a, c, g, or t
aaaatcaagttattcaataggtggggtgcaagntgtcacgcctgtaattccgagcactttgggaggccgaggagggcagatcacaaggtcgggagttcaagaccagcctgaccaacatggtaaaactccgtctctactaaaaattcaaaaattagccggccgtggtggtggacatctgtaatcccagctacttagggggctgaggcaggagaatcgcttgaacgggggcaggtcggggcagggcggcaactccctctta

SEQ ID NO: 640017 - DNA, 116 bp, Homo sapiens
  misc_feature (63)..(63): n is a, c, g, or t
  misc_feature (85)..(85): n is a, c, g, or t
  misc_feature (93)..(93): n is a, c, g, or t
caggcggccgggggacggtgcatcaagcagggggagtaactggtacagtcccaccgagtgtgnggccatgggaggaagagccagnagtaaggnctggaaaagaagtattcgctacg

SEQ ID NO: 640018 - DNA, 140 bp, Homo sapiens
cgatggaatctagtaactcgggttgaaatcagccaccgttcccaaacgacagcgtagtgtatcctaagcttgttaatatccatctctggcagcattaagcacggataggaccaatagcaacttcggtgacgaccttcgac

SEQ ID NO: 640019 - DNA, 1108 bp, Homo sapiens
  misc_feature (123)..(123): n is a, c, g, or t
tcctgattaacagtcctacgttatctgtaatagagagtcagcctggtaccttactgagaaattcatcagctttttcctaccaaaggcagacatctaaccgttccgcacaccctccaggggcanatccaaccatcagcacagccagtggtgacaaccagttggcatctcggcagcaacagcatgtgtccatggccacatgctcgcagcacaggcaggcatccagggcatgcagaagcaccaacgttcaggcacagtctagaactagcaggtcatctcagtgcagtcattatctgaacaccactagtagcatgtctccaggccatgacaggcacagacctggtggccattctagcaggaccagtagtacgggaccctgccagtgtctgtccggaagcagagaccctccagtctcttactgaactccttatggctcagcctagatgcgtgcagatccagaaagcctggttgctgtgggggtggtcccggtggtgatggactcgcgagagcactgtgcaggagcaaggacctggcagtacactggaccagctgctgctgcagacccatccggcatccacagtcataaacacatctggggacgacagacaggtactcgacctgcgccgccaactcactctcctcaccacccgaaagccaggcaacagagccgacattcaatcaggctaaacaaaatcggtccaaagaaaagacacaccacgcacccacacacaacaagcaagctacactatcaacacatggcaccgaacgactccggcaccagccctcggacgactgcaccaccagaaacagcatcgcccctcaaccaccgacggacccacgacagacaaaccaaatctcggagacaaacacccaccaaacgaaaacaccccaacaagcagcgacgaaccacgcggcgtggcggggcacagcgaagaactcacgaccgaacgcgcaaaggacgacagaacgaccaacgcacagcaaaaggacagacaaaacgaaacagagaaacgacaaaggcgacgacgacaccacaggcaagcaaggaaggaggaaaacaacgaaacaacacggagcgagaacaggatcacagccaacacagagaccaaga

SEQ ID NO: 640020 - DNA, 185 bp, Homo sapiens
atgaggtggtggagctggcacacacttgtatagtgaaatgttaacatgtgggaaaactccgccttagacaaactcaccaaagtacaatcgtgtctctctctagccggaatgctacagagagaaacggacaccttagatttgcaacaaaagtctgtccactggtctgtttgccaaagtgaacactg

SEQ ID NO: 640021 - DNA, 162 bp, Homo sapiens
ctctagacggatcccgaaggcgcacgatgggcgtcctcctgggggagctcgtgcctcccagccatgacctcagtgctcatggggacggccccaggctgtccaggctcggtgtcaaacttgcaggacggaggaaactgaggcgcaggaggaggaaactgaggc

SEQ ID NO: 640022 - DNA, 210 bp, Homo sapiens
ggggggggttttccttttttcccccccggggggccgttggggggggggggcccccttttggtgggcccctttttccccggggggtttaaaccccccttttttgggggggggggcccccccccttggggggcctttttttttttgggggggggccccccccccctttccccccccccccccccccagcatttaagggggttttttccccca

SEQ ID NO: 640023 - DNA, 132 bp, Homo sapiens
agcttcctccaacccccaagctggactcttaccttattgagggtacgaacagcagcatagcggagagcagccttgggtgagctgcagaaaagctggagcactgtggggagatggatgccacatgtcaggttg

SEQ ID NO: 640024 - DNA, 325 bp, Homo sapiens
cgccggtatcggcgtcaacgatgttcttggccagcacgcggccgtacaggaagtcttccggcacggagatgcgctggatgccgccggcagccaggtcgcgcagatgcttggcgttgatacgcttgtctttttcgacgatgaccttgccggagcggtccgcgacgtcgaaacgggccatttcgcccttccaacgctcgggcacgaactccatcatgccgccttcgctcttcagttcgaagttgtcgaagtcgaagaagttggccaggatcgattccggcgtcatgccgatcgccttgcacaggatcgtcacgggcatcttgcggcg

SEQ ID NO: 640025 - DNA, 336 bp, Homo sapiens
  misc_feature (18)..(18): n is a, c, g, or t
  misc_feature (166)..(166): n is a, c, g, or t
  misc_feature (171)..(171): n is a, c, g, or t
  misc_feature (173)..(173): n is a, c, g, or t
  misc_feature (195)..(195): n is a, c, g, or t
  misc_feature (197)..(197): n is a, c, g, or t
  misc_feature (199)..(199): n is a, c, g, or t
  misc_feature (206)..(207): n is a, c, g, or t
  misc_feature (236)..(236): n is a, c, g, or t
  misc_feature (253)..(253): n is a, c, g, or t
  misc_feature (291)..(291): n is a, c, g, or t
cttaatatgttgcttcanttactgtttccaagaacctatcagcaaagttaagtgagagtttattatacgcatatataacttatataggtatgtgtgtgtgtgtgagacacacatttttatatatagatagatctcaacagaacttcagtaggcttcctactaaatnagacnanattaacaggtaatagttattangnantaaggtnntaattgggggcttactatacacttagcantgttctaagctggttgntgacagtgcatttaagaaatctagaaggtgggtaggtnccttaaatcagtggtggccaaccctttgaatgtgagggcattttt

SEQ ID NO: 640026 - DNA, 284 bp, Homo sapiens
taattcggattcttcaaatctaagagtgcctggctcaaaattaaaatacctacaactatgccaaaactggactctttaattgccttactggaacagtagctgattcaagcaacgaacaaatcctcttctctgatttagtgaacaatgattaactgactcatttgactggtttgcggacttgcagcctgaggacacattccccaccacactgagcctgcactctcatcaatgcaaatgaacattttgcttattcagattgggggggtgaaggaagtacaaaaggg

SEQ ID NO: 640027 - DNA, 229 bp, Homo sapiens
  misc_feature (1)..(1): n is a, c, g, or t
nctgcaacgcccggctagttttttttgtaattttagtagagatgggatttgtctcatgttggtcagtctgatcttgagctcctgacctcgggtgatccgcctgcctcgagctccctaagtgctgggattataggcgtgagctgaaaaccgtggccagcatcttttttttttcacagaaaagatggggctctcactatgtacctcagcgctggctttcgaactcctgtgg

SEQ ID NO: 640028 - DNA, 387 bp, Homo sapiens
gacgaccttggtggctcacgcctgtaattccaacattttgggaagctgaggtgggtggatcacttgaggtcaggagttcgagagcggcctggccaacatggcaaaaccccatctctactaaaaatataaaaattagccaggtgtggtggcgtgtgcctgtaatcccagctactcaggagggtgagacaggtgaatcgcttgaacccaggaggcagaggctgcagtgagccaagatcgtgccactgcaccccagcctaagcgacacagcaagactctgtcttcaaaaaaaaatattgaaataaaataaaaattactatattcaaaattctcggaaaattttattaattcagggtcgtcatcaaggggggggtaccggagcttcgaatt

SEQ ID NO: 640029 - DNA, 400 bp, Homo sapiens
  misc_feature (10)..(10): n is a, c, g, or t
  misc_feature (14)..(14): n is a, c, g, or t
  misc_feature (18)..(18): n is a, c, g, or t
  misc_feature (96)..(96): n is a, c, g, or t
  misc_feature (101)..(101): n is a, c, g, or t
  misc_feature (115)..(115): n is a, c, g, or t
  misc_feature (155)..(155): n is a, c, g, or t
  misc_feature (162)..(162): n is a, c, g, or t
  misc_feature (184)..(184): n is a, c, g, or t
  misc_feature (220)..(220): n is a, c, g, or t
  misc_feature (238)..(238): n is a, c, g, or t
  misc_feature (240)..(240): n is a, c, g, or t
  misc_feature (248)..(248): n is a, c, g, or t
  misc_feature (259)..(259): n is a, c, g, or t
  misc_feature (284)..(284): n is a, c, g, or t
  misc_feature (311)..(311): n is a, c, g, or t
  misc_feature (313)..(313): n is a, c, g, or t
  misc_feature (354)..(354): n is a, c, g, or t
  misc_feature (368)..(368): n is a, c, g, or t
  misc_feature (375)..(375): n is a, c, g, or t
  misc_feature (391)..(391): n is a, c, g, or t
tgttgctgantttnaccntgtattgaagttaactgttccccgtggtattaacgtgtcagggctgagtgttctgggatttctctagaggctggcaanaaccngttgttttgtcttncgggtctgtcagggttggaaagtccaagccgtaggacccngtttccnttcttagctgatgtctttggcnagaacaccggggctgttacttgctttgagttggaangggtttgcatttacgccngnaaatgtantcaatcgtaanttatgtaaggttttttttgtacgcnattctcgattctttgaagagatgacgncnaattttggttttctactgttatgtgagaacattaggccccngcaacacgtcattntgtaagnaaaaataaaagttctnccgtttcgg

SEQ ID NO: 640030 - DNA, 443 bp, Homo sapiens
tatccctccctttaaattccccccaccctttccctcatcatcccacccccaagaagaaggaataaagatggctgagcaaaaaaaaaaaaaaaaaaaaaaaaaaaaaaaaaaaaaaaaaaaaaaaaaaaaaaaaaaaaaaaaaaaacaacaaaaaaaaaacaaaagcaaaaaacacatgaacggggccggaagcgacaagcaaacatcgcgaagaggaccaccccatcacatcagcacccaccacaacagaagaacaccaacggcaaacccagacaaacgcacgacaaaggataaaaagggacgcagagaatggcagacgcgacaaccaaccacgaaagagagacacaagaagcatagacaagaagatagaaaagaagaacaacccaccacacacaacactgtcgagcagaacaacagcaacaccaggaagaaaaacaccaaag

SEQ ID NO: 640031 - DNA, 95 bp, Homo sapiens
tcaagcttctaacgatgtacggggacatgtatcagtattccattcttcttttctatggctgaataataattgtatgtatatactgcaaaaaaaaa

SEQ ID NO: 640032 - DNA, 472 bp, Homo sapiens
  misc_feature (162)..(162): n is a, c, g, or t
  misc_feature (209)..(209): n is a, c, g, or t
  misc_feature (247)..(247): n is a, c, g, or t
  misc_feature (249)..(249): n is a, c, g, or t
  misc_feature (351)..(351): n is a, c, g, or t
  misc_feature (367)..(367): n is a, c, g, or t
  misc_feature (389)..(389): n is a, c, g, or t
  misc_feature (431)..(431): n is a, c, g, or t
  misc_feature (470)..(470): n is a, c, g, or t
ggagcaactcgctcagagcctgggaacatcacggcgataagaaggctttcctcctcagaggcctcttgtggctttccacaacttcttgtcccatatttttatggccagttaatacaggcaccccataagcctttcccccaacagataccaagcaggcgtgantaacactggtctctgcctcctgctccctgcaggtgccagggcgtgantaacgctgatgtctgcttccgcagtgccagggcgtgantnacactggtccccgcctcctggggccctgcaggtgtgggatgctgctggctgtgcaccgtgggggttcctgagcgtgggggtcactggggaacgacccttgtnttaatttttccaatcntcagcctctggggattcatttntgatgaaagggaaagagcttccctgttgcagttgcgtgttcnttcaattttttgggttttgatttccctgtttgggttcanat

SEQ ID NO: 640033 - DNA, 382 bp, Homo sapiens
tcctggcctcaggtaagccacccaccttggccttccaaagtggcgggattacaggcatgagccactgcaactggccaaaaatttttttaaaaatcatttttacattacttcattgtgtcccttaattttaaaatttcttttgggtcactgacttgaaaaaatatttcttaattccagcttaacttctatccttttttttcaggaagcagaaatgtttaatgaattgagttttttgaaaatattgaaagaattaaaagaaaagtgagtgttttgtcattatctagttacattatgggacctgaagtgaggaacaattggagatgggcttttttggttcctggttgctttaaccatctgccttactgattaaaatgtcaatgta

SEQ ID NO: 640034 - DNA, 436 bp, Homo sapiens
ggaggcagcgctggcggggggctggggccactgaggaaatcatccgcgccgccgcgcgcgcgccgcgccgcgctccgccgcggaggaagacagcgccgcccggcaccgcagcgacccccgccgagagtcccaccgcacaggcctcgggccagcggcaggagctgcctccccaggaggggggacgcgaccaggggtgcatacgttaggacgttagtagttaccgtggcgtcgttatacaaaggatgcttggtagtagaaacttgtggattcgtcgagttctatagtgtcgacctaaactagacggacgggatctaccggttgacggggactcgaattggcgcgtagaacctcaaagcctgcacctcagcgatggggcatggcaataggccacctgggagctgggagccaccgggggtggcagaccataaccaccata

SEQ ID NO: 640035 - DNA, 553 bp, Homo sapiens
  misc_feature (1)..(2): n is a, c, g, or t
  misc_feature (15)..(15): n is a, c, g, or t
  misc_feature (187)..(187): n is a, c, g, or t
  misc_feature (319)..(319): n is a, c, g, or t
nncgactctagaggnacccctctctcactctgataatagtttcgttgtctatgcagaggcactttagttcaattaggttccatttgtcaatttttgcttttgttgcaattacttttggcgaattcatcataaagtctttgcccatgcctatgtcctgaatggtattgcctagactttcttctagggnttttatagttttgggttttacatttaactctttaatctatcttgagttaatttttgtataaggtgtaaggaagggatccagattcaattttctgcctatgactagccaacgaaactattatcagagtgaganagagagaaaatttttgcaatctatctatctgacaaaagtctactatccagaatctacaaggaacttaagccgatttacaagaaaaaaacaaccccattataaagatggcaaagaatatgaacagacacttctcaaaaacagtcaaaagtcttataataaactttcataagatttgcatgtcaatcccaagaggtatttcacacatgtacacctcccaatatactttgaaaacat

SEQ ID NO: 640036 - DNA, 580 bp, Homo sapiens
caaaggggctgttgctgaacagtgtgtatgaccagtgacagtacctacctgttgtcccaaggcatacataggaggcctcaacgctcatgcttctctaatcaagccctaccaagacagacagaacgacagaccgaaaaatagaaggtatagaggagaacgtcgaagctgtggagctagactctgcttcacttactgaagcttcaacttgatgtagaagattcactgggacccaattcctgcattgtcaatatctgtgtgggtgaaacatgggatctggatttagcccaaatgatgaaagcggatatggcacattgtcacacacgtgagataattacagcttgccccacagcactgggtgttggagaaagggagagatagtcattagtggcagaaatagccaagcgtagcgagtgcgaaagagagcgagagcctgtgcaagctgctgacgagccccactcagcccacaagcttctcgtggggagatcgaggcagagcctagggtatgggacagagctgctggagcctctccttgcctcgtgatctgagccacggagcttgcccactccagtccccctggggc

SEQ ID NO: 640037 - DNA, 98 bp, Homo sapiens
gctgccatgtgtgaagaagcctgtgcagggactcccatgtcaaggacttaaagtttttggttgtaataagccaggaactcagacctgccaacagccag

SEQ ID NO: 640038 - DNA, 186 bp, Homo sapiens
ccccccttaaaggggtttcccccccccaatcctggggggggttttaaaagggttgggggccccccccctccccatttttttaatttgaatttggggcccccttaaatttttaggggggaaagggggtggggtccccctttcctgggggtccccaaaaccgtttttttttttttgaaaaaaccccca

SEQ ID NO: 640039 - DNA, 293 bp, Homo sapiens
  misc_feature (37)..(37): n is a, c, g, or t
  misc_feature (45)..(45): n is a, c, g, or t
  misc_feature (70)..(70): n is a, c, g, or t
  misc_feature (110)..(110): n is a, c, g, or t
  misc_feature (252)..(252): n is a, c, g, or t
cttaaaaagtacaaaaattggccagcgtgggtggcangcgcctgnaatcccagctactcagggaggattncgtgaacccaggaggcagaggctgcagtgagccgagatgntgccaccgcactccagcctgggtgacaagagcgagactccatctcaaaaaaacaaaacaaaacaaaacaacaacaacaaaaaaacccaaatcaatcaggaatgtcacatatttacaaaaagaacagaaatactcacatttancaaaaacttatttgccattaatactataatcaaacatgcag

SEQ ID NO: 640040 - DNA, 425 bp, Homo sapiens
gatacccgagacgctggccggaggatcatggagaataacgccgacgtcctcaccagtcgccatcgtgtatggtcatacactacgactgtttctgatcatctgcgaacctccgacttgtcgtacttgattcatatgaaaacattcttggagtatgcttgcgcatctggatccgtcttgcgaccggtccaagaattgtcagccgtctagcggcgcaatacgaatgccctcgcgtgctgtccctcttaagcatggcctcagttccgaaaaccaacaaaatagaaccgcggtcctattccattattcctagctgcggtatccaggcggctcgggcctgctttgaacactctaattttttcaaagtaaacgcttcgggccccgcgggacactcagctaagagcatcgagggggcgccgagaggcaaggga

SEQ ID NO: 640041 - DNA, 139 bp, Homo sapiens
ggacacctgctctgctatatcataactgaatcttgggcatattttctaagaatttttttcttttagagacagtgtctcgctctgtcacccaggttggagttcagtggtgccaccatagctcactgcagcctcgaatttc

SEQ ID NO: 640042 - DNA, 121 bp, Homo sapiens
ccgtgggagtggaagagaatggagagtgaggctaccacataagcgtcccagagctgctccctgctgcctgctcagagcaccccggatccacttgttcaatctgcactacattcggggtcca

SEQ ID NO: 640043 - DNA, 394 bp, Homo sapiens
  misc_feature (174)..(174): n is a, c, g, or t
  misc_feature (211)..(211): n is a, c, g, or t
  misc_feature (250)..(250): n is a, c, g, or t
gttgttgttgttgagtcggagtctcgcactgttgcctgggctggagtgcaatggtgcaatctcggctcactgtaacctccgcctcccaggttcaagccattctcttgcttcagcctcctagtagctgggattacaggcacctgccagcacacctggctaattttttatattttnagtacagacagggtttcactatgttggccaggctggncttgaactcctgaccttgtgatctgcccacctcagcctnccaaagtttttcagaattttttaaggaaacacttttaacccttaaggctttctttcaaactcagatccccttacacaattgatcagacgtggcaaagttttgcttcaaagtttttggactgggtttccactttaggcttactga

SEQ ID NO: 640044 - DNA, 100 bp, Homo sapiens
gtcacataactgtcggtcaatagtatcaaaattgtactgaagcttaaggggggcagagggatataactcattaaatgacgagattcctagccctcttctc

SEQ ID NO: 640045 - DNA, 124 bp, Homo sapiens
gcttttacctcattgtctactagcaccccggtgtactgcccaggaaggcggccacgatacctgtggggaacaacaattgacgaaaaggtctcacctggaaccgaagcggccaggccaagccctt

SEQ ID NO: 640046 - DNA, 1028 bp, Homo sapiens
ttatgtggtaacagggtaggtgtgtgagtgctgctgatggggctcatccaggctaaaatatttttaaaccatctacaatttggagctcctctgacaagcagatttctccaccacgcagggtatggagtatgctcttggtactctggatgacttccatgacaaagaaagcactagggaaccatgtctacttactggtttacatcatggtagcgtcatctgggcccagctgtcattttcattacatttttggagctagaccaactccatttcatttttgtataggcccatttcatatataaaaatgactgaatcttctatttacagtattcataatgtataaattcatctttttcttcctaaacatttatttcaaaatacttttatataaacagatatttagaatgaataaaattgggtaaacaacttaaatcaccatcaaagttattttgcaaaatataaattgttatgacagaagtatttttcaaatcttgtaatctcccaaataagaaaagaagttgattcagtggcaagaaaaaataatcattctaagttaggactaaaactaagatgaaaaaagtcaaagcatcataagacacacaacactacgtgtctggagcagttaacgtcccaaaaacttaccatctctgtttctaacaaagcattttgtttttggtatccttttaatatagcaagtggctataccataattgaacagttatccttaatcattcttatctataccttctaactttaatggaagcttttagtaagatactcttaaaattgctcagattctatttcattatcccctgtcaaacatacctaccctccaaatcatctcaatgagtggacttgatcctttctctatcagtaacttgttcaaagcacacactgtacagtaacatgatttttcttaccaaacaaggagtcaactatagaaaaagaggcttaaactgggcaaaatccaaaatgatagaagtgcttttgactactataaccaaatatatttaagttgttgaatctatttg

SEQ ID NO: 640047 - DNA, 141 bp, Homo sapiens
ctctcatgcatacatcccttacatgtgaccgggatgatcgatgatttcactgatcatagatcagccactatcatagccgtgttatctttagtgatgatctaggccttcacccacggtacgagctcaatcgtatctgtctag

SEQ ID NO: 640048 - DNA, 285 bp, Homo sapiens
tcctgtactgtggtgtacgtctttctacaaccacttaaatgcagtatttgggaagggcaacaattaactgtatagtaccatccgttagttttaaagtgcttcgttttctgttcctgtgatccctcgaggaccactgagccctcagtttatttctgggtctggctttcttttttgttttcttatgggtggggcggtgggtgagtgtcgagactatgacctgagagcagactgtcgtcagattagtttaggtggacattgctacagggacatgatgttgagaaattc

SEQ ID NO: 640049 - DNA, 469 bp, Homo sapiens
  misc_feature (36)..(36): n is a, c, g, or t
agctgttacctgctcacctgggcgtatgcttgatcntcaagtgatcctcgcctcagccttctgagtagctggaagcacaactgtgagccaccacacctggctttttttttttttatttctaataaaaaaatagagttcctggtcacacgggacaaaatatgcatatataggaaggaaagactttgggacttgagattgcgctgaagaagaaaattggaaaaattaggcattttagtctctcagggtgtaattttggtagctaatacagatatgtcttttaaaggtgtcttaaaaaggctttatggagatagagataaatgagataaattcaccttccatgaaatccccttgagtgcagaatttgggggttaataatatgtccacagaatcacacaaacaagacaggtatctagatcctttcagaccattttcatcagtccacaagaaatcccatacgcccgggtaagca

SEQ ID NO: 640050 - DNA, 110 bp, Homo sapiens
atcaaggtcgataggattcaacaatgtgcatcagcccttcaaagaatacagactgtggtttcctcctgggatgacgttcaccaggacccgttggcaccagtgctgctcaa

SEQ ID NO: 640051 - DNA, 115 bp, Homo sapiens
tacttttgcacagggatattttttatttgttcctttttttgtttgaactacacactgttagactaaaagtattgaatttatttcgtgatagtgtttttaccagaatgcttggagt

SEQ ID NO: 640052 - DNA, 137 bp, Homo sapiens
ccggtgttagtggcttggaattcgccctccacttgccgagcacgaagtcatgccccactacagacggctggtccagagtttcctagcagctggccccgatggacagccaatgggcccatttcttctcgagcgttggt

SEQ ID NO: 640053 - DNA, 1142 bp, Homo sapiens
gcccattgttgtctgcgccctccccttctcgggcgtttgtccccatacacgtttgtgcgggcatagggctctcgtgctctttttcctctattccggtcttcttagcttcatctgttggtggttttcgtctgctttgcctccttgtctagtctgggagtggttgggtcgtgtgtttagtgtgctacgggttgggctttattcctggctctggctcctgtaggtcctcgttattgtgtgtcgtgcattatggggatctctaggggtgtttctgcgcatgtgcgtttatcctgccaagggtgacgttgtcaaggtcatatccctttgcctatatggtttgtaggaatgggtcgcaccttgtaattatgctttacttctctacgtatatttgataatgctggcacattttgttgggactttgaatagaattgggaagggattgcttcagtatactcccgtattgaattggtataatgggatattactaacttgagttccggtcactctgggtcagcttctctcttgctttatctcttctgttctccttttttaaggaatacgtagttaaggttaacagttttgcattacaggcttgtgattcagtgcttactgtaaagtggaagttgagattattcttaaaacttcaaggctcagtaattttgaacaactggaacattcatctaggacataatgtacaaagttcagtattgaccataactgcttaaaccatttttagctttcctgcaagtctagttatgttgtaggagtgtacctaagcagtaagcgtatttaggttaatgcagtttcacttatgttaaatgttgctcttataccacgaatacattgcaaacttcggatgcatgttgagaaacatgcctttctgtaaaactcaaatataggagctgtgtctacgaattcaaagtgaaaacatttggcaatgatttgataattttagttttggttatatatccgtaaggcaagtgagtgtacaattttttttttttcaaggatacgggacaattttaaagatgtaatacctaatactagtagaaatattaggtcagtgatcgttatgtatgaatatatggaggctattggtattacatcagcttccttgatatatgtgatggccatattagatgtaa

SEQ ID NO: 640054 - DNA, 566 bp, Homo sapiens
  misc_feature (9)..(9): n is a, c, g, or t
  misc_feature (26)..(26): n is a, c, g, or t
  misc_feature (55)..(55): n is a, c, g, or t
  misc_feature (69)..(69): n is a, c, g, or t
  misc_feature (108)..(108): n is a, c, g, or t
  misc_feature (119)..(119): n is a, c, g, or t
  misc_feature (148)..(148): n is a, c, g, or t
  misc_feature (156)..(156): n is a, c, g, or t
  misc_feature (208)..(208): n is a, c, g, or t
  misc_feature (556)..(556): n is a, c, g, or t
ggcctaggncagacaatggtaacctnacttttagcctattgagacattaaagggnacccccggaaaaanttttgggcaaggttttgcctttccttataaaaattaggnaactgggcaanggtggtttataccttgtaatccccagcanctttgggnaggcctgagggcaggagggaacaccttgaggcctagggaggtttgaagaccnagccttgggcaacaaagtgagactccatctcctataaaaaatgtaaaaaatttagcccaggcatgccagctgcaagtcgcacgcctgtagtccccatcactttgggaggccaaggctggttgatcacttgaggtcaggagttcgagaccagcctgggcaacatggcgaaaccccaatctctactaaaaatacaaaaattagccggcgtggtggcacacgcctgtattcccagctactcaggaggctgagacaggagaatcgcttgaacccaggaggcggagtttgcagtgagctgagattgcaccactgcactccggtctgggcaacagagtaagaccctgtttcacnaaaacaaaaa

SEQ ID NO: 640055 - DNA, 397 bp, Homo sapiens
tcccaggggcgtgtgacccccctgggaatccagttcttggcttttttgaaggaaataatttccccttaggatccccccttagttattcctgtgaaaacaggtcctccttagtgggggtgcaggagcaccaatgcgtttattgggagtggaacagggcccttcccgtttgcaagttgatccagaaagccccccacccaaagtgttaaaaggcccttcttccccttcagaaaagtaaaaacccctgcgaaaccatggagacctttttgccccaattaaagcaattggctggccaatggaggagctaaaatattctctggagctaaaaaaaacttagttgaaggcaaaattgttgtcaccctccagctgagccaatgtaataaaaatgacccctttaatt

SEQ ID NO: 640056 - DNA, 180 bp, Homo sapiens
atcagagcccagctgagaacctgctcgatcctggaaacaattaaaagatgttaaccggccaggctcggtggctcacgcctgtaatcccagcactttgggaggccaaggtgggtagatctcctgaggtcgggagtttgagactagcctggccaacatggcgaaaccccgtctctactaaaa

SEQ ID NO: 640057 - DNA, 186 bp, Homo sapiens
cagacgtgagcactgtgccagcgatatatttaatagggagcattatttcctattgcaactatttgcacaaaatgctctccatgtacatcttagcctgaaacttgggtttattcacgcagtggctggacgcttattcagccataatcactgtgcaaatagctatcgtgacctcgctataagatgtct

SEQ ID NO: 640058 - DNA, 346 bp, Homo sapiens
tcccaggattccttattcgtgttgcactcgtcatagactaggggattagaacaacctgtcaagggaggggagggggcaaaccctgcgcacatgtcaagcattggcaacacagcatagaggcctcccgccaagaaattttttgctcaaatataaagcagaaatctctcaccaaacaccaaaccagttaactatgccaaataccacttatgatcaagtgaccttgaggcactgctcaatttttccaatgttctttgggtttttagggggtggagtggaggggaaactaggaaggtaggcaacataaggtccctaaaaagccccaagttcaattgtgcaacacgaataa

SEQ ID NO: 640059 - DNA, 885 bp, Homo sapiens
  misc_feature (540)..(540): n is a, c, g, or t
  misc_feature (572)..(572): n is a, c, g, or t
gttttaaagaaagagcaaatgcagtcataaaattatgaagaataattcattaagattacattagtttacatttttaatgatagaaaacctttattcaaagcacaaaatgagttgatatgctttctgcacgcaaacctaaaaagagatatggtttaagtatggaagccactgtcatgtggcccaacatttgagcacatcttctggctcagtcatgtacacttaacctctggatgactttcaggtattcagtttgaatttcttttatttaaatggttactcctgatggattccgtttttctggaatttctgtttttcattagtgcatttcagaatgcttttttagttacggattcttatttccaaaattttagccattactttctattgcctgatcttgtcttcattttcgtaaacaaatcccttcttagatagtgcagttaaaatgatggtactttctactacttgcagaagagaatctgtgtggctggcttatgcagtgcttattacagaaacaaacaagaatcagtgattattcagtgnttagttttctttgcttccctctaccccaattnattactttttctcaaattattcttcaaaaaaggtacatgaaaataatatatggctgacacatgctatgatatttgtttagccgtgggaaggaatagttgctattaactcagatggtttattttctgtgttcctttttgtttattgcatttgtttatttaaagtatttccaaagtgtttctttatagtacaaatgactattttgaagcagtatctcaagaattcagggaaaatatatgttattgaggaagaagagggattttttttcttgcccaaattatctagattaatgatatattcattaaatttcccaaa

SEQ ID NO: 640060 - DNA, 886 bp, Homo sapiens
tgcagtggctcacgcctgtaatcccagcacttggggaggccgaggcgggcggatcacgaggtcagaagtttgagaccagtctggccaacatggtgaaaccccgtctctactaaaaatacaaaaaaattagttgggcgtggtggcgtgcgcctgtggtcccggctacttgggaggctgaggcaggggaattgcttgaacccgggaggagaaggttgcagtgagccgagatcgccccactgccctccagcctgggcgacagtctcaaaaaaaaaagaaaaaaaaaagcattacatctctgaaggtaaagtttaaatcagggggctcaagattggcaggtacagcctgtgttaatgccttcaataagtgcttacgttcctggtctaatgggtcataatttccacatcctcttcagatacaatctgagaacttgttgactaccttggttacttgcaaaaatttctatttaatatggcattatattaatggttccatagtacattccagttctttatctgaatacaagcgtttggctttaattcccagtttctgggaccagaacaataaaatccataagacatcgtttctatatggtcatatacgtatatcgaataacgactggcatgtacaatcattgaatggagtatacagaacctttagtttaagagctaaggtacctcaggggaatcgggtaaagtgattccccttcgtaaccgtcatttggtgtataaaccttaagctttctaaataatacggtatccaatataaggaatagcgggtaggtagaaaggaattaccatggggaattaaatggaactttatggagcgtaatcatatttcctggtaccaggtggtgactgaataagataagtgattggacacgagattg

SEQ ID NO: 640061 - DNA, 302 bp, Homo sapiens
gttttttttgggggggggggttccaagggttcccccccgggggttttaccggggggatttcccccattccccccccccttagggggggggttgggggcccccccggggccccccagggggggttaaacgcaaccccccgggggggggggttttttttggggggggtttttaaaaccccccccccccccagggggttttttacccgaggaattggtttggaaaatttttgggggttgggggccccccctttgggtacccccggtttttttttttaagggttggggttatttttttttttttta

SEQ ID NO: 640062 - DNA, 932 bp, Homo sapiens
cggcttcgctcccgggactgggagccggcttttccgcacatatggggctgctggacggcaggagacagtggcgagcgggccgggaagccgcgcagtggttcccgccgcaggaccggaggcgttcttcaacagcagcgggatcaggacgccagcatcggcgacccctcgcagtccgacgatcctgacgatcccgaaggagcccgacttccccggcagcccggtgaggcggcggcggaggtgtcccggcggcgaggtgcccaaggaccggccagcctgaccgtgacccaaaggcgctggaagctgcgagctcgcccaagcctaaccggtgaccccaagacgccttggggctggggagctcggccccccgcagaagtgcacgtacacccctgtggcccgctccgactttccgcccttccccagccgcgactccggcgcctcagggccggacctcatgtcgtgtgcgggccagcccaggaccggcgatgaggcttggggcatcagtgcctccctgttcagctctctggcctcggccctgcccccggggtccccaagtgccaagggaccggtgtctctccgaatcgggcactcccgccttgtctggtttcgagcctcagtccgtcccgcagggggccttcccaccctcccccagaaaggtcttccccttggacgtgaggcattttgtcccccttgctccccagtgatgggacggcggacgggcggaccgccagtgtccccattggtttggtccaccaaaagcccgtcggccaggcctcacagggacaagttctctatggcgtgtatagaacccggggacccctggggggttctggcggttcgcggccctcggggcgacaattacaactctcctcgtgggcacgtgctgttggtgggatcgcccgcgttccttttgcctccccgcggggtgtggcccg

SEQ ID NO: 640063 - DNA, 252 bp, Homo sapiens
  misc_feature (34)..(34): n is a, c, g, or t
  misc_feature (54)..(54): n is a, c, g, or t
  misc_feature (63)..(63): n is a, c, g, or t
  misc_feature (107)..(107): n is a, c, g, or t
  misc_feature (109)..(109): n is a, c, g, or t
  misc_feature (115)..(115): n is a, c, g, or t
  misc_feature (144)..(144): n is a, c, g, or t
  misc_feature (192)..(192): n is a, c, g, or t
  misc_feature (196)..(196): n is a, c, g, or t
  misc_feature (199)..(199): n is a, c, g, or t
  misc_feature (219)..(219): n is a, c, g, or t
  misc_feature (236)..(236): n is a, c, g, or t
ccctgtgcccttggggggaaaacaaaaggggganaacgcccccgcccctcctgngatgtgggnggggttggatttggtttttaacccgttcctgccccccctgcccnanagttanggcctgtgttttgctttcctggtcccagngccccgtttgctttgtgaactcctccccccaggccctttttaccccangggngtntgtccccctcgttttgtagngtttgtacataataaancaatggagtggagcca

SEQ ID NO: 640064 - DNA, 309 bp, Homo sapiens
cgcgtcgacactccaaataagtgatatttaaagtgatcacaatcagttcagtctagcctggtctggcctggccctttacaacaaaagcaaataagcttttagcaaagcattaaaactcaactgaggccaggcgcagtggctcaagcctgtaatcccagcactttgggaggctgaggtcaggagttcaagaccagtatgccagtactggatcacttgaggtcaggagttcgagaccagtctggccaacatggtgaaaccgccgcgtcgacgtcgacgcggccgcgaatttagtagtagtagtagtcgacc

SEQ ID NO: 640065 - DNA, 359 bp, Homo sapiens
  misc_feature (33)..(33): n is a, c, g, or t
  misc_feature (49)..(49): n is a, c, g, or t
  misc_feature (205)..(205): n is a, c, g, or t
  misc_feature (306)..(306): n is a, c, g, or t
  misc_feature (310)..(310): n is a, c, g, or t
  misc_feature (313)..(313): n is a, c, g, or t
atatagggctgggtgtatggactcagcctatantccacactttgggagncaaggcgtgtggattgtttgagcccaggagttcataccagcctggattaaacaatgtggaacaacctgggcaacatggtgaaaccctgtcttttacaaaaaataaaataatgccgggcaccggtgttacgcctgtaatcccagcactttgggaggncgaggcgggtggatcacgaggtcaggagatcgagaccatcctggccaacacggtgaaaccccgtctctactaaaaatacaaaaaattagctgggcgtggtnaagntgnctctgctcaaaaaataagtaaaataaaataaaaaaataattagctg

SEQ ID NO: 640066 - DNA, 567 bp, Homo sapiens
atttaaaatttagttttaaattttttttcattttgcttcccccccccattccggggggcccaccggacacaccaccgtggcgcgccacccgagaaaaaaaacacgcctgcccacaagcccaaaccctgcccacacccggccacggcccgaccctgggccaaacacccgccccacacactcgctagagcactctccccttcttggcgccccgttcccccaccaaacccccccgaccaccccaccgagaaacccccccacggccttcaccgcgagacacccaaccaaaaccccccggatatctttcacaattgcccacccctggcgaggaaaagccgcggcccctcaccttctccaaaaccccccgaaaaacccggcggaaccaccgacccagtggtcccggggccaatctttctccctccaactccccccccaaccccccggcacaccaggcgcaccccggggggcccacggccggccacacccctcacagcccgggcgtccccgcgccgaacacccggggaccccgcgctcccccacccaaacaccacccccacccgcgcgggggcg

SEQ ID NO: 640067 - DNA, 226 bp, Homo sapiens
  misc_feature (82)..(82): n is a, c, g, or t
  misc_feature (101)..(101): n is a, c, g, or t
  misc_feature (110)..(110): n is a, c, g, or t
  misc_feature (139)..(139): n is a, c, g, or t
aaatttttttcccccacaatttgtggttttttgtttggagggggaacaaggatatttaagctggggtgtgaaagggtagganatatgctggaggtgggggngttgggttntagcccccccatattatcccagggtcccnggccccccttttcccccaccccatgcccccaattttgtggggcatccagattgtgaaaatgtccaataaatgtgtaatgagtaccca

SEQ ID NO: 640068 - DNA, 985 bp, Homo sapiens
  misc_feature (247)..(247): n is a, c, g, or t
  misc_feature (985)..(985): n is a, c, g, or t
ggctgtcgccgccgcggagacaaagatggctgcgagagtcggcgccttcctcaaggaatgcctgggtaacaaggagccaggtgctggtcgtgtcctttggtcgtgcgggggacctcgtctgtaattcgtgtcccccattgagccctctacttgcaagtagctccgtcatgatcaacaagggcatgccctacaactacccagggcccgtccgtgaatgatgggaacatgccacgatcgtggccccagnccatcgcgcacaggatcccgtcgatgggcaccctcgaagtccatgtgaacgtggtctcgaacgacaagctggtagtagtcgagcacctttcaccaacgtgaacgacgtagagacgagacgacttcgcttcacaggattccctaaatatgaaattgttgatacaactcataacaactgctattagaaatgaaagagtactttctcaaggagaaggcgcgaccagtgcgcgcctacagaaatataagtgcgcatctttaaaaccccaggacaagtatgtgtgcgtgccgtgcgtggaaacactgcattggaaaatccaatagtctggaggacatctcttattgtgtacacattccttgctaattcggaggaattcacgaagtgaatgtgagaacattgcgaaattaagataaacctggaaaaaccgtttgaacgcccacagaggggggagaaaaaacacagagaaagcagtgactacgtgagcacaacacaattttgccgagaagagggcggaaattatgcagaaggaacagactaacaaatacgcgggcggtacgttaagacaacacacaccagggagaagagtggagagacagaagggccccagaagtaggagcaaaaatataaggccactaggggccaaggagtcggtgagggacccacgacgacggcaagcaccagcgcgggagcagaagcaaatagagtgggaggaagactaccacccacaccaacaaaacacan

SEQ ID NO: 640069 - DNA, 652 bp, Homo sapiens
acagctgggcacatggccaccttatctgtacaaaagatacaaaataattagctgggcatagtggcgtagcctgtagtcccagcaacttgcggggctgaggcaggaggattacttgaagccagaagggtcaaggctgcagtaagcctagatggagccattgcactcaagcctgggagacaaattgagaccctgtctcatacaaacaaaaaaaggtcatggggctagagaagaagtgtgttgcacgcccgcccttacacttcccccaatgctcggtggcccactgcagctccatctcctccgaagggactgaactcctcgtccagttcttctcagatctcattgtcaccgatgatggcttctcagcctcctacaagaccctgccgcgggccactgccaaagaaggtcaagggcccggccccaaacggggaactgatcctaaagttcagctgccccccaagtcccaacctccggagaaacctgaggactcaccttcagcccctgatgcacccccctgcccaaagcagtgccgccggacagccacctgcagagctgctctgtgcccgcgcttgtggtacttcaatgtgcctcctgttcggaccaggtactcctgccggattgcccttttgggcttaactgcggttactgctttccg

SEQ ID NO: 640070 - DNA, 644 bp, Homo sapiens
gggctggagctcgccgccctccccgcccggagccgcgaatgcgcctcggtgcgtgcaccgccggaggctgggcacgctcgcagcgctgctcggcgctggaccccaccgcggcaggcgcaggccagccacacccgggtctgtgcggctgccccaccgaagacatagcacaggacagaccccaacgacaccgcacacatgacacacaggacgcgggacatggcctggagactggactcggccagaggacaacatgaatcaatcgagatgacataagcatgcatcggagcagccgaaagagacagaaagcacgaacagaacaatcccacacgagacggaagcacacaatcccgaccaaagaaaagacacggcaatagaacccgaaacagaagaccacaccatgaaaccagacaggagaaacgaaccagacaaagcacaagaagacgagaccccccagccagaaacgacacaccaacatcaaaggcgcaacaaacaacacaacaaaacaagaacaaacaacaaacaacaaacaactacaataaaaacacataaagcgacaaaaacaacagcacacacaccaaggaagcagtccaaacgaacgacaacagataatcaccataacccgacacaaaacaacacacaccaac

SEQ ID NO: 640071 - DNA, 302 bp, Homo sapiens
tgagtataacacacaagggtatgttgcgacgtcgtcactaggtagaggacgctgcatgaagtagagggcacatagggcctcagaacctcgggaagtgtgtcaggctggagaaggcccggaaatacaccatgccattggtgggctgggggcagcactgaacagggatatctccagctgggaaaagcgtagcttacacagtgacctgtcaggaccaagtccaattccgtgacaggtatggtgggttcactatcggaaactaagaacgctggcagacaagaggcatcttgaggttagcttgtgga

SEQ ID NO: 640072 - DNA, 140 bp, Homo sapiens
atacagtgatcttatgatttctgtagatcctcttacaagcctatttacagccgtcctgcctaaatcagagaggtatgtggtgtgcaagggctgaatggtgggcatacgatgatgtacgggattacctacttcgctagtga

SEQ ID NO: 640073 - DNA, 729 bp, Homo sapiens
ggacaggacggaggtggagactttggcctttcaggcagaaatggcccaacctcatgtccctcatcatcaattaccttctattccaatcaagcgagatttaaccttgcgggcagttgatctctaagtggcttctgatgcctgtggacaaggatgcgctatggagacgccgtgagcagagcgccgttcgagagttggagcagtggtaggagacgctgtaacaattgacagtcgatccccaaccgctcaggatacgtagccctgtacttgggtagacacacggcattggcatgagcaaaggctgatctcatatatatatagttcgggaaccattgccaagtctgggtactaaagcattcatggaggctcttcagagcgggtgcagacatctccatgattgggcagttgggtgttggcttatatattctagccttacttggtggctagcagaagagtggttgtgactcacaagggacacgagatgagtgactgccaatcagtgtgcttgcggagtcttcttgctggaggttcctttcagctgttcttgctgatgatggtgagagcatgggtaggggtagaagagtgaggcgacgatcttaaagaagatcatacatgatgtagccgtgtgaatgagtagggtgggtcaaaagaaagtaaggtgaaggaatgggttgtcagatgatattgggataccatgaaggctttaatatggactaaaggagtggaaacaat

SEQ ID NO: 640074 - DNA, 681 bp, Homo sapiens
taactgggactttgtggaacaatgtgcgcatttgtagccatgaagatgccatcttgcccaatatgcctctatccacctactgcagaccaagataacccgattgtggacacatcttctgctgggacatgcatccatgcactatctttcacctgatgtgagaatgactgtggagtcaatgtcccatctgcttacagatcactgtgcactaacgaagtgatctcaagagatgtagtatgccacatgagtcacatcagctatgctcgtatgtgttgataccagttacagattgcatgctagatgacacgacgtggacgacaaggggtgttgttctgagtggcctattggccacaaaaatccaaccatggacttgaaatgtacgaactcaataccccaaatatcacttactaagagaagcatcgcaaccatgctacgatggtccaaggtatcttccacaaggtttggcttggcattagtgccccatccttcaacatggtcacagacaaagggagatggcatttggataccctggttgagctaacagataacctttgtcaacagtgaatcgaacaaaatgcatatgcccacccttacagaaacggcatcacaatttagccattggtcacatgactatgtgaggcacaatagcaatcaacttttaccacacagtgaaagataacccag

SEQ ID NO: 640075 - DNA, 278 bp, Homo sapiens
taatgtgatactgtggtctgagagacagtttgttgtgatttctgtttcttttacatttgctgaggagtgctttacttcctttatgtggtcaattttacgagtaggtgcgatgtgatgctgagaagaatgtatattctgttgatttggggtgaagagttctgtagatttctattagacctgcttgttgcatagctgagttcaggtcctggatatccttgttaatattctgtctctttgaatcaccgttatctaccatttccggggggtaccgaagctca

SEQ ID NO: 640076 - DNA, 355 bp, Homo sapiens
ggtaaccgtcatggcccttctttttctctttagctcggcttattccaggggtgtgtttcgccgagatgcacacacgagtgcggttgctcatcgggttaaagatttgggagaagagaatttcacagcctcggtgctgattgcctttgctcagtatcttcagccgggtccattggaagatcatgtttaagtgaatgaagtgactgaatatgcactctttggagacacattatgcacagttgcaactcttcgagaaacctatggtgaaatggctgactgctgcgcataacacgaacctgcgagaaatgaatgcttattgcaacacagagatgacccccctcctacgattggtgagacc

SEQ ID NO: 640077 - DNA, 320 bp, Homo sapiens
tgggggggggcccggacccaatttcccctttaagggggggtattaaaaatcactgggcggcgttttaaaaacgcgggaatgggaaaaacctgggggtacccaaattaaatgccttggaaaaaaaccccctttttccaagtggggtaaaaaaaaaaaaggccccacccaatcccctttccaaaaattggccccccttaatggggaaagggaaaatggaaaccttaatattttgttaaaaatcccggtaaatttttgttaaaacaactttttttttaaacaaaagggccaaaacgggaaaatccctttttaaataaaaaaaa

SEQ ID NO: 640078 - DNA, 227 bp, Homo sapiens
tccttgataaacaaacacacaacaaaagacacatgtcttcgccggttccgggctcaggaagagagcgcccggaagccctggtgggccaagcacatcatggctgcccgtggagtggagggcaggggggtggctgctacagaacagacccctggctctgttgcgtcctccgtctttgggacacttggtgtgcgctgaaccaggactgggctgggcataatctgtaaata

SEQ ID NO: 640079 - DNA, 129 bp, Homo sapiens
cgacctgtgttatgtcagtgtgtctaaagaacgtggtagttccccacaaaaaggttgcagttgccacaccagacaagaaagcagctgtcactccaggcaaaaaggcagcagcaacacctgccaagaaga

SEQ ID NO: 640080 - DNA, 989 bp, Homo sapiens
  misc_feature (1)..(1): n is a, c, g, or t
  misc_feature (267)..(267): n is a, c, g, or t
nactcttgtcactcaattattgtcatatgtctgctgaccccgcctcgtgcttgtcgcgtgcgtccggtagaataccctggccccccggcgcttggggcccaattttaaccattcggtccccggcccactccggctcccttcccccgtgaacccgtcaacgtgtaagctggcattatagtaggtctgaggaataaggcgatgttggggcaaatggggggcattatctggtcacgttatgggccgtcaggacggatcatagcgggcgcngatgtcacataatgaaagcgggcgatcttatacagagcaggtgccaagtctacagtttcgactcggatcattcgtcagtctcacatcatgagggcgaccatttcacccccgcatttcttgccgccccatccgggggctcaccatggatcccacagttccggaggcccctccgctttcaattaatgggatgagattgcgaaatgcatctcatgggggggacaatttcgaggagtttcctctaatcgaagagacgatatcatctgcgaagcatcaaacatattcgaacgggagcattctctattcaataacatctggatgcaattggatagagtcaaatataagtgatcatataaataagaaatcaatgtggagtgcggacattagcatgaaattcccaagggggcgaggaatgagagaatgggaaatcggagatgaaaccccgatgcatgtcgaatataaaaaagcgacatattcggagtgcaatatattattaaattatgagggcgaagagcatgagattgtcaatattggatgtcgaatccgcaagggtccaatttgggatgcaatatactatggagcatgatccaatcgtgaatacaataatgaatgccgatgtaatgctgtgatgcgatgatgcaatcaacgcatgataaaggcaagaagcgaagatcaaatcaagagggaaaaaaaacaagaattaaaaaaaaaatacacaaaaagac

SEQ ID NO: 640081 - DNA, 1510 bp, Homo sapiens
  misc_feature (95)..(95): n is a, c, g, or t
  misc_feature (98)..(98): n is a, c, g, or t
  misc_feature (101)..(102): n is a, c, g, or t
  misc_feature (105)..(108): n is a, c, g, or t
  misc_feature (358)..(358): n is a, c, g, or t
  misc_feature (409)..(409): n is a, c, g, or t
  misc_feature (413)..(415): n is a, c, g, or t
  misc_feature (417)..(417): n is a, c, g, or t
  misc_feature (420)..(420): n is a, c, g, or t
  misc_feature (774)..(774): n is a, c, g, or t
  misc_feature (869)..(869): n is a, c, g, or t
ccgggaggcagaggttgcagtgagcctagactgcaccattgtactccatcctgggcgacagagcaagactccatctcaaaaaaaaaaaaaaaaanaantcnncannnnattcaaggctacacatttactccatgaagtgagcacacttcagacttccagtcttgtgtggcctgtctaccacaccatgagacttcatgtctctcctaaatgaggagaaccaaagctggaaattgtcaccccctgtcagcccacagcactggtttctaaacctactggcctctaccgcttcacttctcactgaatctctctgacctaccttccagcttctcttgagaacttgactcttaaattcattggngagaaaggaaatttttgctccaataaactgggtagctcagtccaggagagngtcnnnancanactgtcctttgctaaatgggactaatgggaagaatagtgtctgccaaataaggtggttgaaggattggatgagactgacatttcatttgcatttagtgaatacttgttgaatgactgaatgaatggttgatgtacagaaacatgaacagagagtagagcagaacattggtgaatggtagtagattgcctcagacgcccccctttagaatcacacaagctgtcatctgtgattgcatacctgtagaagtctctatcatttcgtagtctatgtaaatgttgaccaactgagttgttcagtgtacagactgaacaaccatacagggaatccctaatctcctgcactgtgagtcaaanagtcagacaggtctagatgcatttgcttcaggtgaggccaaggcagtctactcttaatggcacattaggctttggacttgaggccgtgtcttttncatttcgcagcaatcagaaggaatggggtcgccccatgaacttcttaaccacatacaggctcgtggcgtggggtcttcatctggctactagattgtttaaagaaggatttttgtgattcttctaggctgacacattgcctgtcatctgttgtttttctaatcttctagtaaacatttggaaagtgaaggtttaggcatgtatgtttctcttatgtaggaaggggaaataaggccatgagattgcatgagttttctttccaagtttgtgcagatctgcacaatgattgaaatatttgcaacctgtagagcagcagggtatttatttggcagcaaacagtattgatggattcggggaatgccatttgacagttacaggctcccgtgaggcggtgcagctcctccgagccagggatggagctggggattgagtgacacaagactctttgggtatgtctcaaacaatataaatcaccagcaaaatctcactcctacaaggagaacctgcagggagctccgtgggaggcactgctgtttactctcctcattccccactgcaaccacgcaattaaaaccaaggaatggaatctgatgtctaccgcagcggttttttccatctccattccttctgcattgggaggctt

SEQ ID NO: 640082 - DNA, 166 bp, Homo sapiens
ggaggaatgggcctcctacaagaagatctgatttccgagtcttgtttcaggacttcctccgtcaggcagctggcaggacctgaaggatcacactgcgcagaagctggggatgtctgttatgctggtgtgcagaaggatggagtggggatggtcgagtatctcagaa

SEQ ID NO: 640083 - DNA, 1749 bp, Homo sapiens
  misc_feature (1072)..(1072): n is a, c, g, or t
cgccccaaccccggagtggggcctgaggcgcgcagcctctcacacgactcgacgccaacggggtctctcgtgatcgctggcgctgaggcaggagggtgcggggcaggagtggcctgcggctgtggccctgggcctgccaaagttgtcatgcagtggtctgagggcctggacgtggggccccagaagcgactgctgagtgctgtgctgggactcggagtactgtgactgtgagccccgagctctcatgccctgccacgacacgcccctggagccatccaccgcgggagacccctggcatcacgaacacacccagattcgagatcacgcggtgtcctatactaggggccagacgtttctgcgcgcgacaacgcaacataacaagggcacagcatgagaggatgtcagggagagaccaccgcaccaagcaatacatagcccccagaacactacacatgtcacagaggagagatcggatagagaacaccaacagcattataccaacagccaacccatagacaagaaccagaataacaccatgctcacaccgaaacccccacccattataaacaccacgcgcggacagcgattagcaacgagcgcgcacactatggcacgcttgaaccagaggatcacaatcccaccggaccacgcaacaactaggggaccaacacgagcccgagcaacgcactcgaacgaggcacgcggacgagcgccacccaccaacgaaagcagcccgcagcacacaagatcgacgatcggacacgccaccaagccaccattacgccataacgggcgcaacgaggacaccggtcagcgaacacaccgaagacacggcgaagcccgcagaccacacggcaaactcgacaggacaccgcgataaccccaaggcggagacaccacagggcgatggaaaaccctacagcacagcgcacatagcgaaaggggatacacaaacactaccccgcagctcgtctacaggtcaccacaacaccccatcacggacatcacccgaatccaacccgtacaagagcaccggaagagagacaaacgccacgaaggatcgagcctacancacaattctaaccacccactatagagtaccatcctataccgatcagacagcacgatatcagtatggccgacgcgcgaggcggaagtacccaagaacacacactccacacgcacagggtcaaacattcacgccgagctagagctcagacgcgcggctagacagcagcaatcatcgacgcagccccttcagagcaaacgaggagcaactaatacgcgcgcagcgacgaactaggagacgccagcaaccgagagatgcaccaaccagacagatgagccaatagcacgtaatgaagccagcgcaaggagagaaaccgaggcaacgacatgctgcgaagaagaacagaccgaccagagtagtagacaactagaaatgaactatccaaaaactaatagagaagtcacccatacagtcataaacacacaacaatacaactgtaacatatcactaaaaaacacactaacgaacatcataaactataatcatacatcatagaatagcgagaaaccatgccggaagaaccaatacactagacaatcacacatcatcgatacacaacaaatataatagagaaacaagacagacagatacacagataatctagtatcaaacgactaactaagtaacatatagatcatcaaggaacaaaatacgacatccacacaataacaaacagacaa

SEQ ID NO: 640084 - DNA, 83 bp, Homo sapiens
  misc_feature (50)..(50): n is a, c, g, or t
tccagtctagcgtcctggggcagtggctccaccatggcgttgctgggcangttcctttgctgcctactggttgcctggctctg

SEQ ID NO: 640085 - DNA, 311 bp, Homo sapiens
catcaagagagaggcacatgaaagcttgggaaggagagagtttacttctaccccctattcaggtttgtgccctctggtttccagccccctcccacattcaaggcgaacatttaaacctctgggttcaagttccgttgtccaactgcgtgggcgtgagatctggggcaagccccttcctctctcggatcttacgtttccccctttgtacagcagaacactccacaatctgatgtgtttacaacttgacatctacttattgcaagcaagggaaactgaggcacagagcggggcggaaatgtgtctaactctct

SEQ ID NO: 640086 - DNA, 684 bp, Homo sapiens
gaccagcctttgaaacctaactatgcagcagtgcgaggccaaaagatcatggaggggccaaaatattcagatgagacattgggcatgtcttccttaattcactgatattttctacccatggcctaatatcaccgtatgaaagggaaacttacaggacttaaatatcagggaaatattttgagatctttgaataattcctttagaggaattatccaaaattaatatatatgagtccttggtaattaatttttttttgagacaggatctaactttaaccgcccaggctgaagtgcagtgccatgatcacagttaactgcaggttcagccttctgagttcaagcaatccttctgcctcagtctcctaagtagctggggctttaggtggccactgccacaccgtactaattttggaatttttggtagagacgaggtccaaccatgttgcccagcctgtggtcaaactcctggcttaagtcagtcccccaatttaaccttccccaagtgcttgaattacagccgtgagctactgtgcccagccttacggacatcctttggaattatctttttcactcattggatatggatcccttaatttagactttttctagacctttcctggtttccatggctttgcgtcaatctgcaatggcctttacaccctctttataaaggttggggttggga

SEQ ID NO: 640087 - DNA, 188 bp, Homo sapiens
tggtgagatattttgggacatttttccatagtgaatgaaaagctatagaacaattatggcttaaattgaaggcattcccgaggagcccgaaacacaggacaggctataactacggaatttacatttgcttcaggaaggggaattaacttggggtttaattaagttaattcttgaattggaaaaaacta

SEQ ID NO: 640088 - DNA, 249 bp, Homo sapiens
gtgactgactgtcatcctatggagaaataaatgccgtaaagagggccaggtggctaggctatccttgatggttcacattcctatctccagcatcttccctaggtcaccatcagcattaataaggggaagacatatacatccacattgtaatgcccactgtgtaagtctgagacccagatattgtcaaatacctaaatacctaatagaaagccaacttgtctgtggagacacagacgagggtaagccgtg

SEQ ID NO: 640089 - DNA, 409 bp, Homo sapiens
aagatcggcgattatggtctggtttctcggcgtgtgcaatgtggaccgtgaagatcggcgattttgggttgctcagtatggggactcggcgtgtgcagtctggacattcggcgtgtgcagtgtggattctcggcgtgtgcagtatggtctctcggcgtgtgcagtgtggattttcggcgtgtgcacgtgaagatcggcgataacggattggagcctcggcgtgtcgtgaagatcggcgagattgcactcgtgacgatcggcgatttcggactcgcggcgtgtggagcctcggcgtgtgcatgcacacgccgaggggaccaaactgcacacgcaagcgggacagattctgatggccatggtggcgatatctatggatattcggcgtgagtatggaggttcggcgtgtgca

SEQ ID NO: 640090 - DNA, 537 bp, Homo sapiens
caggattaggcttactttgtttgtgttttccccgggaaaaattactttttttggaaatgccccgaaacacatttttgttcttagggggagaggataggttccaaaaccgcggtcaaggctcataaacctaaggggctttatttcccataatccttggttgggccgaatttcatttcaagtttatttaacgcgtcaccccgagtttttttttttttttttcaaaagccttggacttataggaaaaacattttttttacttccgaccttctccttaaaagagagatttttgcatcttaagccccatactggggggtttttttactttatatttttatcagctgcctttgaaactgggctaaacctggggtttcgggaattaaaaaattaaatgtttgccccaccctgttcttgtttttgaaaaaatttcattttttaaagatccccccccccggtgggggccccctgaaagaatcttttccggaagggtgccaaggttttttgccctggagggtccattcataaaggggataaaccttg

SEQ ID NO: 640091 - DNA, 824 bp, Homo sapiens
  misc_feature (21)..(21): n is a, c, g, or t
  misc_feature (266)..(266): n is a, c, g, or t
  misc_feature (301)..(301): n is a, c, g, or t
  misc_feature (304)..(304): n is a, c, g, or t
  misc_feature (320)..(320): n is a, c, g, or t
  misc_feature (324)..(324): n is a, c, g, or t
  misc_feature (327)..(328): n is a, c, g, or t
  misc_feature (347)..(347): n is a, c, g, or t
  misc_feature (405)..(405): n is a, c, g, or t
  misc_feature (421)..(421): n is a, c, g, or t
  misc_feature (441)..(441): n is a, c, g, or t
  misc_feature (473)..(473): n is a, c, g, or t
  misc_feature (475)..(475): n is a, c, g, or t
  misc_feature (528)..(529): n is a, c, g, or t
  misc_feature (582)..(582): n is a, c, g, or t
  misc_feature (595)..(595): n is a, c, g, or t
  misc_feature (602)..(602): n is a, c, g, or t
  misc_feature (604)..(604): n is a, c, g, or t
  misc_feature (618)..(618): n is a, c, g, or t
  misc_feature (653)..(653): n is a, c, g, or t
  misc_feature (796)..(796): n is a, c, g, or t
atcttcaatgcatactttgtngtttatataaactctacattctcttaaaggttttcgttttgttttcactggagatttttagcctccaagtgaacttaacatattgcctatgcatctgattctttatagacttttagattttaaaactaaatttgagaaaccatgcatactgtataccttatttaataatccaaagaattgtttgcactttcaaaaaagttacaaaaaggctgaacacaagttaaataacctatatgatgtaaatnttccatttctgaatactttttcagtattatatatngcntgcggtctaataagtnagantgnnagagacgcttcagtaaatnatctctactttaaaattatatctgaatcccctttctctgagatgaacttgccaatatnaaacattgggccatangcagtattagcccaaaagcntaaataagaaccaaacttgtagactgaatatntnaaccttaaaattatataccgatatagacaccgatgggaggcggcatatgaaanngaacattgcaagtaacatatagagagcaaacattcagccaaatacgctggcangaaaagagaccgncctgaananaaaaagtgaatganaagcgtagggagacacgaatgtcgagatagaaggncgaagccgatgagacttgaagctaaagtctgctgtactattaagaaaaagaagattgattcttaacctactgaattgtgcagatacaaaagtgcttagcatgacaaaattaccaaaataaaaacattttagaggttatttggntctagcaatattaactattctgtatttc

SEQ ID NO: 640092 - DNA, 400 bp, Homo sapiens
acctcagcctcccaaagtgctaggattacaggcatgaatcaccaccatgccctgccgcacagcagcttctgctcaaaaagtagaatgctactccccatcccctgctttatggaatctctttcagctacttttgagtaattgaacactgcatatttatagttctcaaattgctgtggtcaagaatgttggcattcaccagtctggttctcctctttgctgggcacgcagctaaactaaatttctcagccacctttgtatctaagtgggatcgtgtaactgacttctggtctttggaatgtggactgaactgatgtatgtcacttccaggtgtaacccataaaaaattccacctaatctcctatgtgtgtgtttctccatctccgtttggtgctagatggcc

SEQ ID NO: 640093 - DNA, 475 bp, Homo sapiens
gttacatatacgcggtgaacggatttcatgtaaaaactaccgctgggatgtcactcttcgcacaagcccgtaaatcgttcaagccctatggcgagccgccttgcccagctgacttaactggttattttcccggactcccaccgtgcagggtgttagaaaaaaacgaggctgggtcttaaagaaagacaaacacagggcccaaaacccgaaggcaggctctcatggcacagatgctttagattagctctactacttcgttgctgaaagctatgatggcatctacctaggaagtccctgaccgctcaatccaagcattccactggaatctctgccgcgatgtccaacatcccgggccggtcagtaacagtgttcccacagttgctagtgtgtcgtgctcatagatgaacgacacctactcatgccatggcgtgtgctgaaagagcctaacctgccatgcagcatatgcccagtgccg

SEQ ID NO: 640094 - DNA, 92 bp, Homo sapiens
aatctccctatgaagagggtgaggggcctaagggagccgcaccttgtcatgtaccatcagtaaagtaccctgtgctcaaccaaaaaaaaaaa

SEQ ID NO: 640095 - DNA, 232 bp, Homo sapiens
tcatgtttacatgcgtcagtgtgagacctcaatgtattcgtgagcttttgcaggaattaaggtaataggaggtggaggcttcttgacaatctcttcacgtggtgtcatctctttgggctttgacacaacttttttggcatctttcttcacagcctttttggtaacttcaatacgttttggtggtggattcttatcttcggtgtgttggtagcaaaaggtgtataggaggagc

SEQ ID NO: 640096 - DNA, 667 bp, Homo sapiens
tccacgtccacgtcgactggctgtattctctctgggtgtggctgggcgtgtagttcctctttggaatccatggcagctctccctgtataacatgttcacaagtgtatgaggaaggtggggctctgtgggcttaccagtcagattgaatcgtccatgacgtgacctggatgcatcctttggcctgaacagcatccccaatggcaccaggccttgaggggcgaccagagtcgtcttacctctggtgtcctgaattctcgctcgagaggatgatgacccggagtcctaggatgcgcacgtgttctcccgcaggcatcagagcaaggctgaaaagagccctggtcccattgtcgtctcgaacgtcgggagctgggactctgccagtcctgtagaccgtcctgagccagaggcgtgcgtagccccatcaacagaactcgtgcagtgagccgaagcatgggaacatggatggacgtccctggctctggatggtaccatactagccctctgtcggaaagccagagcgagctcgacctctgagtgcctaccagcagttgcggagagcagtcttcccgaagcttcttttgatcgccagctactcgaggatagagactggtgcccttgggtgaagtatcagcagctttggtcggaagaacacgcgaggggagaatgc

SEQ ID NO: 640097 - DNA, 410 bp, Homo sapiens
  misc_feature (1)..(1): n is a, c, g, or t
  misc_feature (100)..(100): n is a, c, g, or t
ntcacgtgagacctgaaaccccattctactctctgctttatgagtctatacaatatggatataaaaatacggggagcgggggcgatggaatattattcangcataaaaaaagaaggagaccctgccatttgcagcaagatggatgaacctgcaggacattgtgctaagtgaaataagccgaacactgaagcttctctagattgatgttcctcccactgtgtttccctggcgggggggctcaccttccatcctcagatgaagcaccacttcacataagctttgcctgattcgtcggttctggctacaccacatatttccctcaggctttactgaacactacgcacatatgcatttattaaatcacttttaacacttttctcacaaaaaaaaaaatgggctcgttggcctca

SEQ ID NO: 640098 - DNA, 341 bp, Homo sapiens
cttgcagccagccaaacccagagagggagactggaggtggcgctggccaccagagaccgggtggctggcgactgaaggctcacggtcaccccacggagctgaaaaggagctgagtggtggcgaaagaagaggccacgaaactgaggcccctgctgaggctttgtggcgtctgtctccccggctgagccgaaatgctcacactgtgagaccccgctccacgtatcccccaggcctgttccctgatctccatcattttcttaccggttttcctccctcaagccattcgacatctcaagtgaagacctggcccctgaagggccaataaagctgctagtttattt

SEQ ID NO: 640099 - DNA, 287 bp, Homo sapiens
gagtctatgaggatcccctgtgtgcggcgctgctgagaagctaggactgcaggcacaagctgctgcgcccaatcaaatttcctcttcttgtaatgagaccaattatattggatcaggggccaacctaatggcctcattttaatttaatcacctttttaacgaccctatctccaaatacagtcacattctgccgtatggggtgttagggcttcaacgtatgaattttacagaacacaattcagcccgtaacaatatcattaagtcacaatgtgtaagggaagaaactt

SEQ ID NO: 640100 - DNA, 478 bp, Homo sapiens
  misc_feature (251)..(251): n is a, c, g, or t
  misc_feature (272)..(272): n is a, c, g, or t
  misc_feature (300)..(300): n is a, c, g, or t
aatttcacttactagctgtgtgacgttgggcaagttacttaacttctctgtgcctcattctccatctgtggaatggagacagaatggtgagctacccccagaggtttacaaggactaaatgaattcattcacaaaaagcctcagagtgttacactgtagcattcagcaatgcttgctattgtatcttcccttgctattgtatcttctagttctggataaacaccgactatacccacagggaggcacagacncagggtgcttctccgcatggntggctttagtgaaaatttggcagccacncagcatcccaccagaggatactgtggaagactacatggtagatgcaggtgcgtctgtgctgattctgatggggaagcctgggtgcagtatttggccccatccatctctgagaggctccagaagccgtcaaaccaaaatcaaaatagtggccggctaaggctgaccattcttaatgaaa

SEQ ID NO: 640101 - DNA, 258 bp, Homo sapiens
  misc_feature (21)..(21): n is a, c, g, or t
  misc_feature (34)..(34): n is a, c, g, or t
  misc_feature (203)..(203): n is a, c, g, or t
  misc_feature (230)..(230): n is a, c, g, or t
  misc_feature (245)..(245): n is a, c, g, or t
tttcctccaagatgattattncatgaaacaccanttatacaaattgagcacatcttaaaagaagggttgccagcatgcctcctcatccccttatattgccacttccatttcatctcttttgtatcataaatgaacttcagctggtaaagaaaattgaactgctctctcccacccaaaattctcgatatttaatgctgtagcancttcaaagaaagcttgcccgggtattnttattttttttatanatgtgaagcgatc

SEQ ID NO: 640102 - DNA, 854 bp, Homo sapiens
cgcggcacagggccagccgcacagtcggaggaagggccggagcgaggcggggcccggggctgtcaagggaataaaacatcccaaggcctgcaaattgctgctctcagcttttttcccccctcctcctgcttcgcggggtgggggggttgggggggggggtggtggggggagaaagcagcgcttcctctggaggcggatgcaaacaaggatgcagaattttaaccatctcctgctaccggcccgtccttcctgagcagggtttgggcccaggcctggcgccgtggctccctgggaagggaaaggccagagcagccgatgccggttctgggggacgccggaaagcccagcctcctctgcacctccatccagaaccgggggccccgcagcacctgcagcaggggtggacgggtgggaggcagaaggggcctggtgctctcggaggctgcacctcacggtaccagtcgctacccagagcagcacgcctgtttgctggcctgctcttgggtgttaaacatggtgtccaggtccccggttggagaccccagccctgtaccgggtgagggtcttagctcccactgacttggggccttcaaacacactggcatcccaggccttcctcctgactgacttctgttttaaaaataattgtggaccgttttctggcatctggtgagggattcacacactgtttactgaggggcaggacttaaggaatgagttcagaaggtatctatcgtggtcacgtggaacaacggcagggcaagccccctgtgctcctcgctggattgagcttccaagagcctcagagatggaattcgcgatttgccgcgatttggggtaacttattgaccccg

SEQ ID NO: 640103 - DNA, 847 bp, Homo sapiens
ggaagagcctcgtcctgtgtgcggcgtgtggtgctggctggtcgccgttatggccactgggctggtgctggctgacctgccctgggctaggaaagtggcccagtgccccgaatctcgtgtgtgcctgctgctccagctgcggcctgcgccatggcctcctccgccgcctcctcgtgagcatttctgatgaagctgcacgagatcttcctgctgtgcctccatgaagacctacaagtggtgtgccctgagctgtgctgctgggtgacggctgtggtgacctgaagaaaatgaagaaatttgatcacgtggcatttctgatcgaacaatgcaacatgtgaacgcaagatgaaactgctggcaagagatggacggatgtgatgctacgttattgcacccctgtctttcctgaaaccccatgatgtctaatgcttctgaaaactaccgtgaagggaccttgctaaactccatcagtggaggtgagaagcacacctttgacagccacaccgtggaggccggacgacgcacatgaacatattggcatatatgcctgtacagaactgacgcctattgaatctggcctacagtctcaaatgggcaatgcttcttgcaggcgcacactgaaacgcgcctgaaaccgtggcccacccaacagctattgaacagtttcctccatcgcgaactaggcccaccaggagtacttgaacccacgacttgggcctccagacgcatccataccatagacgctgtgtgcggcaaccaacgtagaacccactgattgacccgtacccaaggacgtcaacgtggctaaatccacacagtgacaaagttgacgcacccgccaggcacc

SEQ ID NO: 640104 - DNA, 136 bp, Homo sapiens
actagtcacggttggcgtgaaattatcatttcagccacctttcttattctcgtgtgaggagggcacgttatatggactttttaaggttccatgtgccatattgtccactaccggcagtagccaaccgtggactagt

SEQ ID NO: 640105 - DNA, 112 bp, Homo sapiens
ggatcccaattcgacacaaacttttcccaaacacttagaaaggcatacttcacaactcgttttacaacggccagtattacctcaatatctaaaataaagcgaagacattgcc

SEQ ID NO: 640106 - DNA, 359 bp, Homo sapiens
caagcggctcagcaagacatggtgatcttggtctactatattagtgcgttcaagcaaagcacttgagggaggactgtttccaccaccgtctcacaacagcgtgataactgggtctggcatcttgatgtctatctctgagtacatcttccgctcatcatgcgtcacacagtccaggtagagctccccgagtggctcaggatcaacatgctcgccaggactcctccagctcggtggtgagggataaatcagctctgtgttgactcgttgcgcaggccatgaagcatcttgggcagctctgaggggttgactggctccacagcaatcttgataacagatgtggtattgaacttcaagggtcg

SEQ ID NO: 640107 - DNA, 720 bp, Homo sapiens
ctaacaagggaaaagtcatacaccttcttattctgggccaaaaaaacaaaaaaaggggttgcagacaccaataattgaaggccagtgctctaataaactcacaaatagtctttgtgtacggaaatatatagacagcgagcgagacgtcttttcgtgtggcgactccaccctggtgttgccccctctcgctcccccattgtgggagcgccacacacatagtattagttggtctctcccgccctaccacacgcacgcccacctcttttacatgttttcccccccccttcaccctctgcgaccacttcaggatatatctcacgctctccctcttcgtatacgggaaaccataaggaccacacgccgctctctcagcaccactcgtcgctcttttcatctctcgagtaaacaatgcgtagacttgatataccaccaatgcaataaaaataagcggttacaacacctcttcttataatttcgtaccatacataacgttgatgatccatatcttatccacgagtcggcacacatggtggggccatcaataggcaacactctgtctgccggtagaacttataggcccccttttgggaccacctgcggacctctcattggtgccgtggaaaaaacaggcggtttgaatagtccttaatacccctcgttagcccctctgcgggcgcctccttttgagttataaataaaagcaacaacccccaacataac

SEQ ID NO: 640108 - DNA, 993 bp, Homo sapiens
gctctttccttgcctaacgcagccatggctcgtggtcccaagaagcatctgaagcgggtggcagctccaaagcattggatgctggataaattgaccggtgtgtttgctcctcgtccatccaccggtcccccacaagttgagagagtgtctccccctcatcattttcctgaggaacagactttaaagttatgccctgacaggagatgaagtaaagaaagaatttgcattgcagcggttcatttaaatcgatgggcaggtccgaactggattattaacttaccctggtggcatttcatgggattgtccatcaagcatttggccaaggacggggagaagaatttcccggtcttggatcttattgaacacccaaaggggttcggcttttgctggtaccattcggttatttaacaaccttgaagggaggggcccaaggttacacaggtttggtggccaaagtggaagacaaagaatcctttggtgcgggccaccagaagggaaattccccgtcattctgggtggaacttccattgaatggccccggcaccaattcctggcttacccccagaatcgcccttccattcaacaggttgacattgtatacccaattccaggatttggactttaagaacgacttgggcaaaggatttacttggatttccatcaacagttcgacaactggtgtaaacctggtgtacattggtgacctggtgcaggtgcttaaacctcaggaagaatttgcgtgtgaattcaccatacagcagagcaggcacctcgtggatcctttgaccgtggttcacggtgaaaagatgccaaatggcaaacaagctttggcaactcgaacttttccaacatgtggtgatttggcaaagggcaaccaaaccatggatttctcttccccgaaggacagggttatccggctccaccattgctgacagagagacgacccacagaactggccggccaacacagagcaatgggtgaaatgggtcccta

SEQ ID NO: 640109 - DNA, 653 bp, Homo sapiens
  misc_feature (19)..(19): n is a, c, g, or t
  misc_feature (62)..(62): n is a, c, g, or t
  misc_feature (139)..(139): n is a, c, g, or t
  misc_feature (183)..(183): n is a, c, g, or t
  misc_feature (186)..(186): n is a, c, g, or t
  misc_feature (238)..(238): n is a, c, g, or t
  misc_feature (289)..(289): n is a, c, g, or t
  misc_feature (314)..(314): n is a, c, g, or t
  misc_feature (319)..(319): n is a, c, g, or t
  misc_feature (321)..(322): n is a, c, g, or t
  misc_feature (334)..(334): n is a, c, g, or t
  misc_feature (368)..(368): n is a, c, g, or t
  misc_feature (372)..(372): n is a, c, g, or t
  misc_feature (376)..(376): n is a, c, g, or t
  misc_feature (390)..(390): n is a, c, g, or t
  misc_feature (474)..(474): n is a, c, g, or t
  misc_feature (482)..(482): n is a, c, g, or t
  misc_feature (504)..(504): n is a, c, g, or t
  misc_feature (513)..(513): n is a, c, g, or t
  misc_feature (515)..(515): n is a, c, g, or t
  misc_feature (531)..(531): n is a, c, g, or t
  misc_feature (540)..(541): n is a, c, g, or t
  misc_feature (586)..(586): n is a, c, g, or t
  misc_feature (649)..(649): n is a, c, g, or t
agaaaaagaaaaaaccctnattccccggtaaggaaataatgtttacactatttttctgtaangccagctaagatatgcacaagcgagagaaatagaaagcatttgctaaaatatttgtaacaaatacttatgtacaaanaattcacaaaaggctagttcccccttgaagcagagcacatggcngtngaaactggaacagttcaaaccactggctgggattataagccatgccactgantccagaggaagaaagttacatgttgtggggattttcagtttgaacattaanatttccaaagtttggcaacattatnttttntnnttttgcaaattntgttaacaagaggtacattttaaattgttcttcntgcnaaantccttgtcatgcangggcaccaagcaccggggtttttctctcacagacagagcccatgtatgtgcagccactcagttgaaggaacagcgatggcaggnaggttgtnctccattttcagattgatttanccttgattnanccttgcccttttccanctgattttnnaaaccagtttttatagagaaactattaaagggaaagactactgtnatacaaagctaaccaaaatgtttttcttccagctaacagtacctttgcagaaatgggaagggntaag

SEQ ID NO: 640110 - DNA, 181 bp, Homo sapiens
gtagagaatatgtttgattcatttattcagcatgtaaataaaattgatcctgttgagttatcataatgcagttcaactatctgccatgattatctttcacgtatcattcattctgtcatatgtgtcaattgagagtatagcatctatgtaactatgtaatgtatctcgatgagttctcagg

SEQ ID NO: 640111 - DNA, 286 bp, Homo sapiens
ccgctctagaggagcgtcacactgggttcgagttccagcacaggtatacacagtcatgatgggagcatccaaaatggaatctaaatttgccaggcgtggtggtgccacctgtaatcccagctactcaggaggctgaggcaggagaattgcttgaacccgggaggcagaggttgtagtgagcagagatcctgacactgcactccagccagggccacagagcaagactctgacccaaaaaagagggccacttgaacccaagagatctaggttggagagggaccaccac

SEQ ID NO: 640112 - DNA, 142 bp, Homo sapiens
gtctacatgatcctgtctgagatgaaaaatagcttgaaaattattgcaaccaaatctttgatgcaggcacatggtttttttgtagtttttgttttgttgagatggagtctcactctgtcgcccatgctggagtgcagtggtg

SEQ ID NO: 640113 - DNA, 364 bp, Homo sapiens
cagagacgccgtactggccatactctagccgtggatccaagagacgagaggcgaagcagagagccagtgaaagagagtcacatagaaaatatgggcctatgaggatcaagcactccatcatctgccatgcatgcataccataagtaaagctgcagcgcactccatcttcatcctccagagctgacctccagtcttctgatctcgctgttgatcgtcaagatgcaaactgcagggacaggattatgccgaatggacctctacatcctgtgcttttctcctagtttctctccaccctggaacattcgagagcaaatcaaaacctctatccagacaagacaaaataaaactcaacatctccctaaga

SEQ ID NO: 640114 - DNA, 1508 bp, Homo sapiens
ggcgcagccgcgctggccccgggacccgcgcccgcgccgccgccgcgcttcagcctcagcttcggcctcagcccgccgcagagggacgcggagcccggcgctgagccctgcgcgcgcgcctgccggtccgatctggacgaacgcgaggcgttctgcgagagcgaattcgcggtgaacgggatcgtgcacgatgtggacgtgctgggcgcgggcatccggctggtgaccctgctggtggatcgggacgggctgtacaagatgaaccgcctgtacctcacccccgacggcttcttcttccgagtccacatgttagccctggactcctccagctgcaataagccgtgtccagagtttaaacctggtattgaaactgacctgaatgacgctgcatatgtactttataccaccgtttgtaacgtgggtgccacagcccgggctgtaggtcgcccagcctttttttgggagcgatggggaacaatgacatgaatgggatttagacgacaggcagcaggtatattgtgatgggccacatctaccataagagacggcagctccctacagctctgctccaggtcctgagaggccgcctccgtccaggggatggactgctaaggagcagcagcagctatgtgaaaaggtttaatcgaaaaagggaagggcagattcaaggtgcagttcatacccaatgcatttgaaacaaccatcctggcatttctggaccgcaagagacttggacgtcggcaacaagacatgaaaggtctaccttcatgtaatgggtcctccttcagaagagagccctcagctactctgtgaatgacttgcatagctgcaactgtaatctcgaaggtgtcactttgttatttacaagatgcttcttaaatgggctgctcctgagctcagtgtcaaggtgattcaactgtagtgccagacaatgatttacacagctcagataattgacctgtccagttaacagatcattgcttcataagtttttaaattattttaatttaatattctttagtagaaatagtccacaaaaacattttcttgaatttaaatatacaacttttatatcatgtatcaaaccagattttatattcaaacgatcacattttaaattctgtacataacagtaagcgcactagtcaaaagacatttatgtttgaaatgtcatttagatcaaacacaagggtcaaagcccaggacaagtataaagttttatacttaaagagtactaaagggccagtgtgcagatgggtggattaaaaaaataaataaaataaaaaatagtactaaagggcttacttcaggcaaaagtgttcctgacgtaccaaaaagtaagatatagtttattttcatgcctccctgctcctagtaatgtatgttttgtgctgaactggcagctatcccaatgtgaaatgtattttggatgtatctggtgtcatttttctattaagaccaagtataatgtttgtttgtaaagcaataaatcttgacttgaaatcaga

SEQ ID NO: 640115 - DNA, 756 bp, Homo sapiens
  misc_feature (58)..(58): n is a, c, g, or t
gaagtgcttgcatattactggatggactcgggacgatcgccgggttagcgtacaaganctagatcaagttgaggtatgcgctctcttatgtctattcacccctcctgcgtaataattttcataccttttctttacgttaatcctgtgccttattagttcttccaatgtgtgagtttggttcgtgcatttccttgttttcgagggaacgagaaatgtgggtttcgggattttaaaaggggccaaaaattttaaaaatttggggtttgtgaaaggggcgggttttaatttgggggcaagatgtgcgcaaaagaggttaaacgcgcgaaggagaattcttgtgtgagaaccagtgagggggcaaaattttttccttttggttgagagcgaaaaaaggtttatgagaaggacaaaaaacagggaagaaacttttttttcccgttgggcgcaggagagaaatttaaaaaggggggagctttttcgcccacagaaaattttttttttggggggggggggattttatgcggggcccccttatatatagaggggcgcaagtttaaattgcccctggtttttgtggccatcttaagtgctaaggtacgttttctaacggtgagtcttgtatctcttatattctagaaacgcacatccaacgtgtatagaaccaaactgtgaagttcggtaaacctatggacatccgggttaaaaatggaggtataggaaaaggagaaattctataatggtgccggttttatattg

SEQ ID NO: 640116 - DNA, 228 bp, Homo sapiens
ggggaaaaaagattgagggggggggaaattgggggggcccttcccccaaagggggaaaaaatttttccaaacctcccccggggggggtctttctaagggggggaccccccacccgccttcccccgtttttagcggggtcggggggggggggtcccaaaaccccccaaaaagggggggggggggggatgaacgttttttttttgtttaaaaggggcttttcccttttta

SEQ ID NO: 640117 - DNA, 124 bp, Homo sapiens
caggctcatatctgggctggcatgaggtcgtcgataggctattcctgctaccaagccgctgtccatctacgatgagcagcttcactaccgtccaccaccatactgcaccagctccacctctgag

SEQ ID NO: 640118 - DNA, 758 bp, Homo sapiens
  misc_feature (755)..(755): n is a, c, g, or t
ggcgcagccgcgctggccccgggacccgcgcccgcgccgccgccgcgcttcagcctcagcttcggcctcagcccgccgcagagggacgcggagcccggcgctgagccctgcgcgcgcgcctgccggtccgatctggacgaacgcgaggcgttctgcgagagcgaattcggtgagcccggccgccgcgccgccgccccgccgccccgcgagcctttccgagccccggagaatccgcccgcgagatcccagggcgcctgacccgtgcgggccgtttcgcggttgctaaaaaccacctcctgggggactgggagaggaactcggggtaatgctcttctccaaactgtttttcggaagcagcggtgaacgggatcgtgcacgatgtggacgtgctgggcgcgggcatccggctggtgaccctgctggtggatcgggacgggctgtacaagatgaaccgcctgtacctcacccccgacggcttcttcttccgagtccacatgttagccctggactcctccagctgcaataagccgtgtccagagtttaaacctggtattgaaactgacctgaatgacgctgcatatgtactttataccaccgtttgtaacgtgggtgccacagcccgggctgtaggtcgcccagcctttttttgggagcgatggggaacaatgacatgaatgggatttagacgacaggtattattccggccactctgtgatttaagccctgtcagcccccaccctcaagggtgagaacancaa

SEQ ID NO: 640119 - DNA, 428 bp, Homo sapiens
  misc_feature (15)..(15): n is a, c, g, or t
tgtatatctaattcngtgagcaggcttgtaattcttatgcaaagatctttcacctcccttgttagctgtattcccaggtattttattgtatttgtggcaaccgtgaatgggtttgcattcctgatttggctcttggtttggctgtttttggtgtataggaatgcttgtgacttttgtacattgattttgtatcctgaaactttgctgaagttgtataacatatcaaggaacttttggagagagactatggggttttctagatatagaatcatgtcatctacaaacagggatagtttgacttcctctcttcctatttggattccttttatttcattctcttgcccgactgctttggccaggacttccaatactccgttgaataggaatagtgagaaagggcatccttgccttgtgctagttttcaagcg

SEQ ID NO: 640120 - DNA, 141 bp, Homo sapiens
ctgcccgcactgttctccctgcctggattctgagcagagcccaggctccagcatcgggtggaaggcaggatgggcctgtggctccaggtggagactccgtctgctttggagaattctggcatacctgccacatgtgtattt

SEQ ID NO: 640121 - DNA, 1365 bp, Homo sapiens
ggcgcagccgcgctggccccgggacccgcgcccgcgccgccgccgcgcttcagcctcagcttcggcctcagcccgccgcagagggacgcggagcccggcgctgagccctgcgcgcgcgcctgccggtccgatctggacgaacgcgaggcgttctgcgagagcgaattcgcggtgaacgggatcgtgcacgatgtggacgtgctgggcgcgggcatccggctggtgaccctgctggtggatcgggacgggctgtacaagatgaaccgcctgtacctcacccccgacggcttcttcttccgagtccacatgttagccctggactcctccagctgcaataagccgtgtccagagtttaaacctggcagcaggtatattgtgatgggccacatctaccataagagacggcagctccctacagctctgctccaggtcctgagaggccgcctccgtccaggggatggactgctaaggagcagcagcagctatgtgaaaaggtttaatcgaaaaagggaagggcagattcaaggtgcagttcatacccaatgcatttgaaacaaccatcctggcatttctggaccgcaagagacttggacgtcggcaacaagacatgaaaggtctaccttcatgtaatgggtcctccttcagaagagagccctcagctactctgtgaatgacttgcatagctgcaactgtaatctcgaaggtgtcactttgttatttacaagatgcttcttaaatgggctgctcctgagctcagtgtcaaggtgattcaactgtagtgccagacaatgatttacacagctcagataattgacctgtccagttaacagatcattgcttcataagtttttaaattattttaatttaatattctttagtagaaatagtccacaaaaacattttcttgaatttaaatatacaacttttatatcatgtatcaaaccagattttatattcaaacgatcacattttaaattctgtacataacagtaagcgcactagtcaaaagacatttatgtttgaaatgtcatttagatcaaacacaagggtcaaagcccaggacaagtataaagttttatacttaaagagtactaaagggccagtgtgcagatgggtggattaaaaaaataaataaaataaaaaatagtactaaagggcttacttcaggcaaaagtgttcctgacgtaccaaaaagtaagatatagtttattttcatgcctccctgctcctagtaatgtatgttttgtgctgaactggcagctatcccaatgtgaaatgtattttggatgtatctggtgtcatttttctattaagaccaagtataatgtttgtttgtaaagcaataaatcttgacttgaaatcaga

SEQ ID NO: 640122 - DNA, 1696 bp, Homo sapiens
ggcgcagccgcgctggccccgggacccgcgcccgcgccgccgccgcgcttcagcctcagcttcggcctcagcccgccgcagagggacgcggagcccggcgctgagccctgcgcgcgcgcctgccggtccgatctggacgaacgcgaggcgttctgcgagagcgaattcggtgagcccggccgccgcgccgccgccccgccgccccgcgagcctttccgagccccggagaatccgcccgcgagatcccagggcgcctgacccgtgcgggccgtttcgcggttgctaaaaaccacctcctgggggactgggagaggaactcggggtaatgctcttctccaaactgtttttcggaagcagcggtgaacgggatcgtgcacgatgtggacgtgctgggcgcgggcatccggctggtgaccctgctggtggatcgggacgggctgtacaagatgaaccgcctgtacctcacccccgacggcttcttcttccgagtccacatgttagccctggactcctccagctgcaataagccgtgtccagagtttaaacctggtattgaaactgacctgaatgacgctgcatatgtactttataccaccgtttgtaacgtgggtgccacagcccgggctgtaggtcgcccagcctttttttgggagcgatggggaacaatgacatgaatgggatttagacgacaggcagcaggtatattgtgatgggccacatctaccataagagacggcagctccctacagctctgctccaggtcctgagaggccgcctccgtccaggggatggactgctaaggagcagcagcagctatgtgaaaaggtttaatcgaaaaagggaagggcagattcaaggtgcagttcatacccaatgcatttgaaacaaccatcctggcatttctggaccgcaagagacttggacgtcggcaacaagacatgaaaggtctaccttcatgtaatgggtcctccttcagaagagagccctcagctactctgtgaatgacttgcatagctgcaactgtaatctcgaaggtgtcactttgttatttacaagatgcttcttaaatgggctgctcctgagctcagtgtcaaggtgattcaactgtagtgccagacaatgatttacacagctcagataattgacctgtccagttaacagatcattgcttcataagtttttaaattattttaatttaatattctttagtagaaatagtccacaaaaacattttcttgaatttaaatatacaacttttatatcatgtatcaaaccagattttatattcaaacgatcacattttaaattctgtacataacagtaagcgcactagtcaaaagacatttatgtttgaaatgtcatttagatcaaacacaagggtcaaagcccaggacaagtataaagttttatacttaaagagtactaaagggccagtgtgcagatgggtggattaaaaaaataaataaaataaaaaatagtactaaagggcttacttcaggcaaaagtgttcctgacgtaccaaaaagtaagatatagtttattttcatgcctccctgctcctagtaatgtatgttttgtgctgaactggcagctatcccaatgtgaaatgtattttggatgtatctggtgtcatttttctattaagaccaagtataatgtttgtttgtaaagcaataaatcttgacttgaaatcaga

SEQ ID NO: 640123 - DNA, 1553 bp, Homo sapiens
ggcgcagccgcgctggccccgggacccgcgcccgcgccgccgccgcgcttcagcctcagcttcggcctcagcccgccgcagagggacgcggagcccggcgctgagccctgcgcgcgcgcctgccggtccgatctggacgaacgcgaggcgttctgcgagagcgaattcggtgagcccggccgccgcgccgccgccccgccgccccgcgagcctttccgagccccggagaatccgcccgcgagatcccagggcgcctgacccgtgcgggccgtttcgcggttgctaaaaaccacctcctgggggactgggagaggaactcggggtaatgctcttctccaaactgtttttcggaagcagcggtgaacgggatcgtgcacgatgtggacgtgctgggcgcgggcatccggctggtgaccctgctggtggatcgggacgggctgtacaagatgaaccgcctgtacctcacccccgacggcttcttcttccgagtccacatgttagccctggactcctccagctgcaataagccgtgtccagagtttaaacctggcagcaggtatattgtgatgggccacatctaccataagagacggcagctccctacagctctgctccaggtcctgagaggccgcctccgtccaggggatggactgctaaggagcagcagcagctatgtgaaaaggtttaatcgaaaaagggaagggcagattcaaggtgcagttcatacccaatgcatttgaaacaaccatcctggcatttctggaccgcaagagacttggacgtcggcaacaagacatgaaaggtctaccttcatgtaatgggtcctccttcagaagagagccctcagctactctgtgaatgacttgcatagctgcaactgtaatctcgaaggtgtcactttgttatttacaagatgcttcttaaatgggctgctcctgagctcagtgtcaaggtgattcaactgtagtgccagacaatgatttacacagctcagataattgacctgtccagttaacagatcattgcttcataagtttttaaattattttaatttaatattctttagtagaaatagtccacaaaaacattttcttgaatttaaatatacaacttttatatcatgtatcaaaccagattttatattcaaacgatcacattttaaattctgtacataacagtaagcgcactagtcaaaagacatttatgtttgaaatgtcatttagatcaaacacaagggtcaaagcccaggacaagtataaagttttatacttaaagagtactaaagggccagtgtgcagatgggtggattaaaaaaataaataaaataaaaaatagtactaaagggcttacttcaggcaaaagtgttcctgacgtaccaaaaagtaagatatagtttattttcatgcctccctgctcctagtaatgtatgttttgtgctgaactggcagctatcccaatgtgaaatgtattttggatgtatctggtgtcatttttctattaagaccaagtataatgtttgtttgtaaagcaataaatcttgacttgaaatcaga

SEQ ID NO: 640124 - DNA, 406 bp, Homo sapiens
caaaaaaagaagagtcgtgggcctcctagccagttacattccagaggatgaggcgctgatgcttcgggatggacgctgggctggggccatttgcagccatcgaccggtactggacaccctggccatgctgactgcccaccgtgcagttcttgcagcgtttctatggcaagaagcagccggtaaaggaaagaaagcagagtgcaaaacatcagaacgaattgagaagggatgaaaccaaagctgaggctcctctgcttgctcagacactacttatcacgcagagtgctacgcacagagctccgcactataacagttgctgccgccggaagtacagaccagaagccctgggaccctctgtctccctttcccctatgccaccctcagaggtcaaactccaaagtgggat

SEQ ID NO: 640125 - DNA, 1883 bp, Homo sapiens
  misc_feature (1462)..(1462): n is a, c, g, or t
ggcgcagccgcgctggccccgggacccgcgcccgcgccgccgccgcgcttcagcctcagcttcggcctcagcccgccgcagagggacgcggagcccggcgctgagccctgcgcgcgcgcctgccggtccgatctggacgaacgcgaggcgttctgcgagagcgaattcgcggtgaacgggatcgtgcacgatgtggacgtgctgggcgcgggcatccggctggtgaccctgctggtggatcgggacgggctgtacaagatgaaccgcctgtacctcacccccgacggcttcttcttccgagtccacatgttagccctggactcctccagctgcaataagccgtgtccagagtttaaacctggcagcaggtatattgtgatgggccacatctaccataagagacggcagctccctacagctctgctccaggtcctgagaggccgcctccgtccaggggatggactgctaaggagcagcagcagctatgtgaaaaggtttaatcgaaaaagggaagggcagattcaaggtgcagttcatacccaatgcatttgaaacaaccatcctggcatttctggaccgcaagagacttggacgtcggcaacaagacatgaaaggtctaccttcatgtaatgggtcctccttcagaagagagccctcagctactctgtgaatgacttgcatagctgcaactgtaatctcgaaggtgtcactttgttatttacaagatgcttcttaaatgggctgctcctgagctcagtgtcaaggtgattcaactgtagtgccagacaatgatttacacagctcagataattgacctgtccagttaacagatcattgcttcataagtttttaaattattttaatttaatattctttagtagaaatagtccacaaaaacattttcttgaatttaaatatacaacttttatatcatgtatcaaaccagattttatattcaaacgatcacattttaaattctgtacataacagtaagcgcactagtcaaaagacatttatgtttgaaatgtcatttagatcaaacacaagggtcaaagcccaggacaagtataaagttttatacttaaagagtactaaagggccagtgtgcagatgggtggattaaaaaaataaataaaataaaaaatagtactaaagggcttacttcaggcaaaagtgttcctgacgtaccaaaaagtaagatatagtttattttcatgcctccctgctcctagtaatgtatgttttgtgctgaactggcagctatcccaatgtgaaatgtattttggatgtatctggtgtcatttttctattaagaccaagtataatgtttgtttgtaaagcaataaatcttgacttgaaatcagatcttggatgcacctgtttgtttttgttttagccttactgagccctaaaggtttgagaaaaaggctttctcaaattcattccccaaaccttggaaccnatattcaccaatgacggctcacaagcaagcgaattttaaacatttttcagttggttttaaaaaggtttaattggccgggtgtggtggctcatgctggtaatcccagcactttgggagccgaggccagcggatcacctgagggtgggagttcgagaccagcctgaccaacatggagaaacccccgtatccactaaaaatacaaaattagccgggcgtggtggtgggtgcctgtagtcccagctacttgggaggctgagacaggagaatcgcttgaacccgggaggtggaggttgcaaggattgtgaacttggcaggtaaagtataacaggtactgaaaatacttttagccaaggaaatctattgatgcaaattaaatgtatttataagcccaaggcctggggtagaaacatcctaagaatat

SEQ ID NO: 640126 - DNA, 262 bp, Homo sapiens
tgcgctcgaagttgcaatataagtcgtggatgtagaaaggatcatcgaaagcagtaggctggcgtcgtcccccacagacatgccagtaaaggtggccaggtcgccacagtaaccccccatggtctccacgatgaacacacggtgcttggtccccgaggcagaatgtattgatgcggtcacagctctccatagtaccggtcacagggggtcggcgcgccaccctgctgcacggtgagaccaggacattggtcctgccgtcgaa

SEQ ID NO: 640127 - DNA, 409 bp, Homo sapiens
gtacttgggtttagcacgcatagctaggcaacatgacggacccacacgggatgacacagaaaagaggcgagaatgtgagatagatagagcggtcgcaagtgaatacaaaagtcccaggcagcagtttcacatgaggagacgaaggaaacttgaaatagctgcatgcgctaagggccaataagtccctgaaaaataggatgaggaccaagctggctacgaccaaacagacacgaacatggcgctgtatttgatgtaggtacacctaagatctcatcgtatgatcagtaacatatgaaaccgtacacccaccagtgccaagacggctccaggaacacctgtatttgggtgtaaatagtggcaccacggtcttgagaaatctttaccttttcctggactcttcatgaatata

SEQ ID NO: 640128 - DNA, 1201 bp, Homo sapiens
  misc_feature (514)..(514): n is a, c, g, or t
  misc_feature (585)..(585): n is a, c, g, or t
  misc_feature (588)..(588): n is a, c, g, or t
  misc_feature (1085)..(1085): n is a, c, g, or t
  misc_feature (1111)..(1111): n is a, c, g, or t
ggagtgtcggatatgatgtttgcgtctacttcattccgtgacacgcgtgatcttcgcactgtccagtggaaggttacgagaaaggtcctggcggcatgagaagcgggacacacgcaactatcacagagtaattcgaccaaaactcgactaactctatgaagcggggttgcggcagggtatgacttgaaattcgctggaggtgccaatgtatggcgatcatggtagggtctgttggttgatgtatacgtggccacttgaggagtgcgcctaggcatgacaggacgtggtcctggctctctcggtgtcacgcaaagcatcgtatagatggtgtgagccgtgctggcatagacgaagccatggggacaagcgcatatggcccttcggtgtcgcccttagtgcaaagatcgacttgggagagagcatttgaggtgcgcatgaaaagcccggcgcggaccccaacgtccggctgcctcggacatgggcatgtagatctagcttgggcgccatcctagcnattgttcctttcgttgcacttggagccccggagactcggtgatcaacgtggcttgatccatcgaagacgcnacntatgtcgcacacttgggtgatcctatcttcccatcctctgtgaccgtgcggtggtagcagcttagtcgctatgcgatcggcttttgaggttagtcgcccggatcgattgggcaatggaggtgctttgcccatctcataaccaacgaccatatggcgagagtttgaactattcgaccgtgagagctttctccgggccgctcttggggatgcgccctagtgtacccgaagggaacagcccccaggcgaggaaagtcacaacgccgccgcggttgggagtttgaatccgctgtgaaggtgaggcatgcctttttcttacaagttaggcgtctggtctagggtttggtgtgcgcccatttaataatccgcgttcccgtgcaacccaccatggtgcgtttggggaagaggatctgtgttttcaactccgcaggggttggggtcataattaagcgcggcgcgcgaaccgttggccctctccacttcattggtgtcgttggttngactctctgagagaattcgccccatnggaacaaggttctgtatcaagtgggctcacctcaatggtataccgggtgagagattctttctcctcttgtgggctggtgtgcgaggggaa

SEQ ID NO: 640129 - DNA, 936 bp, Homo sapiens
agctgggcatgatggtgagatgtgtgtgtgatgtgggcgggggtggtctccgcggtgagtgagtgtgtgagtgatgtgctgtgctggctgtgctgtgctgtgaatgatgtggctgtgagtggtagttgggagtgtggtggtccctgctgtgcatgcgttgtgacaactcctgtgtgttggtgcgtccattggtagcttgcattgctgcattgacatgtggcttgtgatgcatgcctgtgcttcctgcttctcagccatgttctctgctgtctgtgaatcagactgtgtccattccaccgtgggatgtcacggttcctacccctggagcccctgacgccagtgcccatacgccatgcctgcccccgacacgtgagcacatggttgtaagaggttaacttcatattgagaaggccaacttgacatcaagatggaggcccagagctatcactctctgagatgtagctctttcattccccagccaggcatttagagacaaggtgggagcagacgggactgcatgagtgaattgacttgcacagtctcgccgggtgcacagtccgggccgcggctatcagcaggacacgttctatcgcgcccctttccttggggattgctaacgcgggataactgctcatgacattctccctactagcaacgccagaacttcatcactacggtcgcccactggccaaggcaagatgtcggtaaccccttctaaaagcgcaagtttatgtagttgcgccagacatatccattggaaactttcttcaagcactacaattgctacgccactagcgccctttagcccgcggtcctattagcgtctccccttttaccgccgctctgggttacacttgactcagagcggactattccacttggtcatgcagcaccatttcttggcttcccttgtttgaaacaggcgacaggtcttga

SEQ ID NO: 640130 - DNA, 306 bp, Homo sapiens
aaaaaaaaaaaaaaacccaaaaaaccctcctttttaaattggggctggggtaagtacccccttttctcttttggggggggtttttaaactttttttgttttttttaattaatccccaaaaaaaaatgcataatttgtaaacttaattatatgttttatatttttttagcttagtagttggaaccccttagtctttaggggcaaaactgttgtttaatagtacttaaaaaaaaaaagtttgtgttttgagcctggccatgttttttttaaaaaaccaatatcccataaaaaaatgaattccttggga

SEQ ID NO: 640131 - DNA, 957 bp, Homo sapiens
  misc_feature (7)..(7): n is a, c, g, or t
tcactantcacgatctcaactaagagtcaaaatactgccctgcctgtgaccatttcacaaagtatgccacacctggtctccaccggtttcacacgtgttaaaaaaaaggtctcctcacccctttaatcgcggttccaagcttatcacccgcttgaaagtgcccaaaagcttttaaccccagcgtcgttctcttttcccgcccctccctcaggaatttcgcaaggtccccacctaaattcattgccgatgctgcccaacaacccgcacatcttgtttgtcccgcgaacccacatgggggtgtgttaccacaacgaagcgggttcattggtgggagcccccaacggtggccacgctggtgcaacgtgttcccctgctgcaaaagtatcagggaagccccatgtgcgagagcacagcatcgtccgcgcgttcaccaccgtgaggttttcgatcccaaatattcgcacaggggtacccccacagcattgagccccagtacgtgagaaggatttcaccaacgcgcctgcggttcatgccgcaactcacaaaaacagtagagagactctgtttcccaaggaacacccttcagatgtgggaatcttcagggtacatacgagccttatatatctcacttcgaggagattgatctctcagatgagaatatcactttctgggacacccgtcctaaagagggcctgcatgattcttcctcctggccgccttcaacaagatttatgctccccccagaggcgtgagaacggaagcataaaagcggccccaccttgcgttgagaacacggcgaagatgaatctgtccaacacacacggaggggaacccccgagatccacccctggttctttataaggagaagaaaatgacatcaaagaggtgtccccccaaaatatttttttaaacaggggtgggtataaaccacccggccgtgtccaacacaaccaaaaa

SEQ ID NO: 640132 - DNA, 387 bp, Homo sapiens
  misc_feature (123)..(123): n is a, c, g, or t
  misc_feature (139)..(139): n is a, c, g, or t
  misc_feature (149)..(149): n is a, c, g, or t
  misc_feature (235)..(235): n is a, c, g, or t
  misc_feature (262)..(262): n is a, c, g, or t
  misc_feature (282)..(282): n is a, c, g, or t
  misc_feature (290)..(290): n is a, c, g, or t
  misc_feature (318)..(318): n is a, c, g, or t
  misc_feature (343)..(343): n is a, c, g, or t
gccctcttcccctgcccctgggatcctgggcctgagccctcctgacttgccgttgaccccaacagaatgcagtgaaaagtgatgcccgatacctacccctccctgcccctagacttgggatanccctggcagcctatantccttcccantccctcaggacttgcaaaaacgggtcctcaacatgcccttccccagagcccatgaggtgtttctttgccccattcattgatcctgngaagtgagtgtaaggagtttaaatcancctctgttctgtgctagttnaggtaatncagttgctgcagtaccagggggtaggtncctgtggacggctctgcgaatgggncagttgcatttcttgggaatcaagtgcatccctaggctggcagt

SEQ ID NO: 640133 - DNA, 252 bp, Homo sapiens
ctccacttggtagccaggctggtctaaactacggagctcaagcaatcagccggtctgggcctcccagagtgctaggactacaggcatgagccaccaggcccggccaggaactgttatctggcacggaaacatttcaatattggtatggaaaaaaaaaaagtgttaagctgaaacatttatttctcttaaaagtcctacgtcatgggtccattcctggcactgtaaaacgaaatacaaactggagtcttctct

SEQ ID NO: 640134 - DNA, 215 bp, Homo sapiens
aatacagcataatccttcagcctccaaagcatctttagggtgtgacgccagttgtgagatgtcactgtggcccagggttaccatgggaaaacacatacgctgtgtctgttcttgactggcttcgcatgccgtttctacacatgtttattgtaatgtcaaacgtgccatttctggaggacacttggcacgggacagctatttgtggaacagtgact

SEQ ID NO: 640135 - DNA, 927 bp, Homo sapiens
  misc_feature (649)..(649): n is a, c, g, or t
tggtcagacaaacacatggatttcgggaccacagtagaggagggaaacctttcacaaacttatttattggaaaatacaaatataaaattatacttcccacttctgtgatgtgagagacggccatccacatagtaatttttaacaacggggcttaaagaaaagccacacacaaagaccgtgaaagaggctggagatatatatatagatagatccatatatctgtatatatataaaaaaaatactcactaccaagagtcctcactcagttccatactaaagtataaaagtagggggtgaggctcagccacgagggctagggaaagtttaattagataccgtttattgtccacatgaaacgcttagactggcatcctatacatatggaatccggagtttacaatacaccatgaacggcagatgggctagcccacgctacttaagaggacactcacagatcccacaggggagggtacattatgtccagaatacgtagtagagaccctccgagggaggctcgggaactttggtctctcagccctcgggcgcctccccaatatgcccttgctcccggaaggaaatcgtgtctgagacaatacttccggatattggatacgcccggcgtctgcaatataggtggccccccgggggncccccgaccagcggggaggatacactcaacagggtcggcgtgaggatcactaacttcttggggcagaacaagacacacaaagcaagcacaaacaccaagacgaaaacaacacacaccaaaaaacaacaggggggcggcaaaaaatacatcggggggggcaatacagaccacctttgaaagggggcaaggagcgaaacaagacggcgcggacacacgcagcggaaaggacggctattgacgactcgggggcaaggaaccacaacatgcggccaaaggcg

SEQ ID NO: 640136 - DNA, 352 bp, Homo sapiens
gcaggctgttctcgaagtgcgtgaactcaagcaatttgcatcccggggctcgcaaagtacggggagtataggcataagccacccatgatgcccagcctgaatctgggtttcttccccattcattaaagctataacctgggcctgaactcaatggcacctggcaccaatgggcaactgactctgggtctttaataacctaccttccctagcaggcacggggttgctccctcttcctatcccagggagtcctgtcctctgtgggggctcctacttgatcctctgtgcaatatgaagttctcagctcaagggtgggtggcgcatgactgccaactcttgaggcacagattgcagt

SEQ ID NO: 640137 - DNA, 446 bp, Homo sapiens
aaaaaattaaaggcaagtaggttggcggctagccaggcgaggcgcgacgttgggtgggggaggacgaggcggccgtgctagaagagacgagggtaaagcgtaacggggaagccaggagggcaaggaaataatgcggagattaggggacaggcaaacagggaacgagggcaatgcgggggtaagattgataatagtatgatggcgagctgggcaggcaaaaatgtggggaaggcgtacgcgcaagtcaagaaaaaaaacggcaccaggataactatatgataggaaaaagggagtgcgggagggggcgatttaaacggaaggaaatggcagcaaaaggagttatataagggcaggttttaatgcaatacatgtgaaagagagtgtttggtaaacggcttagaaggcggagataaacgtgacacgcagtttaggtgcacctataccaa

SEQ ID NO: 640138 - DNA, 117 bp, Homo sapiens
ctttacacaatgaagttacacaatcataccccatatactctttcacccacagcacaatcctacctccatcgctaaccccactaaaacactcaccagagtgttcggcttgagcggaga

SEQ ID NO: 640139 - DNA, 895 bp, Homo sapiens
gctgggcttgggtcccccagacggccagctcactcctcccccagcccctgtggggactccgaggctctggcctcagagtgcctccagaaagacagtgggcctctgccgacgaccccctggggtctcactgctgggaggagaccccaccaaggactaccggattccccatgaatccctacctgaaccatacacagcctgcatcccgtgacagcaacctggacaggggtaaggaggcccggggctggggagagcgcacgggagaagccggcgacacagcatgagaggcacacacccaagcataggaagcaccagcaggcacagctgggcagcaaagaagaggaagagacgagagacgagaaagagaggcaaggaagaggaagcagagacccccacaagaagcaagaaaacaaggggcgggacggtcacgagaggaagagcaaagggaggagagtcacgaaggaacaggacagcagagaagaaaaacgcagggcgacacacagcgcgaacagagcgagaaaccaagaaagacacagatgaaagacaacaacaagacaagccggcggaccaagagcaagagcaacaaacagcagagaaaagacagacgagcagaagagacagagagaccatacacagcagaggagacaagcgaagaaggccaaacggagcagaaccccaggagaacggaacgagaaacacacgccagagaaggagagacagaggcagcgggagaggtcggcaggaggcgaaagcagcggaagccaaccgagagggaggagagaacggccagaagaagaggaggagccagacgaaacagagaaagaagagaagacaaccgcaagaaatcagcatagaccacggagaacaaacgcccgacgaaaagcgagagagataccca

SEQ ID NO: 640140 - DNA, 1825 bp, Homo sapiens
ttgagattggtattgtcgaccttcttataccctcttcccagtgccaccgcagaaatgggttacaataggggacagggttccttcagtaacccttgctgacttgtgctcgtgtgagacactttaaactgacagtattacagcttatatctcaggaaaattattcacactcggcggcgatgtccattagtctgcataaccgtaagacctctgagaacctccgacttggatgcccccttctcggctagttgataaagtccatgtgttgtcgacttgttgttccgcacatctatcctctgtagaaggcatctgtgatggcacgagttggtatctggatactgacgatgctaagtactctgcaaacagtgacatttctatcagcatgtgagagaactagatgtgtattacacgacgtaggagttttcctcattagcagtagatgatttctcttccttttgcatgttcttgtcttggatatagagactcatgtaaggtagacatcgtatttgtggcgaatacatacttgggatatgcccttcagtgaagtgccccctggtgttgcgaaaatacattacgattgaatcactctccgcaatccgcacacagttgtgtcccacaaatgactcagcggacactgggcgagcatccattgttgccgtcatgcacaagcgggtctccaatttagccccatgtcactcggcaaaacatatcccacttgccgagctattgggaccaacgcccaaccagggatgtggtcgcgtggcctaagattaccctggagactcgacaccgcgtcgcacgttgcgctccccgtttgcgccaccttctgtctcatccctgtgtgggtggactcaggccttctggcctctgttctctccacggctcccccttcgagtgcaccgctcgcgctcgcataccccaactctcctgggggaacggccctcagccaccttgggggcctgcttgcgatcgcacgcgcacgtcggccccccgtgttcgcactctttatcctggctgcggcgcaaagccatccctctgttggacaccgccacatccccgcttggcgtctaggcgcgtctacccccgcgtgccacgccggctcgggccactttgtaccgccccgcccccgttctcaccgccctggcggcgtgcccacgctgcgcgctctctcctgcggcgccaccctccgcgtccccgtggcgctcgccgacgccctccgctcccccactcgcgctactagtcgcgtcaccccagcgcgccgactcgtacctctaccgccctctctggtacgcggcgccctcgcgcctccgcccccggccgcgcacagacaccaccctcacagaagcgctaaactcaacatctcccacacaccaacacacttgccctctgagacacctttttccgctccacaccagtcgctctttgaccacacacccccgtcgacaccggcgcttatgctcactagcggccccgttataccgcacacagaccgtggtgctctatcatgcgctacccacgaagactccagcgtcgttgctctctttaccacgcctatataccgctacgcttgctctcccgaacaactctacccactcccgccctcggacaactggcgaccagcgacgccgtcctgcactatatctgccaccacaaccaatcgtccatcgcgccaccacccccactgccgcgcgcacacctacgttctcctcgcgcccaacgtactacaccctcacctcgtagtgcgcactctagcaaatattcagaccctcgggcctggctgctcgccatccctccagtcactcatcaacaccacacctcgcctagtgcc

SEQ ID NO: 640141 - DNA, 81 bp, Homo sapiens
cccgaggacacggctgtctattactgtgcaagagatcccaatagcagtggctggtggggctttgactactggggccaggga

SEQ ID NO: 640142 - DNA, 180 bp, Homo sapiens
ctacagtaaccaaaacagacacaaagaccaatgaaacagagaggacagcccagaaataaggccgcacacctacaaccatctgatatttaacaaagctgacaaaatacaagcaatggggaaaggactccctatttagtagatagtgttgcgggacgtgtctggccatatgcagattgaaac

SEQ ID NO: 640143 - DNA, 1547 bp, Homo sapiens
ctatcaagagtgttctgacaatgccatatgagcgtatcatacatcattcatgggagcccctcaaatggcacaagtttcggtgcgtgtatgaacaggcaccctgtatggcagatatgataacggcgatgctcattacactgttgtgtctggacccattgtcaggtacttgcatcaggatcgcatgtaacaattcagccagtacctcgacttagattgagacttcctctgaacagaatactgcgaatgtgagaattaaccatcactgagagacagtcctaatcgggtctgattcagagcttctatgatgattacttggagaggagaacatacgagatcaacgtggattgagacccataaggactgataaaaccattggagcgatggtcgtagtatcgtttgaacccaatgggcacagactggctcttctctcctttgcctataaaacagtgacacccaccatcgcgatgggacctacgagatatgattaggctcacaccccttgtactaggttgtcccaaagacatccccagtgatagccttccctagtagtcttgccctttgacgtacgcccgttgtaagccctttgcaagttccaacctccaaaggattatacaccccatacgtgaaacctttacactgggaaaactcatatccatttaattgcatccgttgttggcacctctggaaaatccgaatacgtggacgtggggtgcttacgccttcggaatggagctctgtctaaaagaggatatattggaggcagccacggaatgtcattaggcacggcattactccttagacattggactcagttctttattcagagaacatggttaccccgttgacttggacgtggggcacactacggctgcatggccgtccacactttcattggatgatcacgccggatacaatccatgaagaagtacccaatgtagattgttcgcagaagtagaagagagacttggtaccaccagactagcaaccctggcaacacgtcccaatcaatggagtgagactaggcaaatgcccggtatgtacccactcggccatccattgcatcctgcggtgtacagcacatgtcatttgccccttgtcagcaccccagggtaggcgcaccggtgaagaaagctgaagaagaaagctcaaaatccagccgtgtttgacacacagggctcgtgagcgcaccaggacatctcgcatagtgaaagaggagggaaactcaaatacaactgcaacccacaacgtgtacattcaccacaagaagaataacccagaaaccacgggtaaacaccagccacaccaggacgagcgacatagacagtgaaggcgagaagacaacagagaagaccaaaccaggggaatccagaacaggtagaacggggagaatgcacacccaaacaagcacgcgaaggagagaagcaccggagagagaaaactaaagcgagaggagcacactgcaagcagcacgacgcagaacgaacggatactatacgaacgagcaacgctcgaagcctttccatcccatctccatccaacaagaaagg

SEQ ID NO: 640144 - DNA, 487 bp, Homo sapiens
aagtaggagtgagctgtgatgcgggtatagagtgtaagatgcagaagagagccgtgactagagggtgggtggatcgagctggagtggacctggactgcatgcgggtccccatacatcgtggaggggatgcctactccatccatgcccccgtaatggggtggatcgtcgtacctttgcgccatcggcctctctggctcccttcctacttcaacttctaagtatatcctcgtttaaggccagtgtgaaaagaaacaaatattcaaactcccccggaaaaaaaaaaaaaaaaaaaaaaaaaaggccggaggaaaaatctccttaagggttcccacgaagcgcggggagccacggggcccccagaatctctggggactcagggggacccggaacgcaagggcgccggagttcagcggagcttaaaggggcccggtttccaagagaaaagcaggggggggcaaaaacaaagcaaaattttctcccccccaaa

SEQ ID NO: 640145 - DNA, 253 bp, Homo sapiens
gttccggccaaaaaccctgtggtgggtaaaaaagaaaaaaggcctctggtggggtttaaaaaccaaaaaaacccttgggggggaaaaaggcccccggttcccaaaaacccgccccttaaaaaaagccctccaaaaaaaaaccctcctccaagggaaaaaaacccggcggcataactttttaattttgtttttcccaaaagggccaaaccttttgggccggctttttttaaaaaaagcccggtttatccggcca

SEQ ID NO: 640146 - DNA, 570 bp, Homo sapiens
gaccagactgtacaagtcctcggtgttatgctacgctgatcaccactgaatacagaggactcatcatggagtgcgagctgagtctggttttccctcatcgttgctctttcccaaagtgtccatccgtcaggtgcagctggtggcggtctggggggatgcgcggtgtgtccagccttgggggggtccctgtggactctccgtgctggcagcggtcatggtaatgtcttccgcgtctctggtaccgctaatggatgtttgcgtgtggggatccgcctgggcctccctggggcatcggagggcgtgcgcatctgcggtgtcctcttctctatgcgcgtagtgatgggacagtaagtaaatttagctagtggagtacttcgcagttgaaggggtcggagtgttcagcagtgcgtgcgcatgatgaacatattcacgaagaggcatgcctgtgtgttctggcaaatgaggcagctgctgaagcagctgtggtggagcacggtgtgtggtattaactagatggtagagacaggtatacgtgggtgggagtccgttgaatagattgggttaaagaga

SEQ ID NO: 640147 - DNA, 1112 bp, Homo sapiens
  misc_feature (883)..(883): n is a, c, g, or t
  misc_feature (1007)..(1007): n is a, c, g, or t
caatttcatgcacaacaagttatcaattataaataccccctgccataacccaataccaaacgcccctcttacgtgctgatccgtcctaatcacagtcgagtcctactttctcctatctctcccagtcctagtcttgctggacatcacttatactactaatcagatccgcaaccgttaactaccagccttcttcgatcgcccgccggaggaggagaccccattctataccaacacctattctgattgtttcaggtcaccctgaagttcatattcttatcctaccaggcttcgcgaataatctcccatattgtaacttactactccggaacataaaagaaccatttggatacataggtatggtctgagctatgatatccattggcttcctaggggttgatcgtgtgagcacaccatatatttacagtaggcaatagacgtagagcacacgagcatatttcacctccgccaccagtaagtcagtcgctatccccaccggcgtcaaagtatttagctgactcgccatactccacggaagcaatatgaactgatctgctgcagtgctctgagccctaggattcatctttcttgttcaccgtagggtggcctggactggcattgtattagcaaactcatcgctagacatcgtactacacgaacacgtactacgttgtagctcacttccactatgtcctatcaatagggggttgtattttgccatcataggaggcttcattcactgatttcccctattctccaggtaaccctaaaacaaactaagccaaaatccatttcgaaatcctattcatcgggggtaaatctaactatgttcccacaaaaattttccgggcaatacacggaaagggcccccaggtgttaacccagngaaaccccgcagggagatacacacctggagaaatccgaccacacgtggaggggcccacaacatctctcctacacggggacatgatataaacccgcgcttggcagaagcccgcgcctcaagaganaagctatatagtaagagagcacacacacggaagggcagaaagagcgcccccacacagtagcagcacatagaaaaagaacggacaagcatcagcgtagcccacgtt

SEQ ID NO: 640148 - DNA, 205 bp, Homo sapiens
aaggttgttgaattttattggacccaggttaatcggttttccttaaatttagaggagtttttaagggacctttaaggaaaggaatgtatatctaactgtgtacccaactcacatctctaagagagtattctctctttgaggagattctactatacacttcgtcccccgcgtcatcttacacggtctcaggagtaggctcacggca

SEQ ID NO: 640149 - DNA, 201 bp, Homo sapiens
gagcggtctggtcagaactacccacacagtgtaattaacaatgaatctaatctactaatggcaacttgcctggcctgttacaataaaactcactgatggttttccacactattccagcagaatcggaatatttaaggcaatataaagaaacacaatgagatgcttggtaaaaagaacagaaatggaaacaaactggaaatg

SEQ ID NO: 640150 - DNA, 369 bp, Homo sapiens
  misc_feature (238)..(238): n is a, c, g, or t
  misc_feature (245)..(245): n is a, c, g, or t
  misc_feature (257)..(257): n is a, c, g, or t
  misc_feature (260)..(260): n is a, c, g, or t
  misc_feature (264)..(264): n is a, c, g, or t
  misc_feature (301)..(301): n is a, c, g, or t
  misc_feature (332)..(332): n is a, c, g, or t
  misc_feature (346)..(346): n is a, c, g, or t
  misc_feature (357)..(357): n is a, c, g, or t
atcaggatcaaaacaaacggggggtgggtggggaaggggctttgggaccagacccccccactactgggtttttgtttttatcagtctttgtaaaagcaggtggtggtggaaattccagcaggtgggtcccccaaaggccctgaggcctcacttttcggattttctgtcccagatcctgctccctccctgttgagcctggggttcccctggcattggccccagccttttgaaaaccggngctgcanccaaaggccgcncgntgcnctgtcgcgacccaaaaaggcttttgtgcaggctgggntcgggccccatgtttgtgctgtttagtttgngttcaaaatgtcanaataaacccanaataaatgttta

SEQ ID NO: 640151 - DNA, 843 bp, Homo sapiens
  misc_feature (1)..(1): n is a, c, g, or t
  misc_feature (122)..(122): n is a, c, g, or t
  misc_feature (178)..(178): n is a, c, g, or t
  misc_feature (292)..(292): n is a, c, g, or t
  misc_feature (312)..(312): n is a, c, g, or t
  misc_feature (318)..(318): n is a, c, g, or t
  misc_feature (328)..(328): n is a, c, g, or t
  misc_feature (335)..(336): n is a, c, g, or t
  misc_feature (345)..(345): n is a, c, g, or t
  misc_feature (348)..(348): n is a, c, g, or t
  misc_feature (351)..(351): n is a, c, g, or t
  misc_feature (357)..(357): n is a, c, g, or t
  misc_feature (482)..(482): n is a, c, g, or t
  misc_feature (488)..(488): n is a, c, g, or t
  misc_feature (497)..(497): n is a, c, g, or t
  misc_feature (515)..(515): n is a, c, g, or t
  misc_feature (517)..(517): n is a, c, g, or t
  misc_feature (520)..(520): n is a, c, g, or t
  misc_feature (523)..(523): n is a, c, g, or t
  misc_feature (526)..(527): n is a, c, g, or t
  misc_feature (532)..(532): n is a, c, g, or t
  misc_feature (535)..(535): n is a, c, g, or t
  misc_feature (538)..(538): n is a, c, g, or t
  misc_feature (557)..(557): n is a, c, g, or t
  misc_feature (565)..(565): n is a, c, g, or t
  misc_feature (570)..(570): n is a, c, g, or t
  misc_feature (573)..(573): n is a, c, g, or t
  misc_feature (577)..(577): n is a, c, g, or t
  misc_feature (579)..(579): n is a, c, g, or t
  misc_feature (582)..(582): n is a, c, g, or t
  misc_feature (592)..(592): n is a, c, g, or t
  misc_feature (611)..(612): n is a, c, g, or t
  misc_feature (624)..(624): n is a, c, g, or t
  misc_feature (632)..(632): n is a, c, g, or t
  misc_feature (637)..(637): n is a, c, g, or t
  misc_feature (641)..(641): n is a, c, g, or t
  misc_feature (646)..(646): n is a, c, g, or t
  misc_feature (650)..(650): n is a, c, g, or t
  misc_feature (660)..(660): n is a, c, g, or t
  misc_feature (665)..(666): n is a, c, g, or t
  misc_feature (671)..(671): n is a, c, g, or t
  misc_feature (681)..(681): n is a, c, g, or t
  misc_feature (687)..(687): n is a, c, g, or t
  misc_feature (711)..(711): n is a, c, g, or t
  misc_feature (726)..(726): n is a, c, g, or t
  misc_feature (732)..(732): n is a, c, g, or t
  misc_feature (740)..(740): n is a, c, g, or t
  misc_feature (752)..(752): n is a, c, g, or t
  misc_feature (755)..(755): n is a, c, g, or t
  misc_feature (766)..(766): n is a, c, g, or t
  misc_feature (774)..(774): n is a, c, g, or t
  misc_feature (805)..(805): n is a, c, g, or t
naaaaaaaaaaaaaaaaaaaaaaaagaaaagagttaggtgtcacattgaataacatgttgatagcctgtgtatggttatgggttctaatttctctacaaaatcaaccagccatgatggagtnaagaaagtgagaaagagtaaatatggtcatataattttttgaaacacttccaagtncaaaaagcagcatgctaatttttaagtgcaaagaaagctcataataaaatagacttttaaaattacaaataaaatctgtacatcaaggatatttttaaggctttcccgtgtgcntgtcactatgtagacaatgnagaggnattgccaagngagggannatcatgtgnggngtnacaggnctggctcatttcggcttgtaggaccatctcttcttttctcaagggaaaagtgtcaatcaggttgaacagggccacaggcatcaccagggagacatagcgctctttgtccatgccatgcttatccnctagcnccatactgngggggttgggtggggttngnagnaanagnntgagntgnagngctagggctgggggcctcntctttgcncctantcntgcnantgngggtcgggancacacccaccagctccacnncggtggtgtgtngaagatcnaggcnacantgtgnttgntgcagcattnatagnnggagnaggtaaaggnggtttnaggcagtgggtgtgggcacaatgnggagtctcattttcncataanactgatcnagaagtgcagcngcngttcagacacncacattgncgttcatggctgcacaggtgggctcagtgcnagaccaagccaggttggattgacatactcgggcagggc

SEQ ID NO: 640152 - DNA, 489 bp, Homo sapiens
agttggccggctgatgaggactactggaacagccagaatgacatcctggaggcaggagcgggcagtcgcgggacaggatgtgcagacacaactacgagctggacgaggccgttaccttgcagcgcatagtcccagcctagggtgaatgtatccccctccaagaagggggcccttgccagccaccacaaagctgcttgtatgccacgtagacggatttctacccaggcagcattcaagtccgatggtccctgaatggccaggaggaaacagcttggggtccgtgtccacccaaaccttgatcccgtaatggaagactggaccttccagatcctggtgatgctggaaaatgaccccccagcaggggagatgtctacacctgccagagtggagcacaccagccttggaatagtcctgtcaccggggaagtggacggcccagtcttgatcctgcccggtacatgcaaggggtccggtaccccggtacaatgca

SEQ ID NO: 640153 - DNA, 589 bp, Homo sapiens
ggataacttgtcttctatcacaatcttgctgaagttattcctggtcattctactgagaatcttcgtatttgcctcacaatactcagcacatctctagcccagtccagcaacagccaacagcaattcatgtgagcctgtcatggcacagcagggcaataccaagcaaataaggcagcatgcaagttcatttcatcttcaatcagtcaacagcacacaacaacaataaggccaactgtcctttgctcaacgcttgttaacctgcttctaccgacttgtagcctatagcagccagcctggagggaagacgtgggaaacgtgagtctggacactctcgaactcgactccatcactacgtctctgccgacgacaaaccagctacttacgctagccacttaacgcagcaagacacaccctggtacacaaactatccaaccacaggctacttttcctacgactctggaatactaactgaatgcgcactgctcggacgaaactacactctcgtatccgctgagactgcagcacttacccgtccggcacaccctcgactcacccctcaaacccttaaccttcctagggcaccgcccac

SEQ ID NO: 640154 - DNA, 436 bp, Homo sapiens
cgctgtggtcgtctctagcacggatccccggctttcgccatgttccccagtagtggcttcctgccgtctacagggtttgccctctcccacttagttttggtctgttcatctctgttctgactgccctctctttcctctcttttggagaaccaatgatttatattctaggccttttcgatcacagtaatagtatcagctagcttgttttcagttcattccctgtgcttcaccacatatgtcaccatcctacgttctttatgatcacctgtttctttatgtactactaagtcatttgatgctcattacaacaatctttcttcttctattgaagagcacagaggaatccatattcttactattacaagagtttattctaacagttcatggaaagaattaaccgatatcactttgtgggttagactgatatttcataatg

SEQ ID NO: 640155 - DNA, 119 bp, Homo sapiens
  misc_feature (14)..(14): n is a, c, g, or t
ccttcgactggccntgaaattcggtgactacggctccatcgattacggccgtactacgtgtagcatacacatcggtgcgtggactgacgtctgccagaattctttgcttttaccctggg

SEQ ID NO: 640156 - DNA, 589 bp, Homo sapiens
cgaaggttcagcagggagccgtgggccgggcgcgccggttcccggcacgtgtctcgtgcacgtggcagcgcgcctggcctgggcttggaggcgccggcgccctggatccgccggccgtggtctgccgagtcggtgtcgtccttgaccatcgccgacgcgttccccaattttttggcatggcctggccgaggagctccagctccagagccccgccgcgccccgcgcttcccaggaggttcatcattgcttccatatcgccctggacttgcagcgccaattacagccaaagcctggcaagcttgacgcgcacctgtgcaagcacacgggggagagaccatttgtttgtgactatgaagggtgtggcaaggccttcatcagggactaccatctgagcctgcacattctgactcacacaggagaaaagccgttgtatgtgcagccaatggctgtgatcaacaattcagacacaaaaaaaaattccaaaccttggaagaaacatttgggaacggcaaaaacatgaaagatcaacaaaaacaatatatatgcagtttgaagactgtaagaagacctttaagaacatcaggagctg

SEQ ID NO: 640157 - DNA, 275 bp, Homo sapiens
caggctggagtgcagtggcatgatctctgctcactgcaacctccacctcctgggttcaagcaattctccggcctcagcctcctgagtagctgggattataggtgcgcatcactatgcccagctaatttttgtatttttagtagaaatgaggtttcaccatattggccaggccagaccagcctggacaatagagtgagaccctatatagggatctcactatatagagcaatacagcggggtcacccgacctcgggtgatccgctcgttggcctccc

SEQ ID NO: 640158 - DNA, 433 bp, Homo sapiens
aggaatttttttaaaggagaaaaatttttgggctttagatttaaagtaaattgaaatgttttaaagaaaaaagtattcccagatttaatccctattaataatataagagctgaaaggtaagtcatttcttcagtccttctcctcggggggaatcttttttgttttcccataaattcccctgacgagggccctttgagatagccctgctttggggccatctgatccccatcgggagcaaatctttgacccccttgcctgcagcttttacttaaccctgtagtttttggacgtttgggcagtattgaaaagccaggagaaaagaaaacagaaaccgggttataacctgacgctaaaactaaaaacaaggaaagggccctcttttttcagaattaaaactaaaattttaaataaaacagaaaacttgatgatgcca

SEQ ID NO: 640159 - DNA, 581 bp, Homo sapiens
gagttcaagacagcgtaggcaacatagcaagaccctgtctctacaggaaaatacaaaaattagccgggcctcgtggcacatgctggtagttccactactcaggaggctgggtgggaggatcacttgagcccagaaggttgaggctaaatgagtcatgattgagccactgcagtccggcctgggtgacagagcaaaaacctgtctcaaagaataaaaataaaagtgtcagcaacttcacagatacttccctgattagccagtaggcaaccttgagcaattctgttatccagtagacctttagcaagataatttaaagaagtctgtttgtaaccatagcctttgcagtagaatctggctatggagcatatcatgaggaacaaatttcttttttttttgctttttctttctttttttttttttgggaggacggggtctcactctggtggcgcaggctgggagttgcaataggggggtgaaccggtccctggaacctctggcctctggggtccaagcagttctcccacctaagcctcgaaataggctgggactacgggcacaggccaccagccccgtaatttggg

SEQ ID NO: 640160 - DNA, 671 bp, Homo sapiens
  misc_feature (189)..(189): n is a, c, g, or t
  misc_feature (459)..(459): n is a, c, g, or t
tccataaaggttttaactgggaaaaaaaagttttacaaaattatcttcccaaaaaaatttccccatagaagtccaattaatccaggtagctttctcttcctcttaaagagatattaccagttaggaactattccagagagggggcgagaggttctctgtgatatgagcccaatctagagccgcgccaanacactctacagagagagaagagtagatattcttttctaagaggtgctctttaaataggtgagaaacagccacatgtatatggtgatatgtggtgtgagatatctctctattgtgagatatatctttacaaatattttctctttaaacataggggtccctatatatgggtgttatggcccaatatatcacaacagtctgggcaccaaaaatcggcgctggttatttaaggttgtggagacaccacaaaaacacatatggctattattgaancgcagtatactccttgtgggaaaatgtcatatttccaaaatatgcctggcccagcgtgctatccataaagagggcaaaatcttagagatataagagaggtggtggcacagtatatccagaagaatattcccacacaaaccaaagtcggtattattacagagttatccagaacgagttaccctgggatttttttccaatatccccggggtaag

SEQ ID NO: 640161 - DNA, 427 bp, Homo sapiens
gactcctagaggtatccccaagtatgggtcagatgaccaacacataagtttatttcggaagacgtctacactgacatgtactatcccatgcagagtcccagtcgcatacatcgctatcttagtctcgacacgctgagccaggccagtgttccctacacgccactggcacagccctgtgcaatcctacgtcccacacgagtggatgagcgacggcagtaagggcaccactaacacaggaggtggggacagtcactgtcacagggtacacgggctgatatgcgtgcgtcctaggagtgtagacctagacctagcttaggaacatggagctccgacccagccacgggtcggcactgtgggcaccacgggtgaacacctggaaacacagcctacttctagagggcagacactgggcagcgggggtggccac

SEQ ID NO: 640162 - DNA, 131 bp, Homo sapiens
gcttctctcctccgtcgtggtcttcttcaggtcggccagctcctccttcaggctctcaatctgcatctcctggacagagctgacctggagatgcagattgagagcctgaaggaggagatcctctagcgtcg

SEQ ID NO: 640163 - DNA, 987 bp, Homo sapiens
aaaaacagctcacagtctgaggaagatgatattgaagagaaggaaagaagttgaaagcatcttgaagaaaaactcagattggatatgggattggtcaagtcggccggaaaatattccccccaaggagttcctctttaaacacccgaagcgcacggccaccctcagcatgaggaacacgagcgtcatgaagaaagggggcatattctctgcagaatttctgaaagttttccttccatctctgctgctctctcatttgctggccatcggattggggatctatattggaaggcgtctgacaacctccaccagcaccttttgatgaagaactggagtctgacttggttcgttagtggattacttctgagcttgcaacatagctcactgaagagctgttagatcctggggtggccacgtcacttgtgtttatttgttctgtaaatgctgcgttcctaatttagtaaaataaaagaatagacactaaaatcatgttgatctataattacacctatgggatcaataagcatgtcagactgattaatgtctactgtgaaaatttggtagtaaattttcatttgatattagatataaatatctgaatataaataattttaatatactagtcatgatgtgtgtggattttaaaaattatctgaaccttaatcagctgaaggtaccttatattcaaaagaatggacttaccatcgatactacacatcggtactttaggggttgggtccaaacataaatattgggggcctatttattcacaccattgcgaaagcactattactaaaggtcccaggggctccaaggaagacctttctaacctcgcatgggtaccacaaaccacaaaaagtaacacgcggtcccgcccaaaccctgctcgctcaaggacactcgccaatacagcacgcgaagtcgaaagaccacactcccccacacaggcaaccgaaggtgcaccaccacgcgcgacaagccaaaaacagc

SEQ ID NO: 640164 - DNA, 178 bp, Homo sapiens
ttttcagcccctccaggcttggaggacccggcggccacactcttggagcctcggtgaagtggctgggatgacgcgtttcttgacgtcccccatagatttggtatggagcaacccagcgccacccggagtacaggtggcgcgtgtggaagcagtcggtggtcgagggccggaatttagt

SEQ ID NO: 640165 - DNA, 333 bp, Homo sapiens
  misc_feature (26)..(26): n is a, c, g, or t
  misc_feature (83)..(83): n is a, c, g, or t
  misc_feature (103)..(103): n is a, c, g, or t
  misc_feature (197)..(197): n is a, c, g, or t
  misc_feature (295)..(295): n is a, c, g, or t
cagatagcctttttctgtgggttccnttgtattgctctcgaacaggataaagatattgtctaactttaggctttgctaagttnaatatgaaagttaaattttntggccaggcgccattggctcatgcctgtaatcccagtactttaggaggctgaggtgggcggatcgcttgaggtcaggagtttttaagaccagcnctgccaacatggccaaaccctgtctctactaaaaatacacacacaaaaattagtcaggcatggtggtgtgcacctgtagtcccagctactcgggaggntgaagcacgcaatcatttgaacccaggaggtagaggtt

SEQ ID NO: 640166 - DNA, 169 bp, Homo sapiens
aacagccatgattaaactgctaggacagccaggcagcaaaattccacgatgggatggtggactgggaagatggcgtcccatctcagggtgaggggctatcggaagcctcctcatgctgtacatggcatgtgtatctctgctcttctccagaatgcaccaccagaggcaa

SEQ ID NO: 640167 - DNA, 943 bp, Homo sapiens
tgggcccatgcccctgtctgctgatgccctgcgcgcccagtgactgcctcctccctgctgctggcccggccggtggccctgactgctgctgctgctgctgctgctggtgccatggctggcgtgtgtggctgcttgtggtgcgccctggtgcaccatgtgcatggctgtgctgtgctgtgctgtgctgtgcgtgacggtgccccccgtggcagacgtgcgaggacggacaggaacctgcacagcaagcacctgtacacggacggacatgttcaccgcactgggatccatggagctgccgcgcaacttcgtcatgttcttcgacgccctggtgtggacactgccagcggctgcagccgacttggaatgacctgggagacaaatacaacagcatggcagattgccaaagtctatgtggctaaagtggacttgcacggccacctccgacgtgtgctccgaccagggggtgcgaggataccccgacttaacgctttatcaagccaggccacgaagctgtgacagtaccagggtcctcggggacttccagacaactgcgaaacgcttggatgcttgcagacacttgaacgaggagccagtgacaccagcaggccggaagtggaagcgggccagatgccccccgaagctcaagcaagggctgtatgagctctcaggcaagcaactttgagctgcacggttgccacaagggcgacgcaagttttatcaaggttcttcgctccgtggtgtggctccttgcaacagccctggactccagacctgggagcagctggctcatgggcgcttgaacatttccgaagatgtcaagattggcaagggttgattgtacacagggaatatgaactctgcccgggaaaccaggtacgtgggtatcccatctttctcatggtaacggagaatggaacaaaggtggatcacgttacaagggaag

SEQ ID NO: 640168 - DNA, 290 bp, Homo sapiens
tggagagggacaggaggaagaaagaaaggaaggaagaaagaaagggagggagggaggaaagaaaaaaagaggaaagaaggaaggaaagaaaggagaaagagaaaggaggaaaattaaaaagaaaaaggaagaaaggaaggaaggaagaagaaagacaggaaggaaggaaaaaggaggaaagaaacaaaagggcaagcaaacaagaaaggtcaaaagacagtaacggcccaatcaaagcttccatgacgaatctgtgcctttttggatcatggtgtactcaggaaatgcag

SEQ ID NO: 640169 - DNA, 745 bp, Homo sapiens
gcaccgtcaggacgcggactcgggaagtgcgcacattcgcagcccgggcagcctgctgcgcaccgggcctcgcgccccggccccggccccgagcccctagccaccgaccggcctccaggatcatgtggtatgtaagacaccagaggctttagtcactacgagcgtcaacatttagagagggaagccactcattctctggacataatgacatccgtgacagggtagcgctctttatatgcccttgcatgagactatcccacagattggaccaagaggtgacccttgatgccacgtgtaaagcaaacaccatctccatatacctgagcctggataggaaggaagctgtggtgcaccatcttcacttggcattctgacacatcacttcccaagaagactgaattaaaatgatctgaatcgacaccgatgccgtacagacagaataaccgatacacagagaaagtgggatccaatcgtgatccagggattgaagagaatgggagctgacacgtgtatgggcaagaatcgattggcagataggacaatcaaaccatatatcgcagactttctataaggggacccgttgatcacacattgtcaccttagcaaataaacaactaagttctcctttcacaatgaacctttcaccaagggaagaaacagaaggggacacaacgcaacgtaccagcgagtgagagtcatagacggaaagacaatcatgggagaaccaacatgcaaccagtgaagg

SEQ ID NO: 640170 - DNA, 536 bp, Homo sapiens
  misc_feature (378)..(378): n is a, c, g, or t
  misc_feature (398)..(398): n is a, c, g, or t
  misc_feature (433)..(433): n is a, c, g, or t
  misc_feature (471)..(471): n is a, c, g, or t
  misc_feature (535)..(535): n is a, c, g, or t
ttaaatgcagagaaaaagaaaacagcatccaagactcttggaaaactaacacatatatatcaagcaaaacaggaattaattgcatagactgaactaataaaagactgaaataatcttttatgactttttgcttaaaatgttgttgatctttctgttttgtttttcagagtcaagtaacccccccttcttgagctatttacagcttttaacaattgagtaaagtacgctccggtaaggattataaaacaaagttttgtccaaaaactttggaatatgtttttttctctttacctgatttctgcagaatttggaaactatttgtgagtgttcttaacttacagcaatatagttatttgcataagtgcagtaagaatctgnttttccttctttcttctttntttttttttgtacaggcacaattggagaaactggntatttaacaagggtttgactggaggggcatgctttctntaacagacttctttaaggaattaaagtgcttagagccatagctcttggctggcttgaccttggnt

SEQ ID NO: 640171 - DNA, 334 bp, Homo sapiens
  misc_feature (93)..(93): n is a, c, g, or t
  misc_feature (100)..(100): n is a, c, g, or t
  misc_feature (115)..(116): n is a, c, g, or t
  misc_feature (140)..(140): n is a, c, g, or t
  misc_feature (149)..(149): n is a, c, g, or t
  misc_feature (156)..(156): n is a, c, g, or t
  misc_feature (165)..(166): n is a, c, g, or t
  misc_feature (185)..(185): n is a, c, g, or t
  misc_feature (198)..(198): n is a, c, g, or t
gaatcacaagctccgggtggataaggcagctgctgcagcagcgggcactacaagccaaatcagcatgagcaaggcggcggttgcaggcaagangcctgtngtaggtaagacaggnngacggctgctgttggtgttaagangcagaagangcctctngtgggaaannaggcagcagctaccaaganaccagcccctganaagaagcctgcagagaagaaacctactacagaggagaagaagcctgctgcataaactcttaaatttgattattccataaaggtcaaatcattttggacagcttcttttgaataaagacctgattatacaggcagtg

SEQ ID NO: 640172 - DNA, 228 bp, Homo sapiens
tatgatccccggtcgttcggattgggttatggcaggtggttttatattcgataagttgttgtgatgaaattagactggctccctaagatagcacgagacacctgctatgatgctataggagaaaatgtgttaggtctaccgaggctccaggttgggagtagttccctgctaacggagggtatactgttcaacctgttcctgctccggcctcaccgtgcttatctcaat

SEQ ID NO: 640173 - DNA, 161 bp, Homo sapiens
ccttcagtccagattttgtgtaatactttagtgtctacacagacaaatctttaaaaaaataaatagtataaattactaaatatttaggagataacagtgcattaagggtctttttatataatacatacatatcacccctttgcagtgaaggcgtaacgtgt

SEQ ID NO: 640174 - DNA, 825 bp, Homo sapiens
  misc_feature (1)..(1): n is a, c, g, or t
ncatttctcgcctgttggacccccccccctgcgggtcctcatggttctcggtctgtaattctatcccctctttagaaccgcctccttacttcccggccccgccctcggtttggtctggtccaagcagggcgggtgctagttctctttcctccacctcacatgggggtcagccccccttccattcccgtgcacatgtctattccatgcgatgacgttcagttctacttccgtgcgtttcatggcactccccccaaggcgaggtcaattccaacacgatagtatctatctgtggcgcctccctgcgtgcgcaaaacttttcgttattatacaacacaatactcatggtgttcaacaccccgctttgtgtttccaagaagaattattctcctcaaggcacttatttgtcaacaattctcttcgctacaccaccctccaatacatttctgagccttcttcccctttcttacacatacagcatcacagacataagataaaagctttttcccctcccaccttctagttatttgcagacataaaaatcgtcttgtccccccgcagtctttccttgcccccacaagaattcttctgggtcccgcaatatcccctttgtcctttctatgagaaagcgcgatatgcccccacccatatccatgtgtttcttaaattaatcatgatggtcgaactgttaaattatagaagcagaccacatctgttaattgtccgtgccctacataacacatgcgaacaatggtgcgagcatcacccccaaataacacccacgcctctcatataactgacccgcttagtttctgcccacatagacgc

SEQ ID NO: 640175 - DNA, 143 bp, Homo sapiens
tgagggctgcccggtgctgttggcacggacgcaggttcgtgcgggcaggagcgatgcgtcagcctgcaaactggcagagttgtaggttcatagtaacgcgtcttcctgccttctacgacatttcagtgtgccaccagctgcgg

SEQ ID NO: 640176 - DNA, 434 bp, Homo sapiens
ctagctattactttgtacctctagctattacggagttcctcatgttcaattttaagacaaagcaattttaatactaggcgcacaccacatgccctcgctgcagactgcttttcttgacacgttatgaagtatgtcaaggaggtatgattctgtctgaattaccgactggcactcatacatactactcaccgttgtttgacacgttgcagactgttgtatccaatgcagtgactgctgctatgaaatcagatagcatcaacgacagcattattaggttctgaactatgagctaggagcaacttaggttcccaattttaaccccttgtcagcaagatccaagctgcctcatttgcacattagcacctaagtgtcaagggggtaaataaccagcacataagatactgcacttctgattgtagcatttggcagaactg

SEQ ID NO: 640177 - DNA, 1021 bp, Homo sapiens
ggagctacaccaagctggggaaccccacgcgctctgaggacctactgggattatgggcctttcagagatgtgcctgcctatagatcaggatacttttaaagctacattatgaataacaacagcccctttcctgagcccatcaccagcatgacccgagatcatatgaacgatctctcactggcggagtaatattgctgtggaagaaaatgtggactgtaccagcacacagcgagctgtgcttagacggggcctttctcacagctatgattaccagagaacgagccagatagatggaatatcctccatccgtgtcttttaagacctatcggcttcctgctgctgcccaggatgtttcattaccgggatgagattaggcaaatgttgctaccagccacgcgtccttattgggatgactctgtagagatggaaatccgggcctcgctgccctctctttggcgggtggaagacccattacatcgttggctacaacctcccaagctatgagtacctcttataatttgcggtgaacagtatgcactgaagatgacgttgtggcaccatgtgtgccgatgaacaggtgatagattctctgacgttgtgaagatcatcctgcctgagggagccaagaacattgaagattgatagttccctatgaaatcacgccgtgccccaatgagctgcctacacctatctggacacatttgggcgccctgtcattgttgcctacagaagatctggtcgaacagcgctccaggcctcgtggcgccctacccgtcaccaggtgccatgcggcagagcctgctggtggtgcgcctcaaactcccgtcctcccgtttcacaaggtcggcggactcatccccagatacccccaacagcaaaaggacgtacaaagaggtgtgccgtaccaagaatccccgagtcacacagtagacaacaccactgccccagggaacgcggtacggccatacacgaaagattacagcaagcaagcgagggcgaatacctcggacggtggaggggc

SEQ ID NO: 640178 - DNA, 144 bp, Homo sapiens
aaagatctttgcactctgtattttctcgtcacttaaaggtttgcatggtttctaataaaggattcaaagcataagtttgtagtgaaatggcccgggagcattccaagtggcttctctgcgcagggaggattggcatgcgagtgt

SEQ ID NO: 640179 - DNA, 171 bp, Homo sapiens
tatgatttgttacgccagaatcatataaagtggtgcacgcaggcagaactcgacagcaggcatacagatagaaaatcacaatatcaagaacaaattcctacctaagagcagaatggctgaaaggaaagtctctcttgatttcaagtttttgaccatcaaatctaatggact

SEQ ID NO: 640180 - DNA, 233 bp, Homo sapiens
gcgatacccaccccaggcggtatccagtccgaaaccggcgctgatactatcgccaacgatcaggacagtacccgccgctgcttctgggccatgcacatcaaggccaggcagcactcaaaaaccacacacgcatcggattctccatgggcgcaagcattctcaccgcgaagaacctcagcaaagtgttccagcgcgaggtgactgactatctgcacgactcagctgactgacca

SEQ ID NO: 640181 - DNA, 253 bp, Homo sapiens
agaaaaggcagggagcaggaggctcatggctgaaaatcccaaagcattgaatggctgaggagggaggatcacttcaggccaggagtttgagatcagcctgggcaacatagcaagactccatcttggaaaaaaaaaattaaaaattagccatgaggggtgatgcacacttgtagtcctagctattcaggaggcaagagaatctcttgagcgcaagagttcaaggctgcagtgagctatgatggcaccactgcac

SEQ ID NO: 640182 - DNA, 272 bp, Homo sapiens
atgattgttgccggctggtggtgctccgcgtttctccaagccccccatcctccccctttgctcctcggtgctacagtgcctgctgggttgaggggagaggcagggcaggactgtgggctttcagagcctcctggcagccaggcagggctgcccgtccccctgcatctggcgaggcatgcagctgtgtgcgcagtgatggagactaggaggaggatacattgcgcagacaccccagtgatacccgctaccccaagtgtctggagcgtgacaag

SEQ ID NO: 640183 - DNA, 209 bp, Homo sapiens
tactacccccggggtaggtgccataataagataaaattcatctccaaatgtctacagagatctagtaaagccgcctgcttctctgaagctctaagcagtctagttgagaagtaacatgataccctaccatgaaagctcagacattagattaaggctcggaaaggcttcattatacctatccaggtcgacccacttgtcctagattactt

SEQ ID NO: 640184 - DNA, 335 bp, Homo sapiens
  misc_feature (3)..(3): n is a, c, g, or t
  misc_feature (14)..(14): n is a, c, g, or t
  misc_feature (33)..(33): n is a, c, g, or t
  misc_feature (107)..(107): n is a, c, g, or t
  misc_feature (134)..(134): n is a, c, g, or t
  misc_feature (147)..(147): n is a, c, g, or t
  misc_feature (257)..(257): n is a, c, g, or t
  misc_feature (289)..(289): n is a, c, g, or t
agnaccccgaatgncatgcgaaagaggctgagntttgtgcagtcaatagaaaagcattaaataattttgtttggccctgggtatgatggctcatacctgtaatcccnggactttgggagatcgagagaggaggntcacttgagcccnggagttcaagaccagcctgggcaacaaagtgagaccctgtctctacacacacacacacacacacacacagaatcaaaaaattagccaggtgtggtggtgtgcatctatgntcccagctacatgggaggctgaagcaggaggntcgcctgagcccaggaggtcaaggttgtagtaagccatgactatgc

SEQ ID NO: 640185 - DNA, 370 bp, Homo sapiens
atctcacattcggatgtcatagtagtatatccaactgaatatcaacgtcttcaggctgtgagctattaagtcattacagctcagaatgcagtgagttacttcttgggggcatcctcatcatggaacaggagcagggataaatattcagcctcctgttcagtcagacaattctgggaagcattatattatccacacctccgtaatacctttctattgatttttcttctgtctctctaccatctttcccactcctgcatcctggagccaaacgccaaataaactactgcactcaagttttttattctactccttgcaaaatgttgggggggtacccgaggctcgaaattccgtaaattcatgggtcataagc

SEQ ID NO: 640186 - DNA, 230 bp, Homo sapiens
gtcgacgaattagataatgttctttctgtttatattttgtggactaatttgagtaattttggtgttaactcttctttgaaagtctgataacccccatatctggtaccaacttctgtcttagggttttactgatgagaacactatgaccaaggcatcttttataaggacaacatttaatttgggctggcttagatgttcagaagttcagtctactattatctaggtcgacg

SEQ ID NO: 640187 - DNA, 321 bp, Homo sapiens
agcgttctagaggatccctgatatgcagtctcagccatgggatgtccgatgtagcatgaatacagacagagagaatagaggaggaagtgctgggtagaaatctggacctttcccaagaaacggcttctatagagggggccctgtcttctctctagtcggtggcctctcaaggacagcgtcagatgtgttttgaactcatgtgttaacgagacaacgattgtcaaacaaggcatgtgtcaatatattctgtaggtttttggactacacacacgatacacacagcacactaccgaaaaatattttagtggtgtttctatagta

SEQ ID NO: 640188 - DNA, 562 bp, Homo sapiens
  misc_feature (382)..(382): n is a, c, g, or t
  misc_feature (394)..(394): n is a, c, g, or t
  misc_feature (410)..(410): n is a, c, g, or t
  misc_feature (452)..(452): n is a, c, g, or t
  misc_feature (475)..(475): n is a, c, g, or t
  misc_feature (484)..(484): n is a, c, g, or t
gtacgtgtatgtggtgtcggtatggagaattcattgaattggaccttcaagtcttccgttatcgactcagttattagcggcaccctcaagttttcttttgattgcattgtggaggatttcgaggatgaactcattgaattcttttctcgtgtatgttttacaattttatatgacaatctttgtctgtatgcgaacagattttttgttaccatgccctgcatatatcgtatgatgagttatgatccactggagctgcccacactggcttgtatttatttctctcaggaggggaaattggtggcaatgccttttatatattatgtttttttctgaaattatcttgaaaaaatatgaaaccaaataataaaaaaatatattttangggggggccggnacccttttcgcttcanattgtgtcgtattatatttctctggccgtctgtttacaacgntgttactgggtaattcctgtgtntactaattnaattcgcttgctgcacatctcccttttcgcagctgggctaatattgagtatgccgtactgatcgtctttctaacagtg

SEQ ID NO: 640189 - DNA, 358 bp, Homo sapiens
  misc_feature (245)..(245): n is a, c, g, or t
  misc_feature (259)..(259): n is a, c, g, or t
  misc_feature (283)..(283): n is a, c, g, or t
  misc_feature (323)..(323): n is a, c, g, or t
  misc_feature (352)..(352): n is a, c, g, or t
ggtcattgtagcctgagtaaacaatcaagcttcagtgggcaacctttttttcttttgccattttctgttttaggaatttccctggggaactaaaaaattttgcagaatttttcctaattttgtttatcccgttttgcccaaagcaaagcccctgtttaacccagctgttaacgaatgataaactgacattatactttaaaaaatgggggatttgggcattaaatttgcctgaaaaactttatccntttcccttttttanacaaaaaccatgtaatggggacanatttaactaaaaagatttatagtcataattattttattgnaaagattttaactaaagtttttccttttntctcca

SEQ ID NO: 640190 - DNA, 566 bp, Homo sapiens
  misc_feature (435)..(435): n is a, c, g, or t
aaaggggattattcaaagtaccgaaaaccttctcccgggatcaggcgtcggagagacccccaggccaggagcacctctggtggggcagaaggtgattgaattactcagatatgaagatcatcatctaggtttagtgtaaaaaggccctggatatttaaaggtggccatttgtggatttacagtgttctttggataattttggccgccgagaagtttattaaaattggcaagaatcgtcgtgtgaagtgaatggatagtagtgaacaattcagcaagctacttaaaaagagacccgaggcagcagtttctgcagtatttgcggttcaaacgggacttatataactgggttacagtattctcagctgcgtggtaattttgtgcctccccttccccaagcccgtggtaggggtatcttcagccgaaagtgagagacgntgattggtgtactgagtagtttcagcagtttcaaatgactgagtatgctgaagtttcatggcagtttatttttacctttatggaaagtttaggaattttgacttcagtctttcatgtcacaatgggacact

SEQ ID NO: 640191 - DNA, 1019 bp, Homo sapiens
gcttgacagtgtgatccctggggatctacgctgagttcggagatgctccagctcgggccgcccctgtctgagctgatctattgcggcggctgaagctatacagcgggaaggaaaagcctctgctccggacgtctgtattggctggataccgcagctgccgcgcgtcctgggattccctcaggggcccctcccggacgctgtcgtgtctcccatggacttgcccggggactccagcccgtctgtgccagccgcgtctgtgccgccagcctctgactcgagcatttatggggagccatggagcccgaaacggccgaggctctgcagctcccgggggtcccattcttcccgctggagcaaggcctctcggcgggtcctggccgtggtgctagaacgatgtcatggcgtgtacacattggtccccgtggtgccctcacatgcaggacctccataccacaggcaccagagataccatcaggatcctgtccacaggcaggcgactgcctcgccaccccggcaaggccgggtggtcctcgcaggccaggtgagcatggcaggatgggggtacagccgagggcccaggtgagccatttaaatcttcctgttaacatcgctagagcctcccggacctctgtgtaagtgtcagcgagcccttgaggccgaatccagcggaccctcttccaccctgaggcggggaacaaggacaacccttggccagaaggagggccctttcacaaaaggtggaccaggagccacacaaatccaaccatgggtggtgatgcttggaagacatcggcaagtccatagaaccccatcgagtgtagaggccttcgattggagtagcgaaccccgccaagttcacgtccattgccaggtacacggaagttgaagcccatgagcgaatatataggcccagaacaactgcatacaacatgggagaccatatggaaccaccattcaggctaaatttgcgtcatgacttgacagaaccctctgtgacagggccctgctaaagagccgca

SEQ ID NO: 640192 - DNA, 148 bp, Homo sapiens
aagcatcacttcacatattttatggagtaagatgtgattttttccatacacatattgaagtgattaaatcagctaattaacatattaatcccctcaaatacataccacttctttgtggagagaatatttaaaatcctttttttttttt

SEQ ID NO: 640193 - DNA, 591 bp, Homo sapiens
gtctactgtctagtcatatcttgggcacttttttccaggatagggcactttgtctacatcaaaaagcggtttagacagatccttgtctccaagattttctgatgggtctgggaactgtctgcgcctcttcaaggcagaagctacttctcctattaccttgacattttttaagccaaacttctttctaaaagtatcaaaccatccttggctggcattatattctccagctttagatccttcaccttcctttgactttgtcatataatgacttggcttttcttaaatcatattagaatcagtaggtatacttttcttacagcaatcctgcacccacatacaagctgcatattcaatatgagataaaaaagtattttgcaaaaagcacaaggttttcgcaccagctggcacaggtgtagcgatggcttcacaaacttccttttaacaatggtcctggcttcatttaccttgaaatggcaggtaaccacagctgcagaacttaatctagtacacatcaagcaattcaacaatttcttgtaacgtcatcactttgctctgctttttgggagcactccaggttcacgggggccgtcg

SEQ ID NO: 640194 - DNA, 101 bp, Homo sapiens
atgtatggcttccccattaggctgcgtgtgtgcctaagggcgagccatacatagaatgcacctcatttccctgatcccaaggataaaccttatcagaagat

SEQ ID NO: 640195 - DNA, 96 bp, Homo sapiens
cacagagatcatgcagtatgcggtgtggtgttgtcttaggagtcagaacttagggggccgggcccctccccacaataaagatgctctccgaccttc

SEQ ID NO: 640196 - DNA, 175 bp, Homo sapiens
tcacacacgtacgtgtgtcacgtctacgtctcacaggctgctgacgcaagagtcaagtcaaggctcacaaaggctccgtctccatgagagaacaagtctcagcgcagggagaccgagagcacacatgtcacacgccccatctagagagagacacaacacatatcatcatcatctt

SEQ ID NO: 640197 - DNA, 679 bp, Homo sapiens
tactttgtccgtggtccgttcaattttctaaacattttaaaaataacaaactaaaaaggagtcctagatggaactagtggcaatgattacatacagctgtttggttttgcaaaccccacaactggatattaagtcaggatagcctccgtgctaaattctaaccctcaaggctgaacgtgttctgccctattcacttacagattcagagcattaggcaaggacaacctttcttagcccctcacttctgaatctctccttctaagctaagaggctcagagcagaacgaggaaattgttgtgctattcggtgccagaaggagatggtaagaacagccctagtaatcttcatttactcctgaggctctgtgcccaacaaactgattctaaaagcccttcctgtatatatgcgaataagctcctaagtacagactatttgggctgtgcattgtggagtttcatggccaactacacgggtaggctgacatggtctctaggcccggaagcaagagttcccaaatgcgcgtgtcttcaatgaaatacggtaagtcccttgaagcatggatgtaccacctgagtaatgcatccccttgagagagtcaattctacccttggcccaaattacactctgggatactgggtccccctttttggtgaagcccagcccatgtcacactgttacg

SEQ ID NO: 640198 - DNA, 107 bp, Homo sapiens
tactagaggatccgctttattatctcactgaatgtcctctcaacgctcatacttttcctctctccatccctcgtcaggtgtgttgaacctagacccaaggagatatg

SEQ ID NO: 640199 - DNA, 381 bp, Homo sapiens
tgctattcgtcccaagagtaccaagtaacattcttcacaaaactagaaaacactatttcagaatttaaatggcaccaacaaagatgctgaatagccaaggcaatgccgggcaaaaagaaccaagctggagacatcatgttacgtgactcccaactacactacagggcaacagtaagcaatacagtagagtactggtacgaaaacagacacatagaccaatggaacagaattatagagcccagagataatactgcacacctacaaccatctgatcttcaacaaagctgacaaaaacaagcaatgggaaaaggacttcctccttaataaatgatgctgggataactggctagccatgtgcagaagattgaaccggatagcttg

SEQ ID NO: 640200 - DNA, 941 bp, Homo sapiens
ggccgggcgcggtggctcacgcctgtaatcccagctctcagggaggctaagaggcgggaggatagcttgagcccaggagttcgagacctgcctgggtcaatatagcgagaccccgttctccaggaataacaggagcaaaaaaagagaaaaccaaaaggacaaaaaaaaaattaagggttagttttcccttaagttggaaccttcaacctctccggggttccaagggaattttctcggtgcttaggcccccaaggagggggaacacgggttccgttgccaccattgccgggccagttttggcttttaggtaaaagaaacggggggttttccccccatgtgttggggccgaggcgcgggtttcttgaaattcgtgaacctgagattgatatcccaccaaccttggggccttcccaaaaggggccgaggaaccaagtgcgtgttgagcccaacgtggtttcgggacctggccttaacagttttttgtgaggacaaaacttatgcagtttcaaaaccgggcttccaaacagcgttgagtcggcgcgagagcacggggcctcacacacctgtgaaatcccagagccgggggggagggcgtgaggccatatttgcgggtcctaaaatcggtaacactaccaacgatccgcagaaacatattgggggccgactgggaggccgggagcagaaacatgccgaaacctgtgtgaggcgagtctttagtgacccgaaacgtgtgcccggtcactccgagcgggcgacacgagggatacttctttccaaaaaaacacgggtctgttcccactgttattcccgcgagggcggaagagaccgagtgggagccaaccccactgcgttcggggagacacctccacgcggggtcgggtgacccaactcgggggggcagacagaggaggaggcgggccgcgcacactcgagacagactg

SEQ ID NO: 640201 - DNA, 325 bp, Homo sapiens
  misc_feature (277)..(277): n is a, c, g, or t
tcctaagcctcaagcttttagtaatagtgtctgatcctcaaaaaataattaggaatattagaagacaatatgatatgatagaaaaaaaaacaaaagaaacaacaggaaatagaaacagacccctagtgatccagaaaatagagttatcaagcagactttgtttttaataagttaaaaaataaaagataagatggagaatttcagtatagagccagaaactttaaaaaataatcaagtggaaattttagaaatacaaaatatgataatcaagtgcaangggtaggcttaatagtagatcaggacagtgaaggagaagggtcgggta

SEQ ID NO: 640202 - DNA, 295 bp, Homo sapiens
gtcctttacagacacttacaataacggcaacgatcaatttgctctttccaaagatggtcgagtaaggtgttaatctacgttctctgttctctgtttgttggtattggtcttggtgtggtgttttggagacagagtcttgctctgtcacccaggctggagtgcagtggcgtgatctcagttcattgcagcctctgtctcacgggttccagtgattcttctgcctcagcctccggggtagcggggactacgggtgcatgccaccatgagctcgctaattttggtatgttaagtagag

SEQ ID NO: 640203 - DNA, 728 bp, Homo sapiens
gcggctgtttcctgggacgccctcccggacacccccgctgcagtggttacggttctgggcccccggcagaaggctcctccgggtgacccccgtgcggggccctgcgagccgcgtggagcctgacccctgtgtggcctctgatgcctgggagtgaatgtgggtgcttcctgtgatgtgctggatgtgtgcctgtgtggtgcctgatggtgatgcctgtgtgcctctctgtgactgctgtgtggcatgtgtgcagctgccctggtgcttgtgagactggtgactctttgggacccctcgtgcttggcggggggtctcgagctgaaccttgccccctgctgtggcaatgcctgctgtggcctgctgtgaatgtttgggccctaacctgtggtggacccctttccccccaagatgtggtgaccctgtgcccctgtgtggctgggtgtgacgaattgaaacggtggcttccatggcatctgtgatgtgggattgtgaccattgccctggccgacattggttgtccccccctctgtccccgcgcccccaatgctttgccctgtactgcccccggggtgcataacgtggccagggagggcttggttggcccttcaactctgaggggaccgtgcagatgctctgcttgcagtcccgtgggccccagctgggtgcaaacgtgcctttccttttcaaggcaaacgaagatggttcccatggaaaagaatggcattctc

SEQ ID NO: 640204 - DNA, 172 bp, Homo sapiens
  misc_feature (59)..(59): n is a, c, g, or t
  misc_feature (87)..(87): n is a, c, g, or t
  misc_feature (96)..(96): n is a, c, g, or t
  misc_feature (133)..(133): n is a, c, g, or t
  misc_feature (152)..(152): n is a, c, g, or t
cagcagcggaagaccccagtccagatccaggactgagatcccagaaccatgaacctggncatcagcatcgctctcctgctaacagtnttgcaggtntcccgagggcagaaggtgaccagcctaacggcctgcntagtggaccagagccttcntttggactgccgccatgaga

SEQ ID NO: 640205 - DNA, 200 bp, Homo sapiens
ccggttcgcgcaaggcgaccacaaaagaaaatagcctctggaagacgctctccatggcttacccaggctaacgcttgactcctggacttaaaactatccaccagcctcagcctcccaaggggctgggattacaggcgtgagctaccactagtggcctcttctaagaggaaatttggatatgcacagagacaccagagatg

SEQ ID NO: 640206 - DNA, 100 bp, Homo sapiens
ttcaggactgctgagatcagagcgatgctgctgaagacagtgctcttgcatgggacatgtggcccagagtgctgaatgctggacaaatgggcatcctgca

SEQ ID NO: 640207 - DNA, 302 bp, Homo sapiens
  misc_feature (34)..(34): n is a, c, g, or t
gtccgacagtggagtgcagtggcgcgacatcgancaccacaacctctgcctccggttcaagcgattctcttgcctcaggctcacgaggagtagctgggattacaggcgcccgccaccacacctggctgatttttttgtttttagtagcgacgaggtttcaccatgttggccaggctggtctccaactcctgacctcaggtgatccacccgcctccacctcccaaagtgctgggattataggcgtgagccaccgcgcctggcccccatcactttcttagcacataccgaaccttggataagtg

SEQ ID NO: 640208 - DNA, 171 bp, Homo sapiens
ctggacattccctggggccctatgtccttcctttctccccagcttgtccacactagcatcttcctcacctcctggtttacagcagggaaacacttatcgggcatctgctccacagaaaacaccaggccaaccacagctggtgataaaatagcacaaccacacccggccctc

SEQ ID NO: 640209 - DNA, 312 bp, Homo sapiens
gggcaaattttgtttcaatcttttttccccccatgattttcctatgggcttcctctggcattccctgtggttttggtaaaaaattgccctttaaaggatttaacaaatgaatgctccaaagtgtatgttcaaaaaaatttaatggggcccctcttccccagtttggaataattttataattgtaaaaataaaaattatatttataagtaaatatgtaaaattgtaaatatgtaaaaaaaaaaatggggtttgctgggcatggccttttatatgttaattttttagtttaaaattaagtatattccctgttta

SEQ ID NO: 640210 - DNA, 149 bp, Homo sapiens
cgttctgagtactgcaaccgtctgcgtgcagcccgactatcaatacgtcagaatagtatgataccgacaccacactttacctgcctatattttctgcatgattcagtcagtagttgaacgatcgttactctatgccccccctataaaca

SEQ ID NO: 640211 - DNA, 328 bp, Homo sapiens
ggattcttcatagacaaagtgaactcatgcttaccaatcaaatctcaaagcacagaattattgacttgaatcatggtttttacagtcttattaaatgctcaagatttggatattatagattttattttaaaatattaacacatgcgacagcatcagttttgagctcattttcaacaatcaaacatttcaataacattcacacacaaacatccatggcaggtgctcctaacatcacacttttcagatttccgtctctactgtgtgcattaccgaatcatctcaagtgtaacacattcaactcaaattggtatttgaattccctggcaaa

SEQ ID NO: 640212 - DNA, 921 bp, Homo sapiens
taacacttaaagggtttcttggaaaaccctcctttccttaaagcacatttttctcgtgaccattaaacgtcatgtgtacataattctttgtgtgtgcaactcatgtgaaccttttggcaccaatataatgtgggtggttgtgggtgtcagctctccagccatttgtgggtccatgtgttgtgtttagacaattgggtgccttttagaggaagccttttagtgtttataaaaactgtggtacagaatgtgtggtgtgatatttgtcttttattcctattataaagattattattattatattgtttgttatttgtgaaaacaccgaggtgtagtatatgtgtggtgtgtttagataagggagaaaacgcgtggtcaaatatataatctcacagatgtgtgatttaaaatttattttgtgttctcacacgtgtgtgtgtgaatatatataaattttatagtgggcatatgtgggggcaagagatttgcggggggtgttataaattatagttgtgtgtgtaacactctcccatatatttataagtgtggtcattctcattattatagactctttgtgacacagatggggggctcgtgtgtcacactcctgttggtgtgtacagacaccgagtatacacttatatacgcactttcgagacacaagaatttttccccggggggtgtaaatgaaaagagtgtgtctctcacaggttatacacatcagtgggtttccagcgagagacctctttatagacaacacaacacaacaacagaggggggagggcccgcgccacactatgaaaaattatactccccagcagagagggggggacccccaaaagtttatgacggtggtttaccccagaacgttttcctgtgtttacaccaaagggggggtccctccttatagagggggagcgcgga

SEQ ID NO: 640213 - DNA, 175 bp, Homo sapiens
aagtcgatctctagcacgatccccagagacgaagtaccagtagacacgcacaagcacacacacaaattcaaaaacttctacatgaaaaataaggataaacatcatccatctattttgtactgtgtaatgcaactttttatatacatcaatttttatatattatattatttttttt

SEQ ID NO: 640214 - DNA, 975 bp, Homo sapiens
ggccagtgactgccccctggactggccccaggagtaacgcagcttcctacagatggctgtctccttcaccgtaccgacacctggtcactcttcacagacatcatggctacagtctggtagtggggacaagcatcacttcaaggagtaagctatgtgaggtttcagagctgtcaacctagtccaggggcatcgctcccaaagcacgatgcgtcgtggctgcaggccagattcctcggtaggcaatggcacgacgagttgcccgtgtgtaggtaggaccttggtgcaaaaggtcgtgcgtgatcggtcggttgtgcgctgatagctacccttgaagagcattccaagttacgttgctcgtggatagaggtgagctcctaccctgggttgctctcgagactcagcactaggggtgtccgtgcagtcttactccgcgcgagagctacacctacggaagtatcctggcgcatgaaggcttccgagacaggccaagcagcaggtaaacatctttctagaaattggccgttcgaatgggacccacgtgggtcggctgctccttgggaggctcaagaaagggagtatgagcacaagacgaagccccagacagcgcgcgacggcagtacgcatagcggggcagatccgagcgagcttgggccgagagttgaccctagtgccaggagctagcaaggtgccgttcgaaggctagcatgcgacattgagcaacagccacgaacattgccaagcaaggagtcctgctccagggtcctgcgctccgttcggaaaagtgtatcccctgggacaagatttaccaacccggacaggcttcgtgaacattgtgtcagggcaccctggcgttgtgatccaagtgcctggtaccgggagagtatacacagtccggatccccggttcacctatagcccaatataagcaggtcaccatccaggtgctgctggacacggtcgtgtgagaaaacttacc

SEQ ID NO: 640215 - DNA, 198 bp, Homo sapiens
gaaaaaaggggggggccccccccccggggggggggggggggcccggcccccttttggggttcccccgggtttccccccccttttttgggggggggggggggggtttcccccgggggggggggggcccgggttttttttccccttttcccggggttttggggggggggggtttttttgtcccccccccgttttttttta

SEQ ID NO: 640216 - DNA, 160 bp, Homo sapiens
acacagggaagaatcttaattatccccttcccaagatgggatggggcataagggcacaggactgagactgccaagtgaggaagctgctctgcctccagtgtggacctggggtgtaggtggtttagtgttgcctcccctgctagaatctatccatgaccat

SEQ ID NO: 640217 - DNA, 167 bp, Homo sapiens
cctgcctctgccacagcaaggctggtcggggtcaagctggaaaggccagcagccttccagtggcttctcccttaaccattaagtatattggtccagagtgggaggctgagggagagggcggtccggcggtacgagggaggagtgcggagtccgcctagtgcaaaatc

SEQ ID NO: 640218 - DNA, 111 bp, Homo sapiens
actgtgcgtcacaccggatctacagaatatgtcgaactataaactgctgtgattgtgaatgacttgatctttgcttgtgtttacaatttcctataatgcacatcttccaat

SEQ ID NO: 640219 - DNA, 292 bp, Homo sapiens
gtcactctaaggatctcaaattgaggtcggttggaatccacgcgatcactcaccgtagatatagagtaaataaaacacatcgatccgtcccgcaggcaatccatcccgtaacctaacgtctctatcttactaacgcaagcaaatcgttcatcaatgaatgtattgccttgccttgtaagtaagcatgcgccaaggaaggtcgagccacttactctagcttgtaattaataactagctcgtcgctgtcttattaatccaaccgacagtcagcagccatccatcaagcatagta

SEQ ID NO: 640220 - DNA, 82 bp, Homo sapiens
tcggccggctcctattggactttctcagtgaaaagttcactatgttaatcttttgaattgaataaaaaaatgcattgaaacc

SEQ ID NO: 640221 - DNA, 1543 bp, Homo sapiens
  misc_feature (365)..(365): n is a, c, g, or t
  misc_feature (712)..(712): n is a, c, g, or t
  misc_feature (970)..(970): n is a, c, g, or t
taagggggaatgatggtggtcttgggatatactacagcgatggctattgaggagtatcctgaggcatgggggctcaggggttgaggctctctgggtgaggtgtttaaggtggggtttagcgattggaggtaggatgtgggtgctggtgggttgaacagagttatgagtgggggtgggtggtgtggtggttaaacttttacataggtgtcaggaacgctgatacggtggcattctgtggtagaagtgtgtggtgttgtgacaatatttctccgtgtgtagtgttctctccacctcttatgtgtggactgaaaggggctccttttaaaaaacaaaaaacacaacaaaaaaaacacactctcgagggnggccctctctcataatatgtgcgcgggtgtgcgcggcaaaacaagagacggtcatacatcgagaacatcgtgcgcgccaaatgtggggcgtcaaaaagcgcggtgtgttcctccgtgtagaacccccccaagcttctttctgttgtgtgtcccacacaggtggggtgtgcgaaacaactctcgcgcgcgggggggtctctcccctaatataatgtagcgagcagcgcgcgcgactatataataaattttcgcgagaatataaacgcccccaggtgtgtattaaccccgccggcggggccatattataaagagagacaaccacggggggggcgaacaacaaaacagtnctcacaacccaccacgacgcgggcacagcaccactctcacacacaccccccgcgccgcgccactccaacaatacacgaccacgcacgagcgagcgcaccatactatacaaaacgttgaggcagcaccaccacaccaaagcgggacacaacaccactcccccagcaggaggcgaacccacccccacacagtcgaccaccaccgggacgccagacccaacgaacaaccacagtagacggagctgagtgatgtagctacanccaccacccaccacacaaacagaaacacaaacacacccccgacccggataccaacacacaccaagcaacgagcgagtgtgcaaacagtgatagtatagcaagcgcgaccggcacacaaccaaccagacaagcacaacctcacacgccccacacagccactgctcataacacgcgaccgacatgacgcagggaatcaacagcctgcgggtacactcctgacgcacgccagcgaacgcacggcgccgacaacgaaactaacccaacacagatgctcgcgcggcagggccccacccaacacgagcgtgatcaccccccgactgaacatagaatgaggaggcccacaccacagacatactcagaaaaacaacgccagcggaagcacaacgacagccgcgacaaaacaaatcccccacatgacgaccacagcgaagcaacacccgcggcgtaaccacacccgaaagtggagcgaacgagacccaccagaggacaccagcacaagcaggaagtagtctaaccacgggcgagagcaagtagcacacacatagaaagaccagacagcaaccccgacagaat

SEQ ID NO: 640222 - DNA, 1195 bp, Homo sapiens
  misc_feature (478)..(478): n is a, c, g, or t
cattggcgggttggcaaggaacaaggcgtcctgtacgatagagtgcggtacatataggggagccgagatagtaagattggtagatccattttctaagagagattggtatgatggtgaagaggcgaccgtgcgtagtgttcgattatagagaacactattgggaaaggacgctcgtcggcaggagccaaggagccaaaattgcatcgtgatggtctcagagggttcgtgtgtttcgaatgtgagtcttgcctgattttgcatgaagtgatgaagttggcagttctaggaaatattcagagtcgtgagttacgtgtaagggatgtctcatgggggtacagaagagctgcgctgagataatcgttccatgggcagtggaagtctatacccggtgaacaaacatgatagttgcatatgtgtgtcacaaaaaactggcagacaaatgatgtgaatgctcgacgtgtggactggtcataggacntagccgaatggctgtaccttgccattcgatcgtgtgtctgtggttggttttactaatacaaatcgcagacaaatcagagtacggaagacctcttatgctcagtgaccaagcaggtccgccaaagtccggaagaagatgatggaaatcatgagccgagaggtgcagacaagatgacttgaaacgaagtggtccactagaattgattccagacagcattgtggaacagacatagaaagggcttgccaaagtctatttatcctctccagtgatgtcttcggtccgacaacgttgaaacattgttgaagcaaggcgcaagtttgaattggggaagagtcatggagttccatggtgaagcagaagtctggagaaggcatgggacgagacagtgctaagttgaggagtgatgtttaagcatagcgagaattgttaagggtcaggaattttgatctggtgcaattcaacaggtgcctctgggcgtaaatacgaaagaacctcggggaccaagacggggtcgaaaaaagggcacacaatggcacaggcgacgggtaccgcaccactctgacaaggggaaaggggggcccgatggggccataagcaacgggaccgaagcgccaacgaacagaggacaacgagaccaaacaaggggccacaggccagcgacacgtggagagactattcgcgctacacaagccagcacggcgcggatcaagagaaatg

SEQ ID NO: 640223 - DNA, 228 bp, Homo sapiens
ctgaacagaaaaggcttggaacagaaacttgatacggcgaggagatggaggggggaagagggtgcattctgatcattataaagaatacctgtcagggctctatcattttctccctttctctaatcatccagaatatggcgggtggcccagtgtacaacagtatcatgctaatattccatttgagcgagagtccaagatctttggccagatagcgcaattctttcacac

SEQ ID NO: 640224 - DNA, 169 bp, Homo sapiens
cttagaagaggcacgataggttgtcttctcagtatggtgttccacactctagaaagtcaatcagtcttccaggtgttgcaatacagatttccacagcctctctccaaatcacgtatttgtaggtccgcttaggagcaccaccagtagatacaacgtagacttcaagtcg

SEQ ID NO: 640225 - DNA, 1601 bp, Homo sapiens
gtctaggagaattgtcaaaaatatagaccaatgtatcaacgtgacgtgttcgagggctggcctgatgcttataagtgtgactacccggaaagttatagaggaaccctactaaaggactttcacatgtctgaattatcctgcaacataactctgctgatcgtcaccatcgtagccaccatgctggtgtaggctgtgactgtgacctccctctgcatctacttggatctgcccgtggtatctcaggatggtgtgccagatggacccagacccggcgcagggccaggaacatacccttagaagaactccaaagaaatctccagtttcagtgcatttatttcatatagtgggcacgataactttctgggtgaagaatgaattattgccaaacctagagaccagacggtatgcagatttgccttcatgacgagaaactttgtgtctggaaagagcatagtggaacatatcatcacctgcattgagaagagttacaagccatcttcgtttgtctcacaagctttgtacagagttgactggtgcctgactgaactctatttggccattcacaaatctcttcgcatgcaggatctataggtaacctggattgtgggaacccatcagaagctccaatccatcacgtttacaagcccacagcgtcttgccaggcgacttttggcatgaccaggaaaagcaaggtcgtgggccaaagcgggttaattatcgagacaccaacaacacccatggacaacccggataccctcggaccgcaacattgtcatcaacaacgctagagttaatttacactgcttcatatattacttattttgtgtggtttatccaaaaagcgcagcagaccaagccccacactacaaaccgctacctaccacctgcactaccctaaccacaactcctaccctacgaccagccacacaagcaccgcaaacctcccacaacacgctcaattcccccaaccactaccaaataccacaagcagtactcacacactccatcaacgaacccagcacggcagcgtaggcgggaggatagagtaacgagtgtagagcggagtggtagcgcgagacgagtagaagtacgcaggaggagctgaagaagcggggcggcgtatgcacgagaggagacagatcgatgccgctgctgagctcggtgagcggaggaggcagcaaggcacacgtggatacgagtcgatagagagccgctaagacaagaccagacgagacgcgaggagagcgcacagaggaagaagcagcgagcagaagcggcagtggcgcacagaagattccaaacggtggtgagctgacgcggtagccgaagacaggacggccaagggccgcacgagcgcagccgcgtcgcagggcgacacgtgcgtaccagcgctccagctctgacgcacacccagacaggacgagacaatgacacgtcgactaacgatgcgtagtcgcatagacatgccggaagcgcacagcgcgacacatcgagcgatgcgatgcatgaagatagagagccagcatgagacgacccagaacgagggccacgccgccgcccatcgcccgcacacaagcctaacgaacgagggaaagacacca

SEQ ID NO: 640226 - DNA, 404 bp, Homo sapiens
ggccccgtacccctaaaaatctcctacgcggaagggtttggtttaccggtgattgaagcgctgagcgtcggcacacctgtggccgtggccagcggtacctcgctggatgaaatcaccccgccgtcggcgccgcggttttccccgaccgatggcccggcgttggtgcaactgatgctgagcctgggcgagcgcagcgacgagtcttctgcagaacaacgcaagcaatgggccgaacgctacaacccaaacgcctatcgtcggcgcctggccgaactgatcgaggaactgaaatgagactctccctggcaagcctcgtcgccatcctcttcggcgtgctgtttggtgcagccgccctggcgctgtcaccggccaaggcctttctcgctgtgatggatttttagggg

SEQ ID NO: 640227 - DNA, 163 bp, Homo sapiens
tgggccgtcattgagagtgcccggtgtctgtgcaatatgtggtgtctgtggtgtgtgtagcgtgtgcacgtgtgtgtgtgcagtgtgtgtggtgtgtgggtgtgtgtgcacgcatacatagtgtgtgtgcagagtgtgtgatgtctgtgtgtaggtgtgtgtg

SEQ ID NO: 640228 - DNA, 1505 bp, Homo sapiens
  misc_feature (195)..(195): n is a, c, g, or t
  misc_feature (436)..(436): n is a, c, g, or t
  misc_feature (1505)..(1505): n is a, c, g, or t
ggcttcgagtcagaccgtcttgtctgtgaccagggcttgtaaccactcaagtgaccagtaaagcttatgcccgctccgatgagattccacaagtgattccagcgtccttccgtcagtctaatggatatgttgttctaaccgaactgacgacgaaagcactactttgaaacgagtactcatcgtagatgttaatcnacctttccgatcgtgtatctcgacgatcaaccatggtgcatgcacacagtacggcagcggcccattgcccggcacgacacatgatctagcttgtctgtacttccgcagagtctttgtgcacccttgtgtacgctacgcaaagtcttcattggcttgcacattattctgcgcaggggatcccatttgcgagcccccacaggacgtattgttcggcttgttgagcgaagagggccttgcgtcngtagttgcacccttagcattcgtgcagtcatttgacccccttaggacacatccggggacccgcattgggtacgaagtggccttgggagaggcaaaacgaatttccgaagcgccggtagttgcaagattgcctacctctttgtgaacgcgtctttccgagcccgtcgctggagagatggcgatgaggcccgaaagggttcccctctgtcgcaagggaccagccttgcggaaagcatattggggcacacccttccacattgcatgggctccgcccgcggaccggaagccctagggggggtacgaccactgcccattgacccgggagcgcaatctcttgtattgtatgtccatttgtctggcgcaaaagggctgggttcgtttacccccggtaatcgcccgacctcctatatgtcactcattgtccctttcccattgctttagccctggctgtggccagcccgggtttctttccacattgccttgctttaccgaccaggccccacggtgggatctccgatggcgatgggtcggggagccttggattgaccacaccattcccaattgcggattgccccttggcgtcctgtgaccgcacaaaatttgccccttacaaacgttgtcccccacgcggggcaaggcttcggacactggaaatgcacacaggccgtcgtttaggaggctcagcagaggaagtccaaacgacgttgccaaggatttggggtcggtgcgaaccacaggccttgcgccaaagcggcgctgaacgccacttagttgtaccaccgcaattggggcacgagccatttttttcctcccgcaacacggcgttgaccccctggagagccttctagggccacaccaccggacttttctcggacctattcgccggctagtgtttgacacccccacgtcgcattttggagttgggggcatccccgagggtaaggactggccgagggcttccattttacatcggggctcgtgcgcggtagacgcttgcgttccaggggagcagagggcctcatacatcgcgggggcggacacactgcgggtgcgctgtgcccaagcgcagn

SEQ ID NO: 640229 - DNA, 236 bp, Homo sapiens
gagtcggacctgggtcacaactctcccctcctgcatccatgatacaaggtggatttcttatctaaaatgcttgggaccagaagtgttttggacttcaaattttttcagattttggacctttgccttacttaccagttaagaatccctaatttgaaaatccaaaatgctccaataagcattttccttgagcattttttttggtggtcaaaaagcttcaaattctgtgcccatttcaa

SEQ ID NO: 640230 - DNA, 195 bp, Homo sapiens
cccgactagcccgacaggcaggagatctactcaaggagacagacatctccaatgccagtgaagggcgacagctgcatctgaatggctcacttgaaggcctgccttactttaattgtgagcatgctgcagcttgtctgggctagtctggggtgggtacctgagtctctgaattctgtacatcatgtgtctatagct

SEQ ID NO: 640231 - DNA, 190 bp, Homo sapiens
taggatataaagcagacccccacccccgccagcccacgcagtcagtgagcacagcaggacactaactagtagccttagctgtactagccggacctgtgacctactacagggaaatgaggctatatgccgcgggatcctactaaaagtacgacctagcagtgcatagcaaagctataggcacttgtgccgt

SEQ ID NO: 640232 - DNA, 107 bp, Homo sapiens
aggatcccagcgcaagtctcacacgcacacactacatgtctcactgccagctgggatgagcccagtagccaacaggcatgcagcaggacaaggtgagagttgcggtg

SEQ ID NO: 640233 - DNA, 868 bp, Homo sapiens
acgggtctgtcattctcttggctttcaacacgtaagtttcttggtacggaaacagtatccttgaggggacatcttcttcaccgaggtcctccgaacctgtcacacatcctggattttccctctcccggacttctgtgccaattccctccgtgtgaaccccaatcatttctcaggagaccagtcatcacttggctttccttgggtacctgcctagtccaccagttaattgatgagattaggctctcctatctttgccctaaacctatatcattgtagcctttcctcagtaattcgttcaccaactagagttccccacccgatcgattggaagtgccaatgccctggtgaataccacgttcgtagggtactcaatcatggtcatcccttgacaaggtacttctcttataaggccgtgacttcgtcattcttagggggtgactgtacctgcgtgtaacagaacccctggcggaattggacttgttggggcgttccctcgtgtaaacagaggagggttggtaggccccaaacgtttcttatacccggcgggacaaagttggtgacctgagggggatggatacacatagcagaagggtggcataaccgcaaggtcggatacattcccttgtatccgacgccgcagcctagttcaagcaggtggtgtcgcgttccaggagaacttccatcggatgccatagtgtggaaaatttccataggtaaacgccccttcgttaggtcaagccaatgtaggtgttgacggggttcacgaatagcatcccccaaataacgccctgggtgtaacagcacacttgtccacttgtggaccctcttgcgaagcacaacgacgacctgtggagccatggagttcaca

SEQ ID NO: 640234 - DNA, 363 bp, Homo sapiens
  misc_feature (97)..(97): n is a, c, g, or t
cgttgaaaagtgatcaggttcattttattgactacacagaagcaattccattttccactaacaaaacactccaggttgattaattgtgattcagggnctccacaggaacctgttccttatttttttggatgtcattgtttctgacatcacaccttcctagacaggtatttctggaaaaggatctggtaagaggatgaatttgggtctaaacaaatgcccatggccccggaagacctgtcggggccaccaagttagtttctgtggcaaaatttgatttcttccatctcaccactattgtaactgttggtgttatgttaccaggagccccacgagaggttgacccatcaaggtggtgcctgttta

SEQ ID NO: 640235 - DNA, 169 bp, Homo sapiens
gtatattccacagtggacaacctagaggaatgataactgataccactctagtgcctctatcgtgtgattaacctctctcttagatgcttgcatcacctatagtctaatggctttcaaatgtaattaccatttgctaatggtgatcttgccacatctggcaagtagacgt

SEQ ID NO: 640236 - DNA, 346 bp, Homo sapiens
  misc_feature (247)..(247): n is a, c, g, or t
gtgtgtggctagagcacatggagcaccatttgcaggatgcagggagaaagaagaacccatgagggaatctcaggacaaaggcaggtgactaaggtgcaggatgagagctgggagagagactggtagtgtgggagagtgaacagtctcactcaccttgagtggcagcaatgtcctcaagtagtcaggttttcagtaaggtaagaaactgaggatgttcgtactctgtgaggacagaggtgaccttgtntatcagggaaaagggttccagaaagccctgtggccttccttctgtgttcctctacctctttgaacttaccctttcggcgaaacatttgtcacactgtcc

SEQ ID NO: 640237 - DNA, 536 bp, Homo sapiens
gacctagaggatcccgagtgctcttcagaggaagcggaaaccagtggccacagcgtctttgtctagcccctagctgcagtacacataggatgcagtggagcctaagacacacccagcatcacaagcaacagtcctgtaaattgagccgtagtaaatgttgagacagcgattacaaggtaacaaatatagcagagtatgaccttcctgtcctaaattgctgccaccatattccactatttaaaacagagattcccactacatgatcttctgatcataaagaatccactgctgtgtttgaaagaggagttgtttctgctggtgaaaggactgggaatgtcgatcacgatatgctagactatcttacacaaagtccaacattcgtcttacagacagacccattcagctcctggaggctgaagtcctgctctctagctgtatccagggctctcttcttgtcggcatttgaaaaaatgtagcaatactttcgtctgtggcttcctctgctgcagaggtcctcaccaagcattcagaactgt

SEQ ID NO: 640238 - DNA, 483 bp, Homo sapiens
cggcctgacttggaaaaccttgcgactgtcttattagtcatatgagatgtgagatatatccatatgtactgacttgctccccttgatgataatgatgctgagcatctttttgtatgcttactggccatttgtgtatcttctttagagaagtgtctatgccgattctttgtccatttttcaagtgggctttctttggggtattgagttgtaagaattccttacatactgtagatccaaatcccttaccagacataatttgtaaaaattttctccaattgtcttttaagtttcttgatgctgtcttctaaagcacaagttttcaaatttgacaaagtccaatttacttctattttcttttataatgtgtgctttttgtgttacatgtatgaaaatattgactaattgaagttcacaaagatttatatctgtttccttctcaagagtattatcgttttggctctaacatttaggtctttgatccgt

SEQ ID NO: 640239 - DNA, 787 bp, Homo sapiens
  misc_feature (378)..(378): n is a, c, g, or t
tgacatacctttaaatgtctccttgatgaacagaatcatggtctttaaaaacattttcatgggtgatggcattttcaagctctaaaggatggaaagataaatcttcacgttaaaggtaagagtgaagtatctgctcttgggttacagaaccagatagtactagaactaagattacagggtaaagctgcttttatcttttttctttttctttttcttttttttttggacatggggtctcacggtatgggcccagggtgaatgcagtggcttgatctcagctcacggagcctcttgcctctggggctcaagcgattctcctgcttcagtttcccaagtattgtgggaccacaggcgcacaccaaaggcctggctaatgtnggtagggttggtagagaagggtttcaccatgtgtgccaaggctgtctcgaactcctgagctcaagtgattcacccaccttgtgctcacaaagtgtcaggcttacaaggcgtgagccattgggccgggctcacgaggtagggctcctgcggggggtgtggaactaacgggattgtggtaaaaaaggccacaggtgagggcatcaaaaaggaacactccaagtatgcctgtagaagggatactccgtgttaaaggtccaaattgccgccaaagatgttcgagtgggccttttgggtgccttgtgtccttatgtagatgtgtatgaccaggggaggtgctcttgggacttccttgggggggctgattggggttacccggctattcattttaaccttttctggagcacaatgg

SEQ ID NO: 640240 - DNA, 1434 bp, Homo sapiens
  misc_feature (354)..(354): n is a, c, g, or t
ggttgcccttgtgtggagacacatttatatattaagtgccgacttccctactgtctttcaaatctttatacatctattctttgtacacctgtctcctcacgatatacatatcaaccttattctgaatatcacaaggtcacattggtagtactcttaatggcttaccgattacaacataccatattgtagagtgagtgagtaatacttttctacattatagtctcagatggctaacggatactagtggccaggaattcatacactagaccactagtgtacctcacattaggtgtttcatactgcattattactatacactatttacttctttacctgttagcataatagagacantagacagcatcgtttcttgactcaccgatatctctatgaattctatatcaacattgtttttatgaacttcgcccaaagctagcctttacctagtattggcataaacgcaacgttggtctatcactgtagttaagttagatgggcaattgtggcttcgtataagacgattacaacatcagcgaggtagccatgaagcaaactttattctattttactcattaacgaccatcaaaggaattacacttggacagtaaattgcccagtatatttcctgatttagtcgcccagtacggatggttaagcctgtcatttcccttgacagtccccaagatacacacgggattggtcccgtcgggttactttgggagtcaaaccttatacaaatcttccagttgcttactgcttttagttacccttgcgagtccgaaagtccaaaagggtaacagtgacaatcttgtggtgcaccagttcgtaagacggccttagaatgttgaacttgccaaaattggctcgcgaagggcagctgactgcgtctacacttaccttcggttcacgcccttaaccggaattccgattcgccagcttgttgaccttcgttacaggttccggcggctgcgctgcgtttactttccatcattccgccgcatctaaactcttggtttccatcgcggccacctttccggcagtctgcaacctgtcctacgttcgccacctggggttttctagccagcttgccccctcacttcgggtagactcgctgcggcatacacttgtttagtttcgccgcctcagtttaattacacatcggttctcttcaggcggcccacccttctggggggcccccccgtctccgctactgtggcccccctgtgtgtcgctcttacggcccccggcagttcgttcagccactctccgctgtgcgctatcgaaggatctcggagaagacagagtcgctctctccgcgcagccccgtgcgcggcctctggcacaggccacgtcatcgcgcgcgcggcggctcgtacgccgtgttgctccaccgctctctcgagccgtgtctcgcttgcgcaatggccactcggc

SEQ ID NO: 640241 - DNA, 299 bp, Homo sapiens
ctcttaaatggcttattcttgttttcctggtacctgaaacactctaggttttaaatgagttacctatggaaggaagacgaatatgtgagaactgagggataagtaagtggccatattgtcagtatacctttgaattaatttatcgaggaaaggaaataaaatgttttaatttgtttttttcttttttcactgctaactccatgaaaggctttaaatcttcattttctcagcagcttggaatgagcactgatagggtgctgctcagtctgctgtgccttggggaaaagagacaatgaaaa

SEQ ID NO: 640242 - DNA, 762 bp, Homo sapiens
ttttattatttatttatttattattattatttctttgagatggagtttgctcttgtgcccaggctggagtgcaatggtgagatctcggctcactgcaattctcggcttcccaggttcagacgcaattctcgtgtctgcagactacgtcgggaggctgaggcaggagaatgcttgaacccaggaggtggaggttgcagtgagccaagatcgcgccactgcaatccagcctgggtgatcaagtgagactacatctcaaaaaaaaaaaattatttaattaaattagaaatatatttatcacatattttgacaagggataacaggagataaggctcggtaacacggtatttagaacaagtggtctggacaggtcctaaggtgctcagtaatggttatacatcaccatcgttggtccctggaagaaggggaccatcacatttattctggtagccccatttaatccccttggcttgggacggtactaatatatatgtgacaggctttacaaaatttccagggtcctctaatatttattctggtggaggagccaaacctgtgaatatatgggtttgttacaatccttaggtgaattgacatttctttcctccatacattcattccctgtggaggagggagagcaactaacctggtgaggagttggtccccaactgtgcccataaatggacgtcatatcctatagacctggggacattcctcgacttcagaaaacgagaatggaggacaacaaatttaggcgggcaaaat

SEQ ID NO: 640243 - DNA, 127 bp, Homo sapiens
gatctataggaccccagttgtctcaagagtaattaagatattattgtgtgtttctggtgttttgttctggtttgctattttcccctatagaaacatggaattgttgctaagtatttcatgtttaaaa

SEQ ID NO: 640244 - DNA, 103 bp, Homo sapiens
tctttgaagagaacgaggtctggcagctctgattgtgggtggcatcgtgggcatcctctttgccagtcttcctgatcctactgctcatgtaccgtatgaagaa

SEQ ID NO: 640245 - DNA, 475 bp, Homo sapiens
  misc_feature (108)..(108): n is a, c, g, or t
  misc_feature (111)..(111): n is a, c, g, or t
  misc_feature (448)..(448): n is a, c, g, or t
ttcagaaaccgaagctgaaagactggcgtcctcctgggggctttattctgggatcatgggcacttattatcatggttttcgtgaaagcgtggggggtataaacatatnaanttcattttttaaagtgtatgatgaatgaagaatgcatggaggactgcaaacttggataataatttatggggttatatatttttaaaaatggggttctcttgtatgaattggaaataactataaacgaaaccgggggggtggttcaactattaattttataacttaaagaaaaaataattgtaatgcaactggttaaggggactaaatatattccaggtttgtatttttggggttataaaagcgagtgagacaagatccagaatacatgtgggcttggtttgaaaattacggagttcccccttatccccctttgatttaggaaaagagaccatgtggnaaaaactttaaaggtctcactaacagg

SEQ ID NO: 640246 - DNA, 126 bp, Homo sapiens
  misc_feature (17)..(17): n is a, c, g, or t
  misc_feature (50)..(50): n is a, c, g, or t
  misc_feature (96)..(96): n is a, c, g, or t
gatcgggagaccccaantccccctgaacaatccttttcagtattatattnttattattattatgttattattacactgtctctttgccatcaaacngaggcctgtgaaatacaaggttcccttctg

SEQ ID NO: 640247 - DNA, 446 bp, Homo sapiens
  misc_feature (186)..(186): n is a, c, g, or t
  misc_feature (194)..(194): n is a, c, g, or t
  misc_feature (224)..(224): n is a, c, g, or t
  misc_feature (232)..(233): n is a, c, g, or t
  misc_feature (236)..(236): n is a, c, g, or t
  misc_feature (243)..(243): n is a, c, g, or t
  misc_feature (262)..(262): n is a, c, g, or t
  misc_feature (310)..(310): n is a, c, g, or t
gcacgaggttgaccgcagcgtctatcttgaatgcagattatacgaaaagttctttttgggaaactatggttactgactgtttgaatcaatacgaagaaaaatatcttttacttagagtggaacagatgtcctctcttttgatactattttttgcaagatcagatagagctatacataaagagtagnggtctacnaaaagactgggttggtggtatactggaaanaaggtgcnntanccattanattcgattatggggcaacntcattctgtttcgttaatacacatttatcagcaggtgcgagtaacatngacgaacgtcgcaatgactacaacaatatctacaggaacataacctttccaagatcaaagacaattccacaccatgattcgttgttttggttgggtgaccttaactacaggataactttgacaaatgatgaagtta

SEQ ID NO: 640248 - DNA, 897 bp, Homo sapiens
gaacacattatctggatgttggtaagatgcctgagaccaggccaagtctgttcccgtcccgatagaagggctccatagaaggcagtgaccaataggcgcaggtagacgaagagatggtcaagaagcgcaagcgcagccgcgaggagagttacgtctgtgtacgtgtccaagtgtgcttgaaagcaggtcctatcccgactactgtgcaatcatcttccaaggccatgggcatcatgaattctttcgttgaacgagatatttgagcgcatcgcgggcgaggcattcccgcctggcgcattacaacaagcgctcggacatcacctccaggcagatccagacggccgtgcagcctgctgctttcccggagagctggacaaagcacgccgtgtacggagggcaacccaaggccgtcaccaagtacaccagcatccacagtaaacatttccaagggggagacaacaagtttaagacatatctttttccaaacagtcgtcaactgctgggacaactgttatcatcttgcaaataagcaaatgaaaaatggagttgatccttagaagaagataaatggagcgtattattgaaccaatcacaggaaggacaaaatgaacaccttggttgagaaaaaattagtacttattctatgcattaaaacgtatttaccaaatacttcctttcccgtgaaaaacatttaatggagcacaagggaaaaaccatagaagaacaaactataaaaattagcccccgtggtaattctcagcaattacttgttgaataagtgtagtagtgaagtattataggcgcgattgatttactttgtactcaatgatatttcacgacattagggtattacatatattgagaatacacattagagagggtcatggcattaaattg

SEQ ID NO: 640249 - DNA, 124 bp, Homo sapiens
ccatgattaacacagccaacagccatttacgtacagtcttatagggaacagccatttagggaacagccatttaggtaacagccatttaggtacagccatatataggatcacagccatataggga

SEQ ID NO: 640250 - DNA, 1049 bp, Homo sapiens
tgttaaggttggcttgttttccaccacactactcaactgactggtgaacagttcgactaactgcatagccttgcctgacccacatgtcccttactctcgcgacatagacactgtcgggatgagttcctctcccatgtgttggcaattgcccctcctatgactaggactatctaagagagccctaacaacttgcctactcatatggcccccttagttgaggtggcgacgccaactagatgcgagcacgacttctctgttcgcccatcagtgcctcctcataccgtgtgtgtctgaccaatcggagatgcatggccacatctgggatgaacaatatcgcatgcattgctgcaaagagaaatgacattataggacctaggttgattgtccggaccttttagtgtcacaccgaaaaccaagcatatttgttcctacccgcgtcgctatgaaaaaaaggtgccttgaagacgcgtcacgttaagtgggaagactcacaattcgtcttaactacccctccacacactcgattccctagaaactagcatcgcgttccacgggcagtggagacacaatggtacctggaattattgagtagaacagaggcgctcgacacatagcggcctataatgcgtattaacagactagcgcagaaaaggttcaagagcttggggaggacaccctgggcattagcaactatgtcccttggagagatcagaatatatgacgctgaccattttcaaggtctatgtccaacaagtactagggccgatgggccggcttggcccgacctcgttgtttgccatttacttcaatccaagcgtactttggtgtcaggctgagatggcgcttaccgtgattcatcgccagggttcgaacgacgagtccgcatagaggtcactccctgcgctttagaacaacttagtgcaacacagcaatgactcttccctatctatcggaattgaaccaaaaagacattggtagggccgggctttgaaagggacccacccaaggaaaagccgggccggcgaagaattaagacacagttctaccca

SEQ ID NO: 640251 - DNA, 444 bp, Homo sapiens
  misc_feature (225)..(225): n is a, c, g, or t
  misc_feature (270)..(270): n is a, c, g, or t
  misc_feature (326)..(326): n is a, c, g, or t
  misc_feature (371)..(371): n is a, c, g, or t
  misc_feature (428)..(428): n is a, c, g, or t
ggcccgtgcaatacacagatataggatgtaaaggctgtgatcatagaggtacaacaatgaagtgtagaaaatatgatgtacattgtgatagatgatcattacagaagacaagagtgactgcagcagagatgaggacagtcctgacgaatgaaaaacgtgtgctgtggctgaggatcagcgtatgtctcagaggctgttgcttttggtattcagctgagagtaggnaattgtactccagagccaagtatggtaaagtggccgctgagacanttttgtgaaaccatgagtggggctgtaggttcatggtcctttcaagcctatacganctcagagtgagaggggtggtggcatagtttggatctgtagggtcnatgacatttctgtagttctttcaaagtttatcacgcgatggtatctgccagaacagnttcagtatagatgtga

SEQ ID NO: 640252 - DNA, 746 bp, Homo sapiens
ctgccggaatcttttgggaaatttcccccccctttctctgtgccgtctatccctggaaaccttttttgtgacactgtcacctctttggcccatgctcaaccctaatcccacacttggcgctaaatgggtgggtcacttgagccccagagtttgagacccgcctggaccactctggtggaaaaccctctttcccaagaccatacccaaatttaggtgggccctggtggtacgccaacttatggttctaactactcaggaggcttagatgggaggatccattgagcgtggaaggtcgaggctgccaatgggctgtgatgaccaccccctgtaactgtactccagcctgggcatccagagtaagaccccgtcttcccaaaaaccccacccaacccaaaaaaaaaacgccaatctatcactgtcccttctcacctatgttgtgctcctgtagcaccacctacactgtgtctctcatacttatccgatttccttgtaaatgttttgggttttctttttcccttttgcggggaaggatacataccccactaaatagtggtgttctctgggtagtggggattgtgatggaaggcttcttgtttctacctttattatttgaatattttataatgagcaagtattattttttgccgtccaaaccatttttaaagaaacatactataaacggtacttaatggccactaagtatgtcccttattttcatactctaataaatgattttctccagtcca

SEQ ID NO: 640253 - DNA, 594 bp, Homo sapiens
cctcccaaaaccgtggagtcttcttgaaacccccaatgggcctttctttcttgagaccactctttaccccgttcttccccccccatatgcacaaacgcggtgtttcctcacccccaacggggaaccccacctgctcgatttaattgcaaagcctctccctcccggtgcccgtcccccacaggacgataactctctataaatcttgcgcccatgtgagacaattcctctttaaaaacaaatacagttataacaccagcctcgtaaaaaaatcttacgtgcctaatatcatcacttcttctaacaacctcatattctgccgcttcttctatgatagccgatgtcgtcagatctctcaccccctcacccctctctaaaaatgatatccccgcgtcttcctccacaaaaacctgctgtccccaatagccccgtttccttctttaaaataaagaccacccccttcgtattctttgaaataagaatgttcggcacgcattcttatattagacaaaatgtatgtcgcccgcgagactaacaacacagcaatgctgcaggagacccaaaaaaaaaaaacgaaaaacccggtttaaaaccaca

SEQ ID NO: 640254 - DNA, 910 bp, Homo sapiens
cgcgatgtttcacaccatgtaatcccagcacttcgggctaggcagagagccaggatcacgaggcgagagagatcgatatcattgtgttaacaactgagtaccccggtgtctgtgatatcttgaagcctcctgatttcatgcagctcttgtgtgacagtgtgcacgtttttgccaagtgtagtgctacacagaacttagatgtcagtgcactaaagacatactccaaatctttccaccccaaatttatcaaagacgtgagagtgattgaggagtggaccacactgcgccaacacaggccctggttgtaaagctttcttgatggaagagagctctgtctggaccccaaggaaaaacgtggtgtgcagacagggttggtgccacaaaagtttttcgaagaagtggctgagactccctacaactaggaatccattctctgttggtatccaagacatcagtgacagatgccagtgaaacttcaagcaaattctacttcaaacacttcatgtatgtgtgggtctgttgtagggttgccagatgcatacaagattcctggttacatttgaatttcagtacaacaatgaatagttttcattggtcccatgaacttatccagaaacatactttatatgttaaagtattattaatttgaatctacaaaaaacacaaataattttacaatttagggtcttcctaatatgccgggaggattttcaatgccaaatttgaggcaggcgcaaagaattcgaacttattcggaatgaatggttgctcatgtgatttggggctccttaccagttggcacaaatttgcgcaggccattgcgggagccggctttgtgaactgtgccccatttggcgcgcaccagacttccacggcggttctatacgggagaaaacactcccggtggtgg

SEQ ID NO: 640255 - DNA, 312 bp, Homo sapiens
cgtacctttttttgccagctgtgtgtagggaaaggacatggacggtagctgggttgtgagttgaaattgacactttgggctggtatgttgtgtggtgatgggatattgacacgttgggcggtaagctgggtggtgaggtaaagtgatcacgtctggcggtaggctgagtggtgaggtgaaaggaccacgtcgtggcggtaggctgggtggtgagggaaaggaccacgtcgggcggtaggttgggtggtgagggaaagtgaccacgtcgggctcatgatggatgggattaatggcagcctgggctgacagaca

SEQ ID NO: 640256 - DNA, 210 bp, Homo sapiens
ggttagtgccaactcagcctggctccctggggtcgtcgctctggcttctgcagcagtctccgtgtccgctccagcggcagtggtggcctgggtggctgcatgtggagagagctggctttggtagccgcagtctgtatggcctggggggctccgagaggatctccattgggggcggctcgtggcctcgggggggtgtaccggagactcgat

SEQ ID NO: 640257 - DNA, 924 bp, Homo sapiens
ttgtgcgtcttggctctctccttatgcttgttgtctgtcgctcgcacaatgtgtgtgccgccgtcttggtgtgttaaccaacgtcgttgtggtggcgccaatagagtctgggctcggttgtctgcactataattttctcctgtgggtgctttagtgtgggttggcctagccacgccggtttttgcgccactttttggtcttcctgcggtgctgtcttgttctcacagagtgttgttcttggctctcctctggtcatgctttcgggtggtgtgttttcgcacttgctgcgtgctgcccaatatccgctcggctcgttagccctggtaggctgggcccacttgtgggtaatagacccctccgtgggtggtccactttgtgtagcgccacgcgtggttgacacacccgtcaggagcccatcaaagtattagtgtcagattgtcagtcaactttcgcggccggcacatcgcaagcgtgttgtccgcgagtacacacaggggcgtccatatttggtgcagtcttagagtgtcctctcggtcgctgcacgggcgctcaacggatcttcaccaaggtgtttgtcccttgggttgccgcccacggatgtgtacgatccgcgcattctgtccgactaatagaagctggtcgggtgcgttcgcaccacacagtgtgatcacaagctcgtgcgccagtgtgaacgaccacctgttgcgtgataatacgcgcgtggctcagtccactcgcaggttgacgccgtgtcgttcatcataggacgtgtcccctctctgctggcgcgcctctgtgtggccaatctggtgtgcggggtcctgccacctctcgtcgtgggcgtcctcccacaatgggtcgaccccccgcgctttatacagtgccccctaagattttaacttgatccgtcccccctcataacaa

SEQ ID NO: 640258 - DNA, 124 bp, Homo sapiens
  misc_feature (81)..(81): n is a, c, g, or t
  misc_feature (122)..(122): n is a, c, g, or t
tcacaatataataggtatgctataaaattcaacacactctaaaattcaaccaatttgttactttactcagaattgtgaggncatcaatacacaacttatttatagaaaacttcaattacacnca

SEQ ID NO: 640259 - DNA, 114 bp, Homo sapiens
cctgagttctctccctcacctggcatatctaacgaggcctccgactgtctatacagcttctgtaacatcttgaaatgcacctgccttcctctgcctctctcgctacagcagcca

SEQ ID NO: 640260 - DNA, 131 bp, Homo sapiens
caaaagtgcactcttctatatctacaaatcaaaggagaacatcctggcctgtccattggtgatgttgcgcaagaaactgggagagatgtcggaataacacatgctagcagaatgcacaagcagccttatga

SEQ ID NO: 640261 - DNA, 842 bp, Homo sapiens
gtcccatgccaagaaaagcttgttttgaaggcttcttctcaagagttagcaagattttagattgtacttcaaatattggggcctctctttgcaatatgtttgcagtatatattatgaggaaatgtagtagagagtttaacgattaaaatttaatcctagccaattaatatatatttcattaatattgctgtactgcagtaaaattattacagatacctacactaaaataaagagccatccctatttctatgtttagaaagtttaagtttttattataacataaatacatgttaaaaaatattgaaagaacaataataaatatgaaaaagtctatcattctgaaataagcactgttaacatttggaatgtttctgtcactcttttgtctgtcctctctcttgtgtatacatgcatgaaattattcacctacataaaataaagattattcattcttattaaaaaaaaaaaaaaaaaaaaaaaaaaaaaaaaaaaaaaaaaaaaaaaacaaaaaaaaaaaaaaaaaaaaaacaaaacaaaaacacacaaaacacaccaacaccacccaccacccaccacccccgagacaaagcaaaccaacaagcatgccagaccagcggcaccaaccacaggacgacacaggcacgcaacaaacagaacgaggcaagaagacaccacgaagagagaaacaaaacaaaacccggagccaacaccaccaaaaggccgcaagacccaggaagacaccgaacacaaaaaaacacaacacccgacaccaccagcccgcacacgaacccgcacaaagccaccccacgagcgaaacagccgcacacagcggcaccacaaat

SEQ ID NO: 640262 - DNA, 97 bp, Homo sapiens
tcgatacgacttttctttttttttccttctcttttcctttcctaccttccttcctcccttccattcccccttcccttctcccttctgtcgtcttctc

SEQ ID NO: 640263 - DNA, 198 bp, Homo sapiens
ctgtacataagatattgatgtcttcttctgccaggcttgtatgagacatacttctggtgggcactgtgcgagaaacttgaggatgaaatcagtgagctgcatgcactataaaaggcatggcctgtactcctcacttgagtgcaaggtccatcgaaccaaagccctgttctagatcaatcactccatgtacagcacagg

SEQ ID NO: 640264 - DNA, 704 bp, Homo sapiens
tctatgaagaaaatttttacaaattgcttgggcggtgacgataacgtggtaaatgtggtcgttacctaaaaggttgccgggttggcccagctcggttcgaataaggaggtttagagctggtgcctaggactccagctcagtgcgccgaataataggtatagtgtcccaagtgtcttgggggttggtagagaatagtcaacggtcggcgaacatcagggggggtgaggtaaaagggctgagtgaagcatgggacgtgtaaatctaaagacgaggggttaggcctctttttaccagctccgaggtgatttctcatatggaattggcaaattcgaagaagcagcttcaaaccttgcgggggcttctcccgacctttttccccgggcgggcgggagaagtacgatggaaagccagtggataaggggtgcttcagctgtaaactaagtgtcggggggttcaagtcccatgggtctagtaggggctaaaccttactaagggggctgattgcgcgtccagttgatgcaaaggggggcttggagatgaccccttaaaggcgccctctcagcctcctaatgacctcgggcctacctggtgattacactccaactccataaaggctctaaataataggctataaccaaaacttaaccatataccactgatggccgatgtacacgaaaaagcacatacaaggcaccaaaaccacg

SEQ ID NO: 640265 - DNA, 986 bp, Homo sapiens
  misc_feature (670)..(670): n is a, c, g, or t
gtctgacatgactatcctcatgaagattctctccgtgcgcgtgtacggcataacagcaacacgaggttcggagccgtagacttctgcgtgatgtgcaatcaatgagagtgctagtgtgttacgattgcttgcatgaaatggcgtgcgacatagagtagttagtgccacggatggtgtccagtcttcatcgctcatgggagaatgatggctatagacctatagactgattgtgacacggatcaataccactagacagagcaaatagtacgctgtgtatcgcacgtatagggcgcatcgcattagcggcatcgtatcaccatgttcgtacccgactcactttggggcagtagcgagatcacttagtgtccagtggccagctgagataatctagctctttctatagcctacgctagtcgaattggaaaagatgtagaacgagctagggggaacaatcgcgagctacaaaaagactcataggtaattgggtctctaaacttactaagattgcgttgaatcctagtgagggtgacagtcactaatcgatgggtttaccactctgagtctgtacgcgacggagacctggtggcagtgactacgcaaagtgaatggaatcctgcattgcccatctttgggggtacgccccgatgtcaccgaaagtcgtaaaggatcntaagaaatctattatgctttcaccttcctgaaagaattaagggttactacgcgtgatgatgagatattgcgtgagaatctaaatttaaccatagtgcgaatcgagtttggtttgatcctctctaaggcatcgaaaagaaattgcttgggatatccaaggtggaagcctaagggattttaaatggactgaccggttggtgggagggaccatatctggaaatcaggttcactacttagtaataatagatattgtaggaaggtgtgacccaaagtggtgccgtggacagtgggcaggtaataggcctcggttttccatg

SEQ ID NO: 640266 - DNA, 1616 bp, Homo sapiens
tgcaagagaccagtaactccctcacacggttcctcataggtcaacggcagtggctgaggtggcgcacatacggcgagcagggcagcagcagcagcagcagcagcagcagcagcagcaggcagcagcagcagcagcagcagcagcagcagcagcagcagcagcagcagcagcagcagcagcagcagcatgcagcagcagcacacacagacaacagcgcagcagcattcatcgtcgatgacgtgcgttcagtagtgcgtgcgcagcatgcgttctgcgagcgtagggggagcggaaccacacagcgcaggcgtagggcgcgtgcttgcatacgcagctagcaattgctgattgctgctgactgcctagttgcatggtcgaacgggcggcgcttgctgctcgcacgcgcggcctgctaggccgctagctaactcgcgcccgacgagcgatgcggcgcgaggtaggtcgctagctaagcagagccgggacgaggtagcaggcggcaggacacgccgctcgcgagtagtcgtcgatcagataagaatacgacaggcctgcatggcgtgacagtgctggcatagctcaaatcagatatagtaaggtttagattgcagtaggttcggttggtgtgagctgggctaggctctcggttttagtttcttagttatgtataagataatggcagtagtattagacttggccgatatgctattcgcagttggaatgtgcatggacatggcgataggacatggtccgatgctccgctagtagtataggcatggcttatgatgcgcagacgagcagcactacaactcaactccagccaagctcaagctacgagcttctgatatcgaccactgccgtactaatgcattggcgagtcgcaacacaccacatacaacaatttaacagatgcaatgaattggaataggaggcgactgagtggacactcacgagacgagcgcagagatggctacgcttcgagttgtagttgagaagacgaacagacaagaggtgtagatagacattgagcgccgagcgtgacaggcaccgatgtcaggtacatcgaccacgtgatgacgaccgtggggggagagtgctaacgataccgatagcgtgcgcgtcgcgtcacaggtgagaagcgagcgaaatggcgccgggaccttggactaggctatgcattagtatcagtgccccgagtcggctctagaggagagacggcataggtcatgactcgacatgaggctttggacttggcctcggcttcgctataccgtaggacaggatacagaacgagttgtgccatgtacactgggcgacgaatgtgatagactcgtctatatcattctcgattcagatacgatcctctcatctgctcctgtgcgtgtcgctgtcggagtgcctgtagtattgcgtatcatgcaccgaagccgacgtaggacgataatgacatatgctcagaaccacactgagacaacggtggctggacgagccagcaggtcgacacagatacagtatgaacgcgtgcactcataatcactccgctcgctcagagtcccgtccgtcagagcggattgagctggattgactgacacatatcatgtaactcagccagctaa

SEQ ID NO: 640267 - DNA, 276 bp, Homo sapiens
ctctagacggatcgggacgcttacctcgggagccttcacctccgggagccttaacctccgggagccttaacctccgggcagagggacagcgccaggccgcggagtcagcagttttcttctcagtgcccatgtgcaagcactgcacgagttttactgcacaaacgggcacatcaagtccagctcctcattttcaggcaggtggcctactggcttgtgtctcaatggcagggttcacgggctccctgggggtcaccgagctcgcaattcgtcacatcc

SEQ ID NO: 640268 - DNA, 667 bp, Homo sapiens
  misc_feature (135)..(135): n is a, c, g, or t
  misc_feature (365)..(365): n is a, c, g, or t
  misc_feature (468)..(470): n is a, c, g, or t
  misc_feature (497)..(497): n is a, c, g, or t
tgccccttttttttgcacaccgcgagtctttttttaaaagcctgtgtttccccccccttttttttgtgcattacaaaccaattaatgttttttccactgggtgggagaaatttgttgtcccccggcccacccacnttttggttttttggttttgcccccaatgggtgttacaaagccccgttgggggcccccccttgtccccgggggggcccccttgtgaggggggtttctttttccctctcgggaagaggtggggggacccccccagggtggcctttttttagagggggggtttttaagggggctcccagcccttcccggggggttggtggggaaaaaaattccccgggccccccccccacccnttttattaaaattttttggggggggggcggccctttttttttccccaccccccccggggttttttgggttttttttttttgggcccccttttaaaaaaaaaannnccccttttgttggggggggaaaaaaanggcctttttttccaagggggtttcttttccccgggcccccctggggaaaaaggggaggggggtttttttttggggggcccttttttcccggttttttttttttttttcggggggtttccccccccccccttttttttaggggccccccccttttaccccctgggggggga

SEQ ID NO: 640269 - DNA, 699 bp, Homo sapiens
  misc_feature (513)..(513): n is a, c, g, or t
attggacgttaaaacacgtgagtagccttttttacctgtcagcagcatgggtgtgtgcagccactatgctgagacaataaattaccaaaaattataatgtaccgagctgaaaatgctcagtacattatgtggcatattctggatgtgacgagagaactcattggcatttgggacactgacattccagaagtaattcacaactgctttgcaaaagcaaagtgactgctcagatgaacagagcagagtactcactcactatggtggcatcagctgcaaagcgaaatgaactgtgccatgatcatgttgatgggtttctagatactgccaacatgttagctctttctgatgctgatgagattcaaacacgaacagacacccttgatgtgggtttgctaagaacatagaagaacaggaagaaaagttgccacgttcacacattccaggaaaaaagaagatataaaagcttatcagtcagtgactgatgataatgctgcaataatgggaatgggtttnggttttaaccacaatatttctaaatcaaatcatataattgctttgttcttaaagggaatgagcactaaaggtgtgaactgtgtgagaaacaattagaattggattctgtgtttaacagaaaaggcaccaccgtgccatgggtttttgctcgttattccacttctcaggaagctgcgcggaggagtt

SEQ ID NO: 640270 - DNA, 364 bp, Homo sapiens
gagaatgaccaactgccgtgactttttctgaatggacttcataaccggaagacttaaccggtggcctcatcaccagagcatcccaggatttctaatgcactcagtttcctacatagcagggattcttagctaggtgtcccatgaacccgtaaagtctacacaagtcttgcatacaggagcctttacaagatgatatacagggtcgcagattgggtgactgacagactgtggggtctggatgagtgcccggctgcaaataagagtcagctagtcggggtgcggtgaggacgaaatgactgctgctttctgttcgttgcttataccagaggcagttatctatgccaagtctgtaactgtgcaccca

SEQ ID NO: 640271 - DNA, 850 bp, Homo sapiens
  misc_feature (672)..(672): n is a, c, g, or t
  misc_feature (692)..(692): n is a, c, g, or t
  misc_feature (712)..(712): n is a, c, g, or t
  misc_feature (739)..(739): n is a, c, g, or t
  misc_feature (746)..(746): n is a, c, g, or t
  misc_feature (748)..(748): n is a, c, g, or t
ttgcttccatgcagtgtgactctacgaggatccccacgataactgtagagaaagcttcgaatagttccatactttctgaaacctggagctgggaattgcggagaagggaaggtctagactagttacatcacatagggattactgtaaatcaagtcatctcaagtctagtgaagacagccaacagaaacaaaacctagcatagggatagaaaataccatgcacgtgtgcagccccacctaattcctgcatccaaggcaggtgttgttaatctagcatagcacttaaaaaaaaaaaaaaaaaagagaccaaaaataactttaggaaccaccatattatttcactcccaatagcactggacctgggtgatcaaaaacacttgaagaagacttctattggccatctctggccaattaccctaagaaacatatcaaggggctttgggcacaggtgcccacaaatacggatgcagtgctgagatagtttatgagacttgtaccatttcacaaacctctgaaatggggtcccatattgggcaaggctgccacagcttgttaacgaataatcctctattgtttcttcctcacaaaaccatattctcatttatattccagaccattacttcactataattacagggacacaattattagcaagaaataagacatagtattnacgaagaattgatcctattntggaacccctctccagtatnttcacactctggtcaactctccagggnctctctntngccctggagttatcagcctgtggtggtggttaactaccttagaaaggtccaacgctaaagaattgtacacagtatcaaccctcccagtggcttaattatacc

SEQ ID NO: 640272 - DNA, 1088 bp, Homo sapiens
  misc_feature (22)..(22): n is a, c, g, or t
  misc_feature (35)..(35): n is a, c, g, or t
  misc_feature (61)..(61): n is a, c, g, or t
  misc_feature (910)..(910): n is a, c, g, or t
  misc_feature (930)..(930): n is a, c, g, or t
  misc_feature (950)..(950): n is a, c, g, or t
  misc_feature (977)..(977): n is a, c, g, or t
  misc_feature (984)..(984): n is a, c, g, or t
  misc_feature (986)..(986): n is a, c, g, or t
aagaacttgaatatgaccctanataatggggcgcnacccgcgtcgttagtagccctggaanacgacgacgccagacgtacgagacgcgatactcgtatgcataatatcgagtacatcgacgtcgaatatgccggatcggcatacgcggggcaggttctctctccatgttactcaaagtagtgaaatagtcatgcacgtgaagacccacacttggggatctccttaatctttcagccagggactgtccctccctttgaattaatatgggaagaaattatacaggatgactggaagaagggtgatgtgatactttctgaaacctggagctgggaattgcggagaagggaaggtctagactagttacatcacatagggattactgtaaatcaagtcatctcaagtctagtgaagacagccaacagaaacaaaacctagcatagggatagaaaataccatgcacgtgtgcagccccacctaattcctgcatccaaggcaggtgttgttaatctagcatagcacttaaaaaaaaaaaaaaaaaagagaccaaaaataactttaggaaccaccatattatttcactcccaatagcactggacctgggtgatcaaaaacacttgaagaagacttctattggccatctctggccaattaccctaagaaacatatcaaggggctttgggcacaggtgcccacaaatacggatgcagtgctgagatagtttatgagacttgtaccatttcacaaacctctgaaatggggtcccatattgggcaaggctgccacagcttgttaacgaataatcctctattgtttcttcctcacaaaaccatattctcatttatattccagaccattacttcactataattacagggacacaattattagcaagaaataagacatagtattnacgaagaattgatcctattntggaacccctctccagtatnttcacactctggtcaactctccagggnctctctntngccctggagttatcagcctgtggtggtggttaactaccttagaaaggtccaacgctaaagaattgtacacagtatcaaccctcccagtggcttaattatacc

SEQ ID NO: 640273 - DNA, 370 bp, Homo sapiens
ggttccccgacgctctctctgtgggggaggccggctcctcttggccggcacacccagcccccccatcccatggtcatccgccggaaagcgtccctaccaggttgatgacaacagcagagcgtgggagcggacgcacctgggacgcctgggagacctgggacgcctggggcagtggagtctggtctccagcacccggcccctctgtgctgccaagggctgaacggccttcactccttctcctgggtgtgctaccgccctgtccttacgtccctgcagtggaaggacgaccttcatgtggatgccccgttggccttcaaggtcacgcctcaaggacgcagcagctgtcgcccttgccccacagagagagcgt

SEQ ID NO: 640274 - DNA, 244 bp, Homo sapiens
ccccctcccccccccccgcccccggtttggccgccctgggccctgttttttttccccccctcttgggttttgggtttggcccccctctttggccccccccagtttcccccccccgggggggtgggccccccgggtttccccccccctttggtggcccggggggggggttttttttcccggggggtttttgggggggggggggcccctcttgccccccttttttttttggggttcccccccttta

SEQ ID NO: 640275 - DNA, 493 bp, Homo sapiens
cggcgatggcggggctgggaggggggcggcgggagtggggtgggcgacgggggtggcccagtccgcgggccccccagcccacgcccggctggccccacgccccgcgggccacggtcgtcccggctgccgccgtcgcgcagccgctggagccgggtcccggaccacccgagcgggcagggggcggcggcgcggcccgctgggtcaggctgaacgtgggaggcacctacttcgtgaccaccagacagaccttaggccgggagcccaagtcatttctctgccgcctctgctgccaggaggacccggagctggactcagacaaggatgagacaggacgcctatctgattgacacgggtaccccacctactttggtcctatcctccaacatacctccgcccacgggcaaaactcactcatccactaacgggagttggcaacgaaccacaggtctgccaggcaccgcaacgcgcaactttcacaaacactcgactccct

SEQ ID NO: 640276 - DNA, 185 bp, Homo sapiens
cgaggttgggttaataacgtctgatctgcttgcagagccaacgtgtcaaaatgaagcgtttgcgctgctgacaataacccataggctgttgtgcctaacgcattagtctgcgtcaattggcgtcgtgaacaagcgctggagatgtcccatagtgggcaataaccatggctagggctgccagtcca

SEQ ID NO: 640277 - DNA, 850 bp, Homo sapiens
cttgccatcccataacaatggaactagcagccctgagccctttgagtctcatcccctgactgtcggctctaagcaagcctcagcgagtgcccggaaaacacctgagtccttcctgggccccaacgcggccctggtgaacctggactcactggtgaccaggcctgccccaccaggccagtccctcaaccctttcctggcaccaggtgctcccgctcacctcggcccctgttaacttcctttccaggtgaaccagccccatgccgctgacactgaaccagctttcgggggagcccatgtccgtgggtgaccagcactatcctttgggcctggcccaggagtggagtcctatggctgtggcctcgatgacctccgcggtcccactgtcagctctgggggccacgtggttcctctctgacaccactgggccctgcatatgatgaagcatggtgggcatgtgtgggtatacccccatcagcatgcccaggctcactgaaacgaaacaaccctttccgttctctagtgcctgggcctgggacccacctcatgagcagctgtgctggaggatgccgagcaatggactcctcgatctgtggtgacgggtatccaacgagtttggggattaggggtattagggctatttgcaggctccagcttcctgtatgaaagggctgtcgtttacgagcccccataccctcagaccctcgccattccaaggcaggccctcagtacatgatgctgtctcaccattctcctcaaagcactgaggtccttggcaggggtcctctgaggccttggacgaggacgtggagtcatcagtgttgccctttgcccctaacctcagcccgaggtc

SEQ ID NO: 640278 - DNA, 446 bp, Homo sapiens
gacgggaggaccgcatgcaggaaacatgctctgagtacatgtcccgaaggacaaggcagccccaggaaaaggaggagatccaggaggcgtctacaaaaatgctcaaggaacaagggcataggagcacaccatgttggcagggaaacagacaaagaccagacatcagcgcttgctcagaatcctctgctgctctcgaagggctgtgtcctccacaggtgggaggatgccacctgggctgatggtccaagcagtgtgggttcagccagcgctcttggcacctgggagcatgattccaaatgtagacgtaatccagacctgcagcttcaaaaaaaggagccaccgtggtcagggtcagggctgacacagggccaggggaagagagtttgcaagtagcaattcaatacttttatttcagaatgtgtagcaagtatttgacatatatgtat

SEQ ID NO: 640279 - DNA, 257 bp, Homo sapiens
aggatcgcacctgcctaacttatgcaatatgcgcatcaaatgtcggtggagcacgaacctgcttctcaagctcatggaatcatctggcccttatacaatggagcatgactcgcttatgggacatagaaactcggtagtgagtcatgttgagcatgccgcagtgaacggtggtctcgccagtgaacggcagtatgggcgacacggtcatatcaggcagataggggtcgacttggacatggcgaacgtggcacatgaac

SEQ ID NO: 640280 - DNA, 262 bp, Homo sapiens
ttaaaccccttaaaagggatgaaggagggggggtagcatgggggggggtacaaccttaacccctgggctttttctgggggggggggaaagggattttggaaccccccttagaattcctttgggtttggaatcaggttgggtttatgatttgtctttgcctattccccgataattggaaatggggggtttttaagccccagtcctttttcctttggttttcccaaatggtttaaattgggatttttttatcccttttttccca

SEQ ID NO: 640281 - DNA, 174 bp, Homo sapiens
ctgacgtgcatgacgaggctgacacgtccccacagagggaagaatgcctgtgcacattgcatttattcccatggctagaaagccaacttgtgtgaccccttggcctagctaacctgggtgtctaattgagcctgcctgtgctgacggctgcagccctgcccatgctcctgccct

SEQ ID NO: 640282 - DNA, 401 bp, Homo sapiens
  misc_feature (67)..(67): n is a, c, g, or t
  misc_feature (70)..(70): n is a, c, g, or t
  misc_feature (137)..(137): n is a, c, g, or t
  misc_feature (146)..(146): n is a, c, g, or t
  misc_feature (150)..(153): n is a, c, g, or t
  misc_feature (165)..(165): n is a, c, g, or t
  misc_feature (172)..(172): n is a, c, g, or t
  misc_feature (174)..(174): n is a, c, g, or t
  misc_feature (206)..(206): n is a, c, g, or t
  misc_feature (210)..(210): n is a, c, g, or t
  misc_feature (215)..(216): n is a, c, g, or t
  misc_feature (220)..(220): n is a, c, g, or t
  misc_feature (240)..(240): n is a, c, g, or t
  misc_feature (256)..(256): n is a, c, g, or t
  misc_feature (259)..(259): n is a, c, g, or t
  misc_feature (276)..(276): n is a, c, g, or t
  misc_feature (285)..(286): n is a, c, g, or t
  misc_feature (303)..(303): n is a, c, g, or t
  misc_feature (310)..(310): n is a, c, g, or t
  misc_feature (316)..(316): n is a, c, g, or t
  misc_feature (325)..(325): n is a, c, g, or t
  misc_feature (336)..(336): n is a, c, g, or t
  misc_feature (345)..(345): n is a, c, g, or t
  misc_feature (377)..(378): n is a, c, g, or t
  misc_feature (381)..(381): n is a, c, g, or t
ttcattacgcaaatacaggcatctcaaggtggtcagaagaacattctggatagcaagcccactgcanacnagaagtgcgacctgatcagccatcccccagaaaaccactgacacggccagtgtgcaaaatgaagccnagttggatnagannnnaaaagagatctnatctatnanagacacaatctgcaatctagactcagcgtatntccnagttnngaanagcatattgcatagatcgcngtcctgaaggtcccanccnccatccctacagaatanatgggagcnngaacttgtgctttgganctggttnttggtntggtcctanggagggcgganagggaggcnctgccatctggagactttccatttccgatttnnctntctcaagggtacccagctct

SEQ ID NO: 640283 - DNA, 274 bp, Homo sapiens
tcgagaaactgcagtaggctcttggaagtagaccaagggtgtccaatctttggcttccctgggccacatcgggagaagaattgtcttgggccacacatgaaattcacaaacactaaggtagccgatgagctttaaaaaaaatcgcaaaaaagaatctcataatgcttccagaaagttacgaatttgtgttgggccacattcaaagccgtcctgtgccacgtgcgggccggggttggacaagcttgaagtagactgtccatagtcagtagaagag

SEQ ID NO: 640284 - DNA, 364 bp, Homo sapiens
agaagtccgagcctcataccgaagctacctcataatgggcaaatggtggcaactggagtcggtagtgcgaacacccagtccgatcctgttctgacttctagctagtttcttctgccctcagtcatgaggggctaccctatcctcccatcctatggtacccaggtgcatggaactagagagaggggaagggaagacgacgacggaagacagtttggtgccaggtgaaggtgtctctgctctgcatacttaattgggccctggccatgactaccagcaatcgtgggtgcagattggctgggccaagggttgggggcatggtgctgatactccctaggcatggtacgagcatgcagattctaggaga

SEQ ID NO: 640285 - DNA, 104 bp, Homo sapiens
ctcaccaccctcgaatctcagacacatatctccacttttaggaaaagaaactctacaatttctatgcaaacatcgaataagaaggggagcggacagatcccctg

SEQ ID NO: 640286 - DNA, 131 bp, Homo sapiens
tggcccggaggcgttctgcaggccatcaggctgaggagcaggctgtgtccagtgcgatgcagggccctctgaagtcgaagaagaaggagagccggttggccattcaacgcctccgggccatcggaggcgtt

SEQ ID NO: 640287 - DNA, 317 bp, Homo sapiens
gatgaggtgagaaggatatgaaaaaggaggatgatgtggaggaggaagaggaggatgtggaggaggaagaggaggatgtggagaaggaggaggaggatgtggagaaggaggaggaggatgtggagaaggaggaggaggatgtggaggaggaggatgtggaggaggaggatgtggagaaggaggatgtggaggaggaggatgtggagaaggaggatgtggagaaggaggatgtggagaaggaggatgtggagaaagaggatgtggagaaggagggtgtggagaaggaggatgtggaggtcgacgcggccgcgaattta

SEQ ID NO: 640288 - DNA, 82 bp, Homo sapiens
ttctgcaccaggcaggagcgggcgctgtccaggctgggccgcccccttggctcttcctcctgttccaggggagccataggag

SEQ ID NO: 640289 - DNA, 182 bp, Homo sapiens
tctacccaatcctcaacagtgattcagtgtcactgttactgtgttcttttcatcagggcagtaaaaagggcattgctaggttcaagggcagaggggagatatctcttggtgggaggaaggttgaagaatttctgggcatgttctaaacccactgtaggtattgaggtgggtaatggggacat

SEQ ID NO: 640290 - DNA, 725 bp, Homo sapiens
  misc_feature (654)..(654): n is a, c, g, or t
ctcaccactcctattcaacatgttagtggaatcaggcaatcaggcaggagaaagaaataaagggtattcacttaggaaaagagtaagtcaaattgtctgtttgcagatgacatgattgtatatttagaaaaccccatcgtctcagcccaaaatctccttaagctgataagcaacttcagcaaagtctcaggatacaaaatcaatgtgcagaaatcacaagcattcctatacaccaataacgacaaacagagcaccaaatgagtgaactcccattcacaattgctacaaagagaataaaatacctaggaatacaacttacaagccattaaagactgctttaaagagactacactactgaggccaggtacggtggctcacgcctgtaatcccagcactttgggaggctgaggcgggcggatcacgaggtcaggagattgagaccatcctggctaacatggtgaaaccccggctctactaaaaattccaaaaaaaaaaaaaaaattagccaggcatggtggcgggtgccctatagcccaacttctaaggaggctgaggcaggagcattggttggacccaggaaggagagcttggagtgcccttagacttgaccactggacaccaacctgggcaacaaagggagattccgtcttaagnatgacaaggttttccttcggcccaattgggcttaccttgcaattaccctatagaggccgttccaatcccca

SEQ ID NO: 640291 - DNA, 935 bp, Homo sapiens
  misc_feature (7)..(7): n is a, c, g, or t
  misc_feature (223)..(224): n is a, c, g, or t
  misc_feature (282)..(282): n is a, c, g, or t
  misc_feature (304)..(304): n is a, c, g, or t
  misc_feature (357)..(358): n is a, c, g, or t
  misc_feature (362)..(362): n is a, c, g, or t
  misc_feature (370)..(370): n is a, c, g, or t
  misc_feature (374)..(374): n is a, c, g, or t
  misc_feature (424)..(424): n is a, c, g, or t
  misc_feature (434)..(434): n is a, c, g, or t
  misc_feature (448)..(448): n is a, c, g, or t
  misc_feature (450)..(450): n is a, c, g, or t
  misc_feature (452)..(452): n is a, c, g, or t
  misc_feature (455)..(455): n is a, c, g, or t
  misc_feature (463)..(464): n is a, c, g, or t
  misc_feature (468)..(469): n is a, c, g, or t
  misc_feature (471)..(471): n is a, c, g, or t
  misc_feature (474)..(474): n is a, c, g, or t
  misc_feature (481)..(481): n is a, c, g, or t
  misc_feature (493)..(496): n is a, c, g, or t
  misc_feature (498)..(498): n is a, c, g, or t
  misc_feature (507)..(507): n is a, c, g, or t
  misc_feature (510)..(510): n is a, c, g, or t
  misc_feature (513)..(515): n is a, c, g, or t
  misc_feature (526)..(528): n is a, c, g, or t
  misc_feature (536)..(537): n is a, c, g, or t
  misc_feature (544)..(544): n is a, c, g, or t
  misc_feature (546)..(546): n is a, c, g, or t
  misc_feature (553)..(553): n is a, c, g, or t
  misc_feature (555)..(555): n is a, c, g, or t
  misc_feature (558)..(559): n is a, c, g, or t
  misc_feature (563)..(563): n is a, c, g, or t
  misc_feature (565)..(565): n is a, c, g, or t
  misc_feature (579)..(579): n is a, c, g, or t
  misc_feature (586)..(586): n is a, c, g, or t
  misc_feature (588)..(588): n is a, c, g, or t
  misc_feature (590)..(590): n is a, c, g, or t
  misc_feature (595)..(596): n is a, c, g, or t
  misc_feature (600)..(601): n is a, c, g, or t
  misc_feature (607)..(607): n is a, c, g, or t
  misc_feature (619)..(620): n is a, c, g, or t
  misc_feature (631)..(631): n is a, c, g, or t
  misc_feature (926)..(926): n is a, c, g, or t
accatgnttggccaggctggtctcgaactccttacctcaagtgatctgcccgcctcagtctcccaaagtactgggattacaagtgtgagccactgcacccagccagataattgcacttcccgaattaattatgagattactaactgttcgcctcaaaacagaaaaaaaaggaagtagccaaaatatgcaacagtatagaattagtttagatcattatggttcnnccattaaatggaaaattacacaacggaactttccataaatgggaaataataataaatnaattattttaaataccccaganatatctttacaggcatagtagggaagggaagaatatacagttaaatgcaaagnncaangatatgtncctntcccccctttttgtaaaaagttcacatttgtagaaataagtgtataagtnattttatgcncagaaaaatatccngngnggnatacgccnngtgnnanccngtccccntgacccgagccnnnntnggccgactnccnttnnncctttgcctannngtcttttnnttttccncnataaacntnccnngaangnctgtcaaacctccntatatgncncncaacnntttnnaccacngtctatgcaacnnctccacccccnccccagataaatagtaaaaaaggaaactatgtttgctataaatatggcaaacagtaataaattttgtatgtaaaaagactgtttatcaaaaagtaacaaaaccttatatattaaaataaaaagaatgccaccgccaaaaaaatttcaaaggacatataaatacttaataaatcaacaggaaaataatgtaatcccatgtcatcaaagtgatatcccttttaacttagcaaattcaaacattttcaattatattaggtatttcaaacattactagtaagaataccaagtggaaaanattctctta

SEQ ID NO: 640292 - DNA, 193 bp, Homo sapiens
ggaaggtggcgcctcgggcgggggccggtccctgcaccaggtgacctgttccggcccggatccgggcggcctcgccatgcagcggcgcggcgcggggctcgggtggccgcggcagcagcagcagcaacccccgccgctcgcggtcggcccccgggccgcagccatggtgccgagtggcggcgtcccccagggc

SEQ ID NO: 640293 - DNA, 655 bp, Homo sapiens
ggcggagcggagctggcggcgggcgcagcgtagcggtggtcgtgccgcgtgagcggaggtgcagctcggcttcccccggcacccctccacctcacagagccaaaaaatacgaaaacaaaaaaaagaagagaaaaagaaaagagacaaaacactacatacaacacgaagcagagagcagcacaaagatatacgcaaagataaagaacacaaaaacatctaaaagaccacaacagtaaaagcaatcatcaaccacaaacaaaaaagacaaagatagcagaaagcaaaacagaacaaacacaaaaaagaacagaacataaacgaacataaataaaatataagaggacagatcaaacaaaccaaataaaaaaacgaacaaacacgcaacaatataaacaatacacacaaaatacagacacaagacaaccaaccacaaaaacaaaaaacccaacaacgacccacaaaacgacacgctacaagcccttcacaaccacacacacaaaaatcacaacacacacgacacatacttactaaaacatcactagcagcacaaactgcacaccacagatagtaacacacaaacacgcacataaacaagcctcccaatacgcaggcacacatacacaagccacactccaccaaaacctaccaaccccac

SEQ ID NO: 640294 - DNA, 418 bp, Homo sapiens
tatgttcctgtcgcccctcttctctccttccctgctgtcacggaactgctatgctcatctgcctgcagcgataatacgctgctagggttcatttcctaagagagagacttctagtgccccgtgtagcaggcactgtcctctgccgtttagaactgactctctcctgttttctctctaggctgcgcccccccaccttccccaactaccctttcccaggttcgatccattagcaccaacgtccggagaaacctggcctttccacacactcagccaagaagtcctgctcaaggagttctccactatctcctgaggccacgcctacctgagcagactctagatgcccttacccatgaggatcatgggctggagggggagcgaggggagagggggctgcccccgaggttggagagaaaaacag

SEQ ID NO: 640295 - DNA, 658 bp, Homo sapiens
  misc_feature (577)..(577): n is a, c, g, or t
gggattctgccacattcgcccaggctggtttgaactcctgatctcaggtaatctgcctggcccagccatcccaacatgctaggattacaagtgtgagccgttgttcccagtctcttctgtctcctaagagttaagaggacgtgctggattctaattcttcattcgttcttctgtattgttcttttatcctgaaatcgtgatctctcagccacgtgctaacccgaggcctcggaatgatccagatgacgtcgactcgttggggctcactgcaaccttccacccccgtgggttcaagcaattctcctgcctcagcctcccaagataacttggggactcacagggttgcaaagcttgcccgctgcctgtgggctaatttttttattaattttggggatttatttaagttgagagagcaacggggggttttcaacccaattggttttgccgcagaggcgtgtggtcttggcaaatactctcctgtgaagcccttcagaggggcaaaattttggcccccgctctttcgggccctctccccaaaagagtatgctgtggggatatcccacggagggctgtttgnacgcccaacccaaacgccccaagcccttaatataaattcccttaaaataatactttgagttaaaaattccactcgagaaag

SEQ ID NO: 640296 - DNA, 280 bp, Homo sapiens
ccccgactagcatatcaggacagtgagataggtagaattgcttcagaccgtgaggcgtaggttgcagtgagctgtgatcacgccactgcactctagcctgggtgacagagtgacgactccatctcaaaaaaaaacgaaggaatcgttttctgtaccaaatttattttgtttttttataaaagacagggtctgattctgtggcccaggctgaagtgcccgggtgggatcatagctcactgcagcctcaatttcctggcctcaagcgatcctcctgcctcac

SEQ ID NO: 640297 - DNA, 582 bp, Homo sapiens
  misc_feature (5)..(5): n is a, c, g, or t
caggntctacccctcaaaatgacaaaattatggagatggagaagagattactcactgccaagggttagggacagtccgggtagggggagggcagtgtgactatacagggtagcatgaggaaaagtgataaaacagttttgtgtctttttgttttgttttttttttttttggaaagggattttggctctggtggctcaggcaggagtgcaagggcgtgatctcggctcactgcaacctccgcctccggggttcaagcgattctccgtgcctcagcctcccgagttagctgggattacggggtgcccgccaccattccgggctaattttggtattttaagtagagacggggttttcgccatgtgggccaggcgggtctcaaattcccaacctcagggtgatccatccgcctaagcctcccaaagtgcggggatttcttaatacacgtctctttccccgatttggtttctgcccttctaaatgcctgcatgagggagctaatgggatatctggtggctactctaatctcagcatattttagatttagtctgtcacctcccttttttgacctcccattcttgtttt

SEQ ID NO: 640298 - DNA, 176 bp, Homo sapiens
  misc_feature (133)..(133): n is a, c, g, or t
ctaaggatccggctgagcagctggaggcatactcatcttttcagtgggggtgaatcagtgtagtacaagagatagaaagacagtccttgctgaaagacaagtctgaatgctccactttttcatattctctctnccattcttcagtcaagtcaccttcacatgtcggagtggatgaa

SEQ ID NO: 640299 - DNA, 478 bp, Homo sapiens
ttatgccctagctcgcatgttacatcaaatcaatccagtcagaacaaattactgctgtagcatggaccaacttgggagtgttatacctcacaaatgaaaacatagagcaagctcatgaggcttacaaaatggctcaatcccttgatccatcttatataatgtgctggataggacaagctcttatggctgaggcagtatggaagttatgacaccatggatctcttcaggcacactacaaaactcaatatgcatccggaaggagcattaggttatgcgtatggggtctgcacaacatggcaagatcaaaagcaacagagaaacagagctgtacgtgtacaacatcctccagatgaatgctataccagcagcacaagtaatattgactacatctgtagaacgaattcagaattatgccccagactaaacaaggtggggttacttacacgcacatctacaactgaaaccggacgcagcaaat

SEQ ID NO: 640300 - DNA, 316 bp, Homo sapiens
  misc_feature (52)..(52): n is a, c, g, or t
  misc_feature (99)..(99): n is a, c, g, or t
cccatagccagccaaaaaaactttaaggctaaaaacaaagcaaaacccgttncccctaatcttaagaagatacccctttatgaatgaggaaaaagttcncagagtaaataaagcttttgtaaatggacaaaaggaacttgcccctttcgcaaaaagcatttcccttgaacctctgcaaaaaaaactgattcctcagcagggtcatgaaagcaaaccagttaatgttgatgaagctccaaaattaatggctctgttgtaaaaaactggtgatgcatttaattttccccaaagaccaataaattgaatgttttatcca

SEQ ID NO: 640301 - DNA, 392 bp, Homo sapiens
taggactcacaacaatgggtacacattgctacataaagatgcaacgatagacactattggagctactacatggagagggacgaaggagatcataatggttgaacaattattgggttaccaatgttcactatctgggtcatggtgtcaattgtatcccaaaactcagcatcacgcaatatacccatgtaagctcttctcttgtaaaactaggatttccaataagcaactttctcaatattctttattttgaaacctatttcaatttattttgaagtctattttaaccctgggaataagtattatgtagtcctgaactgtactgttcaatatggcagccactattcacaggtggctgttatagtttacatttaaattaattaaaatgaaacata

SEQ ID NO: 640302 - DNA, 167 bp, Homo sapiens
cgcctctcacaggcatcccctgggctggggcaagcagggggcttacaaagggctcaatgcaatcattcaagcatgcagcaaacaggcgcaatggcatcacgcaagcctgtcccatccagcctgtctttcccttctttcccccagcccagggtgtcactgcatgctcg

SEQ ID NO: 640303 - DNA, 299 bp, Homo sapiens
tggcctataggtgtcgtgaaagttacagtgggtcactaactgttatcttaaaacttacaagtgtttgtctcattgtagaataagctgatactaaaatcatatgatggtctcatctgtatagtacatgattctagggtaatgtatattcttctaggctcatcagagaagtcactactcaagacagtctggtggcaatcctttcagggtacaagagtggtagcatacttttattaaagtacaaaggaaagtgtaacttagatcaatttagctctatacttttcaacagccataatacaagt

SEQ ID NO: 640304 - DNA, 1083 bp, Homo sapiens
ccatgtttggcaatgacatctccccgtgagatatggcggagaaggtgcggactcttgttcttgcactggtgaactcaaccagtgacagattgacggaagttccacatgtaaggctccaatgaagccacaaacgtttccccttcgaccttttgtgattccatttctcaaggccaaactgcccctgctgcagcgggaactgctgcactagcgctacgggctggcacaagcagaccccatcccagatacctggctcagacacgaacaccttctgctcaacagcaagcattgcatcgcctgctgacatcgtacagagctcgctccatggcaggtgcccacggcaacctggcgcacagcaggcccaaggtcccagcagcaggcacgcagcacgcagcaatcagtctccgcatcagcagcaccacacaattgcctccctgcaggccatccatgccacaatgagaagctcatgtaccaatcacgccctgcctccctccagtggcaccacgtccatgcctcttcaaccctgatgccccatcactgatatccacagaggggccaacattccactccctaaccccttccaacctctttacagccactctacaccccttaccacccgactactctgccaccctctcttccaccctgttattccgcgcaaccccaaccaacgactgcctacgcaagcacttcgcaccacagtcccgctcgctacacacatccatccacccctttggcatcctcacattgcactgcgctacgtcccagcactgcaggcacgcctcacatccacccctcctgcacccaccacagggcaacgccgcgccgcaccgccactcgccacaccccaacctccacacccaatgacgccgtgcaaatcgcacaatcccacctgcccacccctgcgccaggaaggcaaacacacccacagagcagccccccgaacaggggcacggatcccacggcggccacacccataccccacaccacaaactccggaacccagcagcgacgccacccctcaccagtctacacaggaaaacgacaagcatgcggaccacaacagtgacacacacacccaccacg

SEQ ID NO: 640305 - DNA, 128 bp, Homo sapiens
  misc_feature (95)..(95): n is a, c, g, or t
aaaaatttttttgggttgggtttgggggggcaaaaatttaaaacccccccaaattttgtaatttttgggccgggaaaaaaaaccctttttttttncggggcccttaaaaaatctttcccttttactta

SEQ ID NO: 640306 - DNA, 862 bp, Homo sapiens
ccgccggcggggttggagctatagaggctttattcgcgcggtgtggccttccgcccccggtgaatgttagggaatgacgaccctttttgcgtacacaacggatggggggtcttcgaggccgatagaaagcgccgctctatgtgttctctcgcacaagggtgagatacccacacgctcactctgtgagatggctcctttcgccctcttcgtagatacaatagggcgtcctgagggaaaacacacttccatgtgcagagaatgataacctttgctaaaatcactcgcctcccgtaggacataacaagacgtgttttagttgcgccgctcatctgtagggctctcccgccgccacacatggttttttctcttgcgctctcggttgaacagccgtcccccccgccctagtgtttataaatgtgtggaaagtacatcaaataatgtcgcactcgttaacagtcgtcgtgagcgtgggagagggccccaccacttaatttctttgtactatccgaggagaaccctggaggggcaagcacaggtatctcctgggcaacagaggggcaccctctaatatatatatatttctcatcgcgcaaccagcacataggtggctatttataaagcttccccgactgtgtgaggatgagtgtggtggtgataccctcatgcaagtcagtatggttaatcatgagtctcataaagcagcgggccgccgcatgaagaggtgtccgctcgtgcacacacagagcgggctccctctgtctggcggggcatatcttacacggggcgacccatgttctctgtaagcaaccttaaagtgttctttgaagatgacggacccctcgccccacaaatgtcagagcag

SEQ ID NO: 640307 - DNA, 430 bp, Homo sapiens
  misc_feature (97)..(97): n is a, c, g, or t
actagaggatcctgggatggggtctgtagtcagaaaaatctgggagttcagctgggcatgtctccgaagctctgaacagcccctggtctcagactgnagaagtggtgctggctccaatcctcactcttcccaaatctgtcttgagctccccaggcctgtgtctcacccatcttggtgttctcaggacctggaatgtggaaattttcaccaaacaggtgtctactgacttacttctgcttgtgctacccttggcacaagtttcctcccttctcaaactgtcaaactgctgcctgtggtttgaggaccagatcatgtggtcaaaagtccacatgagctgggattcaaccacaggcacctctctagcccagtctgaattaatccttatcactctcaagttccccatggctcttttgacttactgaagaatggg

SEQ ID NO: 640308 - DNA, 1768 bp, Homo sapiens
  misc_feature (1049)..(1049): n is a, c, g, or t
  misc_feature (1067)..(1067): n is a, c, g, or t
  misc_feature (1113)..(1113): n is a, c, g, or t
  misc_feature (1115)..(1115): n is a, c, g, or t
aattagtgtttgttccctatataacttttaactttataggtaaatatttgtttctttcagctccagttttatgtgaaatagagttttcagatttatgtagcatggaaagttttaatacgtcagagttactgatttttgccaatcattttctcaattatttcttttttatctttagttgatttttttgtagtgacacattttgtttctagtctcatttccttttgtttatattctatgtatatttcatttttggttactatgagaattacatataacatcctagagttataacattttaatttgaatttatttcaacttaagttcaatcacataccaaaattctactgctatatatatagctctactctttttatgttattgatgtgacaaattatatctttattcattgtataccagctaacagatttacaattacattttatgcatttgccttttaaattatgtagaaaataaaaagcagagttacaaaccaaaattacaataggactgtttttatgtttgtttatgtatttacctttaccagagagctttgtatattcatacagcttgcttatttacttatatagttattgcctagagttcatttatttcaacctgaaggacttaacacttcctgaatgtcaaattcagggataaatggatttttttcagttttaaaaaaaaatccggaaatgtcttaatttctccttcatttttgaaggataagttttccagctatatatttctcaattgacaggtttcttcattattttaaatatataatccactgcctactggccttcaaggtttctgccgagaaatcagctgctaatgttatctggatccctatctgtgagagttgctcttctctctgagttttcaacattctcccattatcttttgtttgtttttgagacaaataattgtacatattcatgggatacagagtgatattttgatacatgtatacaatgtccaatgatcaaataaggataattagcatatccatcacctcaaatatttgtcatttattgtatgtgaacagtcancattctttcttctagttntttaaatttataaacatttaaattttattacagaaatttaaatttntngattctgaaaaagtcatatatgtatgcaacatttttatcatttatttatatatttatgcatctttccttttagttttgacagagattttctattttatcattatttcaaaagaactcttacctgtatttatttatcaagtatatttcccttgttttttcctagtatattaatttatttacttatcttctaaaaatcctccatataatctgtttattttgtttcctttctataatttcttcaataattagttctgttctattttccattaaaatatttaaatcttgtatgaatttttgtcagattagaaatttagggcgtttcttaatttctctatactctagcttttgactttttttttctgacctaagaggtatttagagcacattttagattttttattttgactaatcatttaaaatgtatactaatcttcaatttaaataaaaaactggtctatagtgacaaaaattacaaatgagcctaactaataaattatcagctgtatttatatgtataagcctgcacagattttggtaaatatgtacatagtatattggtgagcttatttttatcattcttaactcattgtgtagtctaaacgttggggaaaaaataaaatacaataatcagatggtgtgaataagaaaaaaaa

SEQ ID NO: 640309 - DNA, 179 bp, Homo sapiens
ccgagagcccttaaccctgcgagagcccttaaccctgcggaagcccttaaccctccgggagcccttaaccctacgggagcccttaacccttctccactgaccgactttccatccatgcacacaacttcagtaggtcgatggcttgtactgtgccagggttaagggctacccgcggtacc

SEQ ID NO: 640310 - DNA, 1006 bp, Homo sapiens
  misc_feature (151)..(152): n is a, c, g, or t
  misc_feature (830)..(830): n is a, c, g, or t
gagagagaaagtggagggtgcaggagaaggaggggctgcccaccctcgtcaggaaaattactgggagccacgaagcatagagtccctgatgaacttctgtgctcatcagagagcatgctgagccatcttcctacccgaatctcaagcatcnncaagttcagttcaagttccatccatgagacatgtgtgagaacctgtgccggtgctgggctgacagagtaagtaagaaatcatccttgctgtcccaaacagcaaaggttgctggggcccacatagctggactccagtgatatcagtaagcaccaagaggaagggctgcccaggagaggtcaaggagtctgaaggaagtgaccactgaactgagcctgccaggccaaggacaggcagtggggtgctccaggtaagagaacagcgtgtcccaggacacgagggtgtgagaaatccgtgccttctgggcatggcccattacagaaaccagagtgtggggctagagaggccaggtggctgggtctgtcgtgccagaatggagggctggcctgctgtgctgacaagctgggccctgtcctgagggtgtcaggaggggtgtgacagcacccaaggccagtaaacagcttggaagtggttcaggtgaaagctgatgaggcctgagctaggcgggtgcagtggggatgagggaaggataggctggggatctcctgagtggactcaacaggacttgtttctggggtgttgaaaatgttctagaatgaatcccagcacttcgggaggccaagacaggtggatcacttaaggtcaggagtttgagaatagcctggccaacatggcaaaancttgtctctactaaaaatacaaaaattagccgggcatggtggttcgtgcctgtaattgcagctactcaggagggtgaggcaggagaattgcttgaatctgggaggtgaaggttgcagtgagctgagatccaaccactgcactccagcctgggcaacaagagtgagactctgtgaga

SEQ ID NO: 640311 - DNA, 315 bp, Homo sapiens
caaaaaggtttttttttggggggggggtttttttccccccccgggccgggttgggggaaaacccccccccccccccaagggggtttggggggggttcccccttcacccggggaaaaaaaaggttttttcaaaaaaccccccttttttttacccggggaaaatttttttttgggcctggttaaaaaaaaataaaaaaggggaatccggggcccccccccccaagggggggtttttcccccccccctttttttgggaaaaacccaattttcccgttttgggattggcccccaaaaaaaaaaaattttccccccccca

SEQ ID NO: 640312 - DNA, 383 bp, Homo sapiens
ctcacacttctttttcctaaacaggacggaggtgacattgtagctcttgtcttctaccagctcaaagatagtggcatacatctttagcgggtctttgtcttctctgagaatagcattccctgccagcaccaccaatacaagggagtgctcaaggtcggagcctccgttgtgactacaacctgctctcgaccccctctcttggggtttaaggagttgtctcccgcatattgtattcacaacggacgctccgaccttaagcggctccccacagccagcaccaccaatacaataggtggtgctggctgagtactattaggcttctttgaagtcagccatgatcaaaggctgtcgagaacctccctaccccagcatcctgacagatg

SEQ ID NO: 640313 - DNA, 719 bp, Homo sapiens
  misc_feature (151)..(152): n is a, c, g, or t
gagagagaaagtggagggtgcaggagaaggaggggctgcccaccctcgtcaggaaaattactgggagccacgaagcatagagtccctgatgaacttctgtgctcatcagagagcatgctgagccatcttcctacccgaatctcaagcatcnncaagttcagttcaagttccatccatgagacatgtgtgagaacctgtgccggtgctgggctgacagagtaagtaagaaatcatccttgctgtcccaaacagcaaaggttgctggggcccacatagctggactccagtgatatcagtaagcaccaagaggaagggctgcccaggagaggtcaaggagtctgaaggaagtgaccactgaactgagcctgccaggccaaggacaggcagtggggtgctccaggtaagagaacagcgtgtcccaggacacgagggtgtgagaaatccgtgccttctgggcatggcccattacagaaaccagagtgtggggctagagaggccatcttcctacccgaatctcaagcatctccaagttcagttcagagttcccatccatgagacatgtgtcgagaacctgtgccaggtgcttgggctgacagagtaagtaagaaatcatccttgctgtcccaaacagcaaaggttgcgggggcccacatagctggactccagtgatatcagtaagcacaagaggaagggtgcccaggacaggtcaggcgtctgaa

SEQ ID NO: 640314 - DNA, 550 bp, Homo sapiens
tagcagagtagtgttccgtggtgtatttatggcactttttctttatccagtcctctgttgggggacgtttaggttgattccacgtgtttgctgttgtggatagcgctgtgataaacacacgagggcagggattgtttgatatgattccttttcctttgggtagaggcccagtagtgggattgctggatcgaatggtggttctattttcaggtctttgagaaatttccatactgttttccagaagggctgtactaatttgcattcccaccagcagtgtgtaagtgttcacttttctccacattcttgccagcatctattgttttttgaccttttttttttttttttttgaggcagagtttcactgtgtcagccaggctggagtgcagtggcacgatctcggctcaccgcaacctccgcctcaaaaaaaaaaaaaaatagcaactctactaagaaaataaaatcaaagataccaatgctgaaataacacagactttgaaattatctgataaaacttttaaagcagctatttaagggcttcagcaaacaatcg

SEQ ID NO: 640315 - DNA, 385 bp, Homo sapiens
ggcaaatccttaagttaaagttactgtcaggccataatgggcaatggtacgtgatttacacatgcggttgtttattctaccaatagcttatataatggtcttaatcgcatcccaatgacattgcaatgtatatgtttagataaattaaagtaaaggttccatgctctatatctccaaggcttcaccaatgttcctctcagatgtggcacaatatagcagcagatacctgcaaagtcctgttaatgtcatgttgtaagtcatgcgtttgtagcataagatcgctgtacatacatgtgcatagcactcgtaggatatatagtcctattagacatagcgtacagtggcatgcacctgtgaatcctgcacatattaagattgagatgag

SEQ ID NO: 640316 - DNA, 288 bp, Homo sapiens
gcacgagaatcacattttgtatggagttaaataaagtacagtgcttttgtatataaaaaaaaaaaaaaaaaaaaaaaaaaaaaaaaaaaaaaaaaaaaaaaaaaaaaaaaaaaaaaaaaaaaaaaaaaaaaaaaaaaaaaaaaaaaaaaccctggggggggggccgggccccaatttccccttatagggagtggaataaaaattaaggggccgggttttaaaaacgtgggaacggaaaaaaccttggggtaaccaaattaaatcgcttggaaaaaaatccccttttcc

SEQ ID NO: 640317 - DNA, 149 bp, Homo sapiens
  misc_feature (80)..(80): n is a, c, g, or t
  misc_feature (109)..(109): n is a, c, g, or t
  misc_feature (119)..(119): n is a, c, g, or t
tttgtgggtcatctgtccccaactactgttggggaacagaccccctgtcttatgtgggcacgttaccaaagtttaaatgncatttttttgactcttggtccaaaatttnaggaagatgnctgtgcaatattcattttggaacttgtgtc

SEQ ID NO: 640318 - DNA, 517 bp, Homo sapiens
acgacccacggccacaaaccccaaaagcgtgtgacagtcagctaaccttatgatgctataactacgattcgggaagaagtgatgtactttaaagagagattctacatgcgcacaaatcccttctacccggaagttgagctcaattacatttctgttttctggccacaactgccaaatgggcttgaagctgcttacgaatttgccgacagagatgaagtccggtttttcaaagggaataagtactgggctgtacagggacagaatgtgctacacggataccccaaggacatctacagctcctttggcttccctagaactgtgaagcatatcgatgctgctctttctgaggaaaacactggaaaaacctacttctttgttgctaacaaatactggaggtatgatgaatataaacgatctatggatccaggttatcccaaaatgatagcacatgactttcctggaattggccacaaagttgatgcagttttcatgaacgatggatttttctatttcttta

SEQ ID NO: 640319 - DNA, 144 bp, Homo sapiens
ggagtgttgtgtccccccctatggaagcttgacaaggaatttttttgcagagcccccaaagggagtatggtcctgatgacatttgggttttgggtttctggcctcaaaaactatgagaataaatgtctgttgttttaagctcca

SEQ ID NO: 640320 - DNA, 346 bp, Homo sapiens
gagatggagtcttgctctgtcacctaggctggagtgcagtggcacgatctcggctcactgcaacctccgcctcccagatgcaagcaaattttctgccctcagcctcctgagtagctgggattaaaggcacgcaccaccacgcctggctaatttttttgtatttttagtagagacaggatttcaccatgttggtcaggctgatctcaaactcctgacctcatgatccacctgccttggccttccaaagtactgggattacaggcgtgagccactgcacccagccttctagtttcgtattttttttattcaagtaacaaggaaaaaataaataactccaccaagagga

SEQ ID NO: 640321 - DNA, 364 bp, Homo sapiens
ggtcgtagcggcggcggcgatatccatctttcccatccctcctcctacgtcgatcgtcgtacgcgacgttgtacgttcggaccggtacggcccgaagcatggccggcgatagcttagacggccaccgactggagctgctggcggcttacgaggaggtgatccgagaggagagcgcggccgactgggctctgtacacatatgaagatgtactccgatgtcctctagctggcagctatcaggagaagggggcttgcaggggctttcgggacactttgagaaccagaaggtgatgtacggcttctgcagtgtcaaggtctccctagctgctctgccaaaatacgtgctcatcaactgggtgggcgaa

SEQ ID NO: 640322 - DNA, 333 bp, Homo sapiens
  misc_feature (96)..(96): n is a, c, g, or t
  misc_feature (291)..(291): n is a, c, g, or t
  misc_feature (313)..(313): n is a, c, g, or t
attcccgtgggacgtgcctcggcagcgggagctcatatggctggacatgtacagtatctggtatatgtggctgacacggcgactccagaaggtgangctgctctgccggaaggggatcccctcctctctcagagacagagtctgagagcacctgtctaatagcaaggatcttctggagcagaccccaggaaagtgtgatgagctggaacggtctcctggagaccccatgttggtgtatgtgattgagaaggactacaccacagctccctcacaggatatgtgtgttctcgngggggcatgaaaacagcactgnactattctgaggctacaaca

SEQ ID NO: 640323 - DNA, 262 bp, Homo sapiens
tcgatctagacggatccccccaattcgcggggaggctgggagaaccggtaaacgtgggggccagttgacaacagaaacagaagtccatatgcttcaggaggggatagctcggcggggggggtgaggggggccattggtttctctattacacaggggaaaactcccgtgtgtatcatcgggaagaacccaagtgctgggaaatatacccccagcaagcggatgccagggaacggtggctgggttcttatccagagttggtgag

SEQ ID NO: 640324 - DNA, 415 bp, Homo sapiens
ggggggcccatctctataaaaaatacaaaaattagccaggcgtgggtcacagctacttgggaggctaaggtgggaggatcgattgagtccaggagtatgaggctgcagtgagctgtgattgcaccactgcactccagtctcggcgacagagcgagaccctgcctctgataaataaataaaggagaggacagcaagagtagatgctgagcaggcaaagaccaaatgctcttagggaagaaaaaggaggtagcaatttaatcagcttcctttctgtcaaaaggctaagccctaagtagtttgaatcctaataaaatattgcttttgttgttgtttgtattagagacagggtgttgagcaccaccatccatgcccagctaattttcgtattttttgtagcaagagtctgccaaaaaaa

SEQ ID NO: 640325 - DNA, 892 bp, Homo sapiens
  misc_feature (418)..(418): n is a, c, g, or t
  misc_feature (420)..(420): n is a, c, g, or t
  misc_feature (423)..(423): n is a, c, g, or t
  misc_feature (446)..(446): n is a, c, g, or t
  misc_feature (451)..(451): n is a, c, g, or t
  misc_feature (470)..(470): n is a, c, g, or t
  misc_feature (633)..(633): n is a, c, g, or t
  misc_feature (670)..(670): n is a, c, g, or t
tttcctattttatttagcaggcattttctttactgaggtttatattgtctgccaaaactaggaggaaaagaaaatattaacaaccctgaaagctctttcattctgaattattccttaatgtttttaatgatttattataaccacacaaatgtgatcttggggccatttggaagttattgagtttccttggagatgggacttggcattttccaaaccagagtttgcttttgtggcctggaagttgcaaggcatatatatttggaagactaaagattattccccaccaagaagttttgtcaacctgaccttctctactcttatgacgctgcacacacagcagtaatctctgcagaggagagcaaataaagtgaagaaatatagcggtacgtgttatttttacatcctaaagtaaattctncngcnttaaggctgactgggaatttccntctcngagttctcatgaatgctgntccactttggtgttgtctcttgaatgctttttattataggtctttgaaggaggtatttcttggtatttattcagccagagagagtagttgatgtggaatttgggaacacaggggtgtgggagcgctctctgggtgacctgtctctccgttgaccttcaggttntttatgtgcctcaccagtcaggtgaggctagtcaccnattagaacaatgtactagtctggtatgatctttgccagtctaatacttggaatggctcttaacctatgtccgggcaagatggggccccccttgaagccttaacctcggtaaagagagtttctctccgtggttgaggttcccaacgcttcaacccgcctcgcagttctgggtttgggttccccccccaaaaaaaaccgttggggcgtcttccaaaccttgtct

SEQ ID NO: 640326 - DNA, 343 bp, Homo sapiens
tccattgggggctgagaccaccccttgctgcccccttctttctgccttaagaatgtccttttaggctgggcatggtggctcacgcctgtaaccccagcactttgggaggcggagacgggcagataacctgaggtcaggatttcgagaccaacctgacctacatggagaaactccgcctctagtaaaaatacaaaattagccgggcatggtggtgcacgcctctaatcccagctactcgggaggctgaggcaggagaatcacttgaacccgggaagtggaggttgcagtgagccaagagtacaccactgcactccagcctgggcaacagagcgagactccgtct

SEQ ID NO: 640327 - DNA, 487 bp, Homo sapiens
ttttttttttcgcattttggaatatctgcatatacataatgagctatctttgggatgggacccaagtctaaacatgaaatacatttatgtttcatatataccttatccacatagcctgaaggtaactgtatatgatacttttgataatctggtgtctgaaacaaagtcttgactgcattttgactgtgacccatcccatgaagtcaggtgtggaattttccacttgtggcgtcatgcaagtgctcaaaaagtttcggatttggcagcattttggatttcaagttagggatgcccgatctgcacaactgttcattccagcataccacagggccacaagagaggcacggcaatggctcagcaactagatttgggcaatgagaggggagaatgggagggaaggagagaaaggcagaaagggcaagggggcagggcgctacagatgcagagcaggccaccaggatacccagagcagcggcatggtgcagag

SEQ ID NO: 640328 - DNA, 1138 bp, Homo sapiens
agcggctgtttactgcgaactgggttttgccagccatcaacacacgagtgtctgtgaaatactacccctaatagagccaacaatgggcaataggaacatcatcgtcgatatcaacatctgtcgtcgattgtgcacaccgctagcattcgggggcaacacgtccaccactacctgggccactctgactctcataaatgcagcgatgtgcactctggcacaaaaagcaacctagttgaggacaagatgttcgagcaagggagtgcgtgactgagcatcgggaagaggggctcctatcaggctatggcctgagctctctgggaatcaaacctgacatagcatgcagcgtgaacgatgagtactcggccacttgaatagtctcacttgtgtgaaattggagaccgagccagtaacgtaatgtgacttatcgattaagatgttcccagggacgacagtaggacttcatcaaagaacttgattgaccgggacatctcacggctgacatgtgcctagtcctcgacttagtgggctgctgggtgatcgggtcgacattttagaacgtcgtaggtaatcgtccaatgaattgggcacgagcccgaggaagcatagcccttctaggccttacatcatgtgcggctgtgaagacaaactaagtctagtcgcgctgtgtgacacaatggcactgggatatcgcgacatggaagtcccaactcactaacaagcacgaggttggaagcaatagtgccacgggatggattttgccttaacgggaaggtgcaacgaacctttacccactttaaggcaaacgggttagggaactacagaaacccgggggaccataaggaagccattttggtgccaagtaatcttgggtagggaacatggggttcgagcgagcgctagcttggagaaggcccaaaagttggctaaacccaaatggccgcttgggtttgtccaccgtgtggaatgagtgaaaggaacaccccccggacacgggagttcgggcaaattagcgaggttggaaagccaaaaggcatgggttggagaggctctctggacactagagtaccaaaaccccagcccaaaagtgtaggtcccaaggttggaccaatgccctttggagcgcgtggcggtctccaag

SEQ ID NO: 640329 - DNA, 97 bp, Homo sapiens
agaagatggtgagtgcagcattgatgaagaagtacatccatgtggccaaaatcataaagcctgtcctgacacaggagtcgccacctacattccagag

SEQ ID NO: 640330 - DNA, 426 bp, Homo sapiens
gacgagcttatgggatcttttctaaccggggtacatcacgaggcccgcgacacccccgatttacagaagtcgactgagccattgaagcaaatttagagacacgaaatatgatgagatgggtagctgtaccagtcaagcaaaggcctttacagcgatatgcccggtgaaggcgtacgactcaatagaccgctcaacacagtttcctcggatactatattatatgcgctggaaatgcataagagctatatcctactaatagacacgtctctcggtcagctattgatcaaccgtaactcgccgaactaatgcaagttagaccacgagattacggacgctaaagattactggcctgaccgcttcagcaggcctcatgccctaggacgtcacataatatgagcctcgggctagataactagagcttcggcc

SEQ ID NO: 640331 - DNA, 810 bp, Homo sapiens
ggattctgggttgcaggtaggcacggactaggttcatctgtctctgtgtgagcattccagacgctcccagggcctggcggggccagcttaccctcatagggcttggttctcacagtgcccagtcgacaataaaccatgctgccggcacttagtaacagagctcaggccgcgtatagccagccgtcgcgtccctcatcagtggggtgcccgtcatgccgtggggggttcgctgccagaccgtcaggtccagggtgttcatgcagagcaaggtctcatgtcataggttgctataggccgcctaggggacacctagggcagaggcaccaaggtcacgaccgtccgcagagcttgccagcgaagtttctagctttaacttattactggagagcgactttctggtttccgtctcttacacgtagacaagcagctcaatcgcgcgtcttgccaatgtcccccttgttggtggctcattgcgtggcaccaacgggttccctcgcgtgtgccccctttgtcacttcgtgtgcatcactggctatccacgcgataaggtggggagatcagctcaaagactagaaagtactgtggcaagcgcgtcggaaatgtgacagagacgtgtggccccagaacatacttccaatcgccagccaatctccccgtggggtgttggaagggcctgggcccaattgttccctggagctgaaaagcagtgccgaccaggttcaccccaaccttgctggtgtgcgcgccagggggttgtgccccgtctcccctgtggggcgtggcaagcctttggggggagaagcctcccca

SEQ ID NO: 640332 - DNA, 225 bp, Homo sapiens
ctcggtaccctgccagtagtctacaattcattgcattttcgttctgcacaagctgcatacatttgagatactcttgcatgtacttggtgcattcgccgtcgtggtctagcgggaacgaacctctctcgggtggagtaggtctcaatgcgctcagcgagcttcctgggttccctgacattggattcttgtgttatgtttcgtaaaagatactttgtgtgtagtggg

SEQ ID NO: 640333 - DNA, 370 bp, Homo sapiens
  misc_feature (178)..(178): n is a, c, g, or t
ctcagtgcgcttcgttgtcttctaagctgtagtctagtccgactccctatcatacaatctataagacacgcaggactttcccggtccccagtatacataattgaagaaaaatgatggaagagagtgcgatagagacaataacacctggtactcctccaccaaatcctgcagggctggntgctactgcgatgtcttctacccctgttccattagcggtaagcaggtctttttcttcttccaattgaatcgtccacggagtgcgttcccatcactcgaatagtatactccatcagtcgacccttccttctgtgtgggcgtgcctcaccataactatctgtggctcctcctgcagtcccttctgtcgtcttct

SEQ ID NO: 640334 - DNA, 150 bp, Homo sapiens
aatcgagctcggtaccgtcctcatctgcctcccatacctacgcatctttacataacagacgaggtcaactgatccctccctttaccatcaaatcaattggcaccaatggtactgaacctacgaagtacacctgaacttccgtgcgagtac

SEQ ID NO: 640335 - DNA, 180 bp, Homo sapiens
cccccaaaaaatttttttttaaagggggggggggggggggggggggggccccccccccggggggcgcccccccccttttttcccccttttttttttttccccttttcccccccggggttaagggggggccccttttggggcccttggcccctttttttaccccgggggggggggggggga

SEQ ID NO: 640336 - DNA, 399 bp, Homo sapiens
acacctagcgtcgggatggtccgggcagtccaaccatcccagggaattcctttaataccctaaaaattacaatgaattataattgggtctattcttattatttaacatactgaatcccatctccttcagaaatcatctcttttaacaatctgtttcacctttaaaaaaaaaatctcttaggagattattcttcaccttggtctatttagccacacttataacccagatactatttgagccagttctctatgtagagaggtatatgggataccacaggtggcccacgggacccagggcagcagattacaattggggatttgcagcctattggaaaaatgtggcgcttattttggagcaaaggtaaagaatttttaccccagcattgggaacacgcaacaa

SEQ ID NO: 640337 - DNA, 291 bp, Homo sapiens
  misc_feature (112)..(112): n is a, c, g, or t
  misc_feature (166)..(166): n is a, c, g, or t
  misc_feature (223)..(223): n is a, c, g, or t
cttgctggaaaccaggcgggaagggtgagtctcacgaggagaaatcgtgtagagctgaacttgacgcctcagtgatatggcagcccacacgagcagtctggattatgtcatntgtggttttaatttttgattatgcaagtaacaacatggatagattccccttgtngaaggcttgactttatggctgtggccagtccccttagaccctcatcatcactggtgntccctctccagcctgaagctgctcgtcacgacagttggcgatgcatttgtcgatgtgcgtggacaggt

SEQ ID NO: 640338 - DNA, 409 bp, Homo sapiens
  misc_feature (392)..(392): n is a, c, g, or t
gttttttaagcctgtcggaaaagcacagtatttgggtgggagtgacccgattttccaggtgacccgtttctttgactaggaaagggaactccctgaccccttgtgcttcccgagtgaggcaatgctcgccctgcttcggctcgcgcatggtgcgagcacccactgacctgcgcccactgtctggcactccctagtgagatgaacctggtacctcagatggaaatgcagaaatcacccgtcttctgtgtcgctcaggctgggagctgtagaccagagctgttcgtatttggccatcttggctcctcccccttctcttttgttatggagtgggtcagggatgtcctctccggggtggtggtattttgagcagacatatgggataaagtatgggnagtgacacacaaatttt

SEQ ID NO: 640339 - DNA, 400 bp, Homo sapiens
caggatgactgatccgcttaagggaactgaaggcgtatgtgattgggacaaaaaccaaatgataatggattttataggccttgttgtaggtattctctagatggaagcatgtgtactatagccataacatattcatgtttcatttcacgctatcactttgactgcactttggaaagtggtttggccttatacgtctggaagcaagaacaatcacttaagaaaagctgttgcagtaaatctaaataggatgactatagctagaaccaaggaatgggcacaggtagtggaaagaccagattaattatatcataaggatgtagacttgttagaccttgatggttgaatgtgttgtgagatacatccctggctccaccccctactgtaaggtttctgcttaagc

SEQ ID NO: 640340 - DNA, 339 bp, Homo sapiens
  misc_feature (23)..(23): n is a, c, g, or t
  misc_feature (43)..(43): n is a, c, g, or t
  misc_feature (49)..(49): n is a, c, g, or t
  misc_feature (123)..(123): n is a, c, g, or t
  misc_feature (129)..(129): n is a, c, g, or t
  misc_feature (170)..(170): n is a, c, g, or t
ccccaagtttagtgccaaaatantgatgaggttttactgcccngtgatnaattatatatacatgctgtgcatggtggctcatgcctgtaatcccatcactttgggagcccgaggcgggtgaancacttnaggtcgggggtttgagactagcctggctaacatggtgaaancctgtctctattaaaaatacaaaaattagctgggcttggtggcgcaggctgcggtcctagctactctggaggctgaggcggaagaatctcatgaacctgggaggcagaggttgcagtgagctgagattgtgccactgcactccagcctgggtgacagtgagattgtctc

SEQ ID NO: 640341 - DNA, 139 bp, Homo sapiens
aagaggaacagagcttgtgccaactgtcaaacttgaaaattgtggacttgttcagtgaacagacacgggtgaatgctgctaaaaacaagactggggtatagcggtggtatagatgtggtataggggtggtatgagtggt

SEQ ID NO: 640342 - DNA, 745 bp, Homo sapiens
  misc_feature (10)..(10): n is a, c, g, or t
  misc_feature (31)..(31): n is a, c, g, or t
ctggcgcgcntacggcgtccaaatcttaganggctggaccttgataatcatataaatcgtcatgcattatataatttatgagctactgtactttcacattaattaaaaatattaggagactctaatttaaccacttctgaagaaatgaatggctgatcagaaaatgtcaaattactatcataagcccaagattttatcataatcatgaatagcatttaatcatgaatattattttttaacttttaaaaccatacttacagttttagattaaaatcccatattgagtcaacaagactttactccaaattatagccacatatggaagaaaggttttaattcaatattttattatagtccacgcctcactgatccttcttatgacggccacctgatggatacctaccctaagaaatatgctgtctcagggtggcgcctgctcactaaacctgcactgcacctcgcgactatctttaccccgcacctgtctttctgccaccttttcctctttgctctagcttctctcggcccctgagtctcattacttatcccatcccatttctcctcccgcaactcgataatcccttcaaccccgccggcagtcatcccctccccacataccctaacctccctgctgtcgcccgccgaaccccgatcccctcccgtccttgaaactgttgtttgcatcaatgactgtattaattaattgttcctagttgtatagtccccgagagataagatgacatag

SEQ ID NO: 640343 - DNA, 204 bp, Homo sapiens
  misc_feature (53)..(53): n is a, c, g, or t
ggggggtggcgatggttccgagggaggggagggagggagatttagcggcacgnctctcttatctaccaccggtacaccaacaagatactcaaagcttactttgtagtctcttcaacatacttgagggggtggccacgtgaagaatgccgtgacagatttcagagccacgcccttgccattctgctgtgcagggtccttgctgct

SEQ ID NO: 640344 - DNA, 289 bp, Homo sapiens
cggtacccgtcagacgctgaactatgtgaatattaagctaagtggaagaaaccagtcacaaaaggtcacatattataagatttcatttatatgaaatgtccagaacacgcaaagctatgaagacagaaaccctgtctctactaaaaatacaaaattagatgggcatggtggcatatccctgtaatcccagctactcgggaggctgaggctggaggatcgcttgagtccaggagttctgggctgtagtgcgctatgccgatcgggtgtccgcacatagttcagcgtctga

SEQ ID NO: 640345 - DNA, 388 bp, Homo sapiens
  misc_feature (3)..(3): n is a, c, g, or t
  misc_feature (13)..(13): n is a, c, g, or t
  misc_feature (29)..(29): n is a, c, g, or t
  misc_feature (58)..(58): n is a, c, g, or t
  misc_feature (64)..(64): n is a, c, g, or t
  misc_feature (69)..(69): n is a, c, g, or t
  misc_feature (74)..(75): n is a, c, g, or t
  misc_feature (86)..(86): n is a, c, g, or t
  misc_feature (92)..(92): n is a, c, g, or t
  misc_feature (117)..(117): n is a, c, g, or t
  misc_feature (119)..(119): n is a, c, g, or t
  misc_feature (125)..(125): n is a, c, g, or t
  misc_feature (138)..(138): n is a, c, g, or t
  misc_feature (143)..(143): n is a, c, g, or t
  misc_feature (163)..(163): n is a, c, g, or t
  misc_feature (171)..(171): n is a, c, g, or t
  misc_feature (177)..(177): n is a, c, g, or t
  misc_feature (180)..(180): n is a, c, g, or t
  misc_feature (188)..(188): n is a, c, g, or t
  misc_feature (240)..(240): n is a, c, g, or t
  misc_feature (242)..(242): n is a, c, g, or t
  misc_feature (252)..(252): n is a, c, g, or t
  misc_feature (256)..(256): n is a, c, g, or t
  misc_feature (321)..(321): n is a, c, g, or t
ccnccaaaaaacntgggaaacacactgtngcgcaaaccactaagtgtttctaatcaanatgtgntggantcccnntttttggtaanacatgnaacattgaaactgttcccctgaatntnaacctnatagattaaaaanctaanccatgtggcaatgaccccanttatttgncgaaancgnaggagttnaaaaattgttgaacagctgtacccttagacctcggaaagtaaacatttcacnanctgatatcanggtnactgacaacctgagtgcaggtggactggagatgttggctgagattttgtggatgccaaccctggntcgtgtgtagacagggaaaacatgctcccaggctatgtcctgaagcttcacatgtgcccatttcatt

SEQ ID NO: 640346 - DNA, 856 bp, Homo sapiens
gacggagtcccgctctgtcacgcaggctgcaggctggcgtacagtggcgcaatctcagctcgctgcaacctccacctcctgggttcaagcgattttcttgcctctgcctcctgagtagctgggattactggcacacaccaccatgcacagggagatatgagacatcaatcaatatatgtaagatgtacatcagtttcgtctggaaagatgggacaacatgaagcagggagggggctccctggtgacagttgcaggaatttagccaattcagaggtcttgttctccataatttggaattttccttcggatttgatccagttggatagagttggtcaaacccaatgggaaaaagatgaaaacaacaagaaacagaaacaaacagcaacaacaacaacaacaaaaacagttaagtgaaacaaacaaacaatcacacaatttatgtggtcactgagtgctctaatagtaaggagaaattaagaccagctggctgttagtcttaactctagcccagacctccaattcagctacttacctagtaatgagtctcaggctgaagtctgctctctcacatcctagaagcaggaaacaactgaaactcatcttcccggagggaacgagctcaactcccgaacggagtacaggcttcatcatcaggcggcggacattggcctcctggtggcagaagtacctccacaagagtgccggcataactgatccacattgggacagccccgggacggtgcccgccccaaggtaagggcccaaaccagcgccccgataagtaccgacctcaactgcacgtccaactgcgccatgaggccccccaggagagatttaataggatttacgcccctcc

SEQ ID NO: 640347 - DNA, 554 bp, Homo sapiens
ggaaattcccgtatcatagctaatagcctcgaagggctctcggtgacgaggtattcaagacgggggctgagaaatttattcttgaggcagtgcgtgctgacactctcaagctgtgatgttgcctcttatttcactgagtaatgggaagcaaacaggacctccacctgctcccagaaccacaactttgctccctgcgaccttcctgtgctcctaacctaagtccaatccctctcctctgggtgggacatgtatcgaagaacgccctctggcagttgtgcgcattctctgctccccactaatatttccttcttgactgggttatttccagaagcgtgcaaacatcctctaccatctcccagtgctaggtgggactcttgaactcactttccactccagctgccaccccatttctctttatctcttcatagcaaaactccttgaaaggatagtctatacttgctgcatccattcctcctagtctctgttgaactctgtccactggagcttccctcctgaaacatgctcccaccccaggaacagttcctatcaaggtc

SEQ ID NO: 640348 - DNA, 378 bp, Homo sapiens
aagaggtaagacatctgcgtaggcaccatagggatatagtaggcgaacaggcggcatccagacagtacctcggcaactagtaggaggaaggcagggtagaagcaggtcagcgctataggcccagtggctgagtcgcccaggcctttcgtggagccccgcttgggtcctgactctgaagctagggagctcatacatcaaaacagcttcaacgaaagctagactgtggcagacagaaggacctccagctagtacctagctaccaagcaaagccatgtactcagagtgcccaggagcaccccacctacatcctccagaaccaagctcagggcagctctccctcagccctccccagactggctccagacccgtgccctccat

SEQ ID NO: 640349 - DNA, 481 bp, Homo sapiens
gccggaaatgccggggtcgactaccactatacattttcggccgtgtcgtttgaaagtgctgtcagtaacccagcctaaacccccaaacagcaagcaatgcaggtgtagaagcacggtggctaggaaaaactccctagaaaggccaaaacctaggaagaaacctagagaggaaccaggctatgtggggtggccagtcctcttctggctgtgccgggtggagattataacagaacatggccaagatgttaaaatgttcataaattaccagcatggtcgaataataataaggcagaacagttgaaattggagcagcagcacagtcaggtggactggggacagcaaggagtcatcatgtcaggtagtcctggggcatggtcctagggctcaggtcctcagaaagagagaattagagagagcatatgtggggtggccagttatcttctggctgtgccgggtggagattataacagaacgtcgacgc

SEQ ID NO: 640350 - DNA, 430 bp, Homo sapiens
ctaacggcaagccacaagtggtgcgcagaaattgtcatccgccaagaccatcatcagatgcaggttattagcctaccgcagtgcatatgccatagcgattgccaatctcggctttcttcagagcatgaccatctttcatgccttcgcctgtcctagctttttcctggtcttaagactgaagaaattctacatttagacttgtgtgacggttccctcgagctaaaacagcgggcgttcaggcaggcgtctcgctaggcggaggggtccgagttcatcaaactcccggcctgtgaaagcttttgacgtcacgtcctcatcctgcccgaagatgccgatgcggcgacagatggccacagcagtgcccttgttgtccccagtggtcatgatgacccggatgcctgcttgccggcacagcttcacggaggaagcc

SEQ ID NO: 640351 - DNA, 137 bp, Homo sapiens
actagaggatcctatccccggatctgggtacagcagcaagcgttgatctcaggcacttccaggctgtcctgtatggaggctgacgacgtcacagctccttacagccttcttgagcatctccgcccaaagccaggcct

SEQ ID NO: 640352 - DNA, 304 bp, Homo sapiens
ttcccacttggtaaacataccagtgtccagttgtacataagtgacttttactgtatgcattcaaggtaacaggtcgggctgggtgtgatggctcatgcctggtaaatcccagcacatttgggaggctgaggcggtgcagaccacttgaggctagcgagttcacgaccagtctggccaactatggtgcatagctccgtctctgttaaaaatacaaaaattggccgggggtggtgacacatgcctgtagtcccacctacttgggaggctgaggcacaagaattgcttaaatctggggattggaggc

SEQ ID NO: 640353 - DNA, 208 bp, Homo sapiens
aggtgatcttctgctgtgtagaaccatcaccctactcctacattttacttgtagtgtggcatgagcggtggtcaggaccacacgtcctgtctcgtaatattgtgaacttcgtttccgccttgcatcgcagacctcctacgcctcgtcgtttcattgcttccacaacccattgtgggcacgaaggacctcgcgctactgctacgtgtaa

SEQ ID NO: 640354 - DNA, 271 bp, Homo sapiens
tcccgggccaggtaaaatttaaacatttttttaaaaagttaaaattccccaaccccaggggagaaagggttttagccattgaaggacgggttgaacccaggtccttttggaacttaaaaaacttttaaacccctggccccctatagggaggcgtattaccccacccatggttttgtttgcccccgggaccccatgcataaactgttaacaataaaaatgggttcgaaaaaggggggaaaatcaatagttgccactaaaaaagttttggagg

SEQ ID NO: 640355 - DNA, 591 bp, Homo sapiens
agagatcctccagatctgggccccagtcttcccattttacagtgggtgctttgcccagcatgacggaggccctccctggacgtaatcctcaatgttctcactaccccacacacttgcacagaatggatgatttatttcataggttacattataacctcaaactctgcctaggcaggaaaagcaaagaggtatggcagtctgctctcctcgggtgacttctgagcttaagaccaccatactctgcatatcttgaatttttgacttttatgtccaagccctaagatgttcccatatgctgggcgtggtgcgtgcgcctttaatcccagcacttgggaggcagatttctgagttcgaggccagcctggtctacagagtgagttccaggacagccagggctacacagagaaaccctgtctcgaaaaaccaaaaaaaaacaaacaaaacaaaagaataaatatttaaaacgtagtagttaggatttatgtggggttaataaagtagttaggatttatgtgggatgtaggtttttcaagattcatgacttcccttaccctgggagtcgacgcggccgcgaatatcgtagtagtagta

SEQ ID NO: 640356 - DNA, 621 bp, Homo sapiens
  misc_feature (351)..(351): n is a, c, g, or t
  misc_feature (368)..(369): n is a, c, g, or t
cccaattatatggccagttttagagaagattctgtgaggtactgagaagaaggtatattcttttgtttgggggtgaaaggttctgtagatatttgttaagtccatttggttcaaaaacatgttattctcattgtttctctgtttagtttctgtttcgatgacctgtccactggtgggagtggggagttgaagtcccccactcttattgtgtggggttcaatgtgtgatttgagctttagtacattttcttttatgaatgtgggtgcccttgcatttggggcattgatgttcagaattaagacatcatcttgaaactgggcgtggtggcgcacacctttaatcccagcactngggaggcagaggcaggnngatttctgagttcgaggccagcctggtctacagagtgagttccaggacagccagggctacacagagaaaccctgtctcgaaaaaccaaaaaaaaacaaacaaaacaaaagaataaatatttaaaacgtagtagttaggatttatgtggggttaataaagtagttaggatttatgtgggatgtaggtttttcaagattcatgacttcccttaccctgggagtcgacgcggccgcgaatatcgtagtagtagta

SEQ ID NO: 640357 - DNA, 411 bp, Homo sapiens
tgcattttgactggttgtgcttttgagtactggtcttctcttgcaaagaaacatttccttaagggtgaggagtatactatctgtgcatataagaataaatacttagcggggcggtgctggcccatgtctttaatcccagcactttagaggcagaggcaggatttctgagttcgaggccagcctggtctacagagtgagttccaggacagccagggctacacagagaaaccctgtctcgaaaaaccaaaaaaaaacaaacaaaacaaaagaataaatatttaaaacgtagtagttaggatttatgtggggttaataaagtagttaggatttatgtgggatgtaggtttttcaagattcatgacttcccttaccctgggagtcgacgcggccgcgaatatcgtagtagtagta

SEQ ID NO: 640358 - DNA, 571 bp, Homo sapiens
  misc_feature (301)..(301): n is a, c, g, or t
  misc_feature (318)..(319): n is a, c, g, or t
gccatgctgttgttgctggatcccaaaggccagggccactcagagacagccagttctgaggattccctctggagtgtgttttcacaccaatagaaagaggctctcttttctcttggtgacttttccaagccatttagccatgagctgtaccatggtgtgctcttcatgaacaccaaatcattttcaggctggtactgatatgtgccttccttacgtatcttgtccacacatttgctggctaacccagaagtcttagcagatgtgaagtgtccaggttaagaagtcactgctcccagcactngggaggcagaggcaggnngatttctgagttcgaggccagcctggtctacagagtgagttccaggacagccagggctacacagagaaaccctgtctcgaaaaaccaaaaaaaaacaaacaaaacaaaagaataaatatttaaaacgtagtagttaggatttatgtggggttaataaagtagttaggatttatgtgggatgtaggtttttcaagattcatgacttcccttaccctgggagtcgacgcggccgcgaatatcgtagtagtagta

SEQ ID NO: 640359 - DNA, 564 bp, Homo sapiens
  misc_feature (121)..(121): n is a, c, g, or t
tttcaggaagaattgtaggctatctaaaaagacttgacagttcagcaatacagaggcttgcaaaacgttgggagccacctgtaaaaggtacaagataaggagggaattaagggctgagttnattggagttaaaacagaaacccgaatttttagaggaagaagagaaaggaggaacactgttgatttgatactgtgactggtccttggagagttagattaagtagcactgatttttgcctcaggtggtggcacacacctttaatcccagtactcgagaggcagaggcgagaggcagagaggcagaggcaggtggatttctgagttcgaggccagcctggtctacagagtgagttccaggacagccagggctacacagagaaaccctgtctcgaaaaaccaaaaaaaaacaaacaaaacaaaagaataaatatttaaaacgtagtagttaggatttatgtggggttaataaagtagttaggatttatgtgggatgtaggtttttcaagattcatgacttcccttaccctgggagtcgacgcggccgcgaatatcgtagtagtagta

SEQ ID NO: 640360 - DNA, 525 bp, Homo sapiens
tgctgtctagaggaccccgttatccgtacagtggtacatggcacatagtgcaaattctataaacatttgtagaatctatgtccatagaagctgcaacatggaaaacgagctttcaaattaaagcaagacagacaccagtaagacacaaaaggaattacttgatagtcaaagtaaaatctatacattgctgagtgctgtgggtctttaagaagagagtcactcatctgtcttaggggttttacaaattcactagcctaagtaatttatagtggttattcccaacaccatgatttaatacttcacagcatagaaatgaagtctggctagttataaataaatgatcactgagctattatgtgccgatcaatattctaatgctttccatgtatcagattatttaatcttcactattctatgagtactattctttttttttatctataaaatggtactctttagtcccaaaaggttaaataattggcccaaagttgaccagatcatagctggtggatctgggacttaaat

SEQ ID NO: 640361 - DNA, 497 bp, Homo sapiens
gcgtcgacgtcttagtcagtgttctattgctgtgaagagacaccttgaccatagcaactcttataaaggaaagcatttcattggggctggcttaccgtttctgaggttcggcagagagaatgacaacatgcaggtaaacatggtgctggaagaagtagctaagagttctacatcagaatacacaggcaagccgggagtggtggcgcacgcctttaatcccagcattctggaggcagaggtaggcagatttctgagttcgaggccagcctggtctacagagtgagttccaggacagccagggctacacagagaaaccctgtctcgaaaaaccaaaaaaaaacaaacaaaacaaaagaataaatatttaaaacgtagtagttaggatttatgtggggttaataaagtagttaggatttatgtgggatgtaggtttttcaagattcatgacttcccttaccctgggagtcgacgcggccgcgaatatcgtagtagtagta

SEQ ID NO: 640362 - DNA, 1575 bp, Homo sapiens
  misc_feature (1)..(1): n is a, c, g, or t
nttcgcgttttggttgcggagtaagtgggtcgttgttactaggtatcgactaatgtttcaatacacgagctttgtgggggatattctagcttgtgtgatgtgatctattctattagacacttcggtgtgcggataggtgtcgagtcccctgttgagtgagagattccataaatgtgttgttttggtatgcgagagattgcgcccaaagtcatgacgctcgtttcttaggtgatgtctctctgctatctcgattggtccttgctccatattgttcgttctgttcgatgccgccctgatgctggaacggcttaaaatattgggccggggtatcgatacgcataagttggttccgccctacaggacatcggtgatccttatgcttttaagggcgatgctggtcctcatatgaatagggcgaaactattatcgcaagtgatagggccttccctctctatggagggtccctgccacgtgtttgctgctccctgggcgctctttgccttctcgaagccttcaagattacttccgcgttcacatcgaggcggcggtgatagtgctttttgccttaaatactacggtcggttagtaataattagtcaagtgccaccgtgttggtgagttgcctctttccaactcggattgttgccgtcctgggactgctgttgttccagaggtgaaacccaaatattttccttggtaaacatcataggttgatagaaatcgcatgtgcgaaaactatatggtctatatttcggcgaaggcgtttctaacgtccagaatcgctctctgggcatatgtatccattcgaatcgttttgtaaaccaatggacctcgatctttgtatacttacctccctacgtttgcgtggtcggaaacctgacagtcagcgcttcagtcgaggctcagcccttgacaaggaggcggtcacactcctcgctcagtgattgacaggatcagggagatcatgcatcagaggctctctctcggaattattctgtctttcatgtggttcaagagtatctgtgttggccattgaatgtctttcaacgcagactgagatattctggtgcgcgtattacgttgttccctcttgtcttgtattgaattcgttagtgcttaaagcttgcttggacctggtccatgtggttttaagcaatagctcaggtgacgttgaccggcacctgtgtaccaagattctttaggaacccctttgttaacgcgcaggagccgagggtgtcgcatgggtcacctgtgttcagcgcactcagtggcttatcgactgttcacccgtgtcttgtcgcctcgtatctggcgtctccaagtagcagaagggcttaattataaggacagagaggatgaacgtcacctgtaaacctaatctgtgcattgtttttaccgtgccttttctgtgttcacgtgcagaaattaaaagtaagtataaagcaccgtgattgggagtgtttttgcgtgtgtcgggaatcactggtaaatgttggctgagacaatccctccacattgcatgttgtgaaaacacttgagcgcttaataacgcctagcctgagaagtatattcttc

SEQ ID NO: 640363 - DNA, 132 bp, Homo sapiens
agagtatgctctggattacagtgctgaggccgtaggtctaagaccaaggaagcacgccagcgcgtgaagagcgtctccaggcgaagaaggaggagatcatcaagactttataccaaggggatccatctagag

SEQ ID NO: 640364 - DNA, 200 bp, Homo sapiens
ccatgagaagagacgagatgtacaagagaagagaggatggagtttgatttatccctcctcccccaacacctaggatctgaatctttttctttttatcttttgagatggagtctcgctctgtcgcccagccggagtgcagtggtgtgatctcagcccactgcaacctctgtctcccgggctcaagcaattctcccatctcg

SEQ ID NO: 640365 - DNA, 262 bp, Homo sapiens
acagggtaattgcccccccctcccaggaaaattgaaatagctacatgcccataatgtgtttaaaatgggggatgctcttgaaaaatttaaagttttggcagtaaaaaactctgtttttaaggatgaatggatttcattcatatttcctctcccaaaggaaaatgacttcaggatagatttgtttttattaaaaagccttttttatttttaaggggtaggaagcaacatccaaaaatgcttaataaaatgcttttaagctgca

SEQ ID NO: 640366 - DNA, 254 bp, Homo sapiens
  misc_feature (116)..(116): n is a, c, g, or t
  misc_feature (142)..(142): n is a, c, g, or t
  misc_feature (200)..(200): n is a, c, g, or t
  misc_feature (211)..(211): n is a, c, g, or t
  misc_feature (214)..(214): n is a, c, g, or t
  misc_feature (232)..(232): n is a, c, g, or t
  misc_feature (249)..(249): n is a, c, g, or t
gaaccaggattgaacttttcagcctctatggtaaaatttcctgctctgtcggtgcgcaaagcttttttcagtttcctaaactcccatattcaagaagatagctattttctcttctntctcatccttccttgacaagcaagcntattttcattgtctactctgtgtcatccatgctggttcctgtcctcaaagagcttatngttcaaataanggngagggagcattttacaanggtattaaaggtaaaanattct

SEQ ID NO: 640367 - DNA, 340 bp, Homo sapiens
  misc_feature (13)..(13): n is a, c, g, or t
  misc_feature (243)..(243): n is a, c, g, or t
tctagaggatccnctattacttactcgataccgtatacttattaatattaagctagataataattattattattaatattattcttcttcttagaatgattattcaataataattattatctagcttaatattaataagtatacggtatcgagtaagtaataaattacttaagtaatttattacttacttactacttatgtaataaattattatttgttatattatataattttatttctttntatacttaataatttattatctattcttattcttattcttcttcttattcttattactattattactattcttcttattagaattattctggctgac

SEQ ID NO: 640368 - DNA, 429 bp, Homo sapiens
cctattatggactgaattgtgttcctcaaattcatatgttgaagtgctaaccccaagtaccaaatgtgactgtatttggggatagggtccctgaagaagtcactcagctggaaggagtcatattggattaggtgttgggaattggctggccaagggagaaatcaaggctggaaaccaagtgctgaactctcacatcaggtcctttgctcctgttccctggaccctaatccaatatgactggcatctttatatgaagaggaagaggcaccagagggtacacacgcagagaaaaggccatgtgtggacacagtaagatgacggacatctgtaagccaaggagggaaacctcagaagaaaccagccttgcctgcaccttgatcttggaggtccagtctccagaactgtgaaaaaaatgaactggtgttgttt

SEQ ID NO: 640369 - DNA, 228 bp, Homo sapiens
ccatggtgtcagactgcaaagtggttgtggttatgtcaaactggttttggttctgatggttaggaagaaacaggtcgagcctctcagtatcacctggcccggggacagtgtgaccccctagaagcctggctctgccattagctaggacctaagactctgtccacgattttggtctgttctctcccaatacacataggtttgtctcagcatgcaatgagtttttccttt

SEQ ID NO: 640370 - DNA, 281 bp, Homo sapiens
  misc_feature (259)..(259): n is a, c, g, or t
ctgaggtgggaggatcgcttgagcctaggaggtcaaggctgcagtgagtcaagatcatgccagcgcactccagcttgagtgacagagcgagaccctgtctcaataaaaaagaaaacctccatgatatatgacataaacattattttaaggaaaaccattttaaatattgtttttaacttttatatgtcctcaaatgtgaaaaactttaaagagatgtaaaaggcagatggccttttgatggagattccaggtgaatgantgagcatttcaggcagctgcgt

SEQ ID NO: 640371 - DNA, 487 bp, Homo sapiens
agaataggtgcggggagggcccagacattgaagctcctgcgccgcgggtgcgtgagggccccccgagagcactgcccccctcgaggtctagtcgagcagggatggctcggctgagcggataagtggtgggccggctgtgcgcagcagggggtcttctgctgggcactcctggcggaatccctggtggagatcggactggccgagatgggatctgaggcgtggctgtgaagaggtcactgttggcatgcacgctcttgtggtccaggccgggatgggattgggggcgccgagaaggaggctgctgcccccacgggaacaggaatcagggggggccctggagtggggcccctcactgctgggggccggccaggggggtgtatgctggacaccggtcggcgctgtggagtggggctgtggctgctggcgctctggagccaggtgtcatcgacaggcgggggtacaggcgtggacacagtgctggtgctga

SEQ ID NO: 640372 - DNA, 827 bp, Homo sapiens
gcgcagtcctccgaccctactgctcggcggttgtgccgcgccccatccgcagctcctcgcccggatgcctctccccggggactatggtggcttctctgctgccgtcagaggcttcaatcttctgcaccgggactacggggacgggagcttagcggggacggggacgaggacgatgacgaggaaactttgagctgcggaccccgagtccagcgggcggcgggaggggtcccctggaagtgacgctgactcagcccagtgaggagcgggcctgtctccaacaggctgcagagctgggaggagacattggagcctcatcccggagaaagggctgccggaggacgaccggacatcgttgtgaaacggttggctgtaccgggagccccgcggaggagggggcgcggcctggctgcccccggccggagcctggtttgtgctcaacgcgggactcccctggctcagttcagcagcagcgggacaaggggcgcggcgtctcgtagaggcctcgtggatacaccagcccttgtgctcggtgacccggcccagagacgcacggcgtacggacgacctggtctgtggtcagtgacgtgctgtcatgggtcggaaacaaccagtgatcgctcttgtcccaacgaccaggcagaaggcttgcagcagatgcgggggtggcattgcggggaacagtggatcggccgtaccacggggaccactggggacacccaacccagtaatgttcagggactacagcaacgttgggggcacccaagaggccggtgcctcaattcacctcaaggacccgagtcctgagacacaccatggagcttgtatgc

SEQ ID NO: 640373 - DNA, 994 bp, Homo sapiens
ccaggacctctggggacaccagaatccacaaatgctgaagtcccttatataaaatggcatagtatttgcatataactgatgtaatcttcccatatatcttaaatcatctctagattacttacaatcacattcagtcacaatgtcaacatgctcaactaaatcagtagcattataatgtctcagggcacatcaataacccagaaaaaaaagtctgtcatatgttccagtacagatgcagctttgattacctgaatatttcacaggtacaaggtatggttgaatccatggatgcagaacccacagatccagagggctagactgtcgttcgtatacaggtgttatatcaggagaggcaacattggctcttccaccttgtactcttccctcctagcagagcttgtaatccagaccacttctttccagatgattaggggtgaggggctgagctgctggatatctgatatctgggcagtggccactggtcaccggtcacattgcctgactcagcagggacacagtgtcacgaactatcatccttcatctagccaactgcatgcagtacctaacatcgtatcacctcacgcgcaatatccatatccagccgaacctccacccagaccctgaccaccacggcagccacccctcccggacccgcagcggcagcgcgcccccacgcccacaaccacccacacacgcccacgaactagaaagccaacccccacccgcacagaagaataagaatagaacatggaagaagcgactatacaaccccgagcaacaacagatccatgccacaggggctctggcaccacaggcccccatcacaccggtgaataccgacctcccgcccagaccaacacataagtgtgcccacgacacaaccattgacagccaacctgaatcaagcacaagggaccaacagacaccggagccccacactacatcggtcccccccacccccgtacacctcctaacacacacacagtcacaaacc

SEQ ID NO: 640374 - DNA, 1160 bp, Homo sapiens
  misc_feature (588)..(588): n is a, c, g, or t
  misc_feature (1016)..(1016): n is a, c, g, or t
agcggactgcatggctgcacaggagacgaagctcatgaatgtgacgggggtgtctgtacccgacggtgaccgtattcatcagcagctccctcaggtgctttccgtttctaaaactcgatctatcagaccgcagaccatcatccagttcgtctgaagttccagatgtaccacactgtggaccagtgtgttggtgagtaccatgtcctggcatttcgtgtgtggatacctggacgacatgtatggagattgagagaaataggcttgctatatgccaatgcatggagtcattgacggatgcgcctcactggtggtccttctcattactcgcttgttatttatggatcgagctgacgcgggatccaacagtcatttgaaccacaaaatagggcgcctcggccgttgtggttgacgttagttacggacagtagtaccccgcgtgtggtagtagaagtaaactgcgacatcattcacattgcaaagcgccaaccggataccactacgcgtcgaatgactatcgtgttcacgttattctctttccgtggaggcgtcctggcttatgtcttcgtgcccgggtcttcacaccgaagngggagggtatgtcggggactttcagcgccgcgaattgggccctgagggcctgtctccggtttagtcccctggttcggagagcatgccctgtgcgccctggtgccctgccgtccgattgcctcgctttttgactgggccgcctgttgcaggattgctgggacggtgctgggaatcctcaattcacccattcgcccacgggatgcattcagagcattagttttgctaaagggatccttaaccctgaacttctgtcggggacctatgagaggttacatggagaattcgagtgttgcacggctatttgcattgagccacccctgtgtgcacaaacattgatttggcaaaagtggtataatttggggaaaaacgggatttaggtaactgcaatttgaccaagaggctagatgtgatgatgaacaggttgttanatcaaaaagtcaaaacaagtgtagaagatcgagaagggggggaaatttggcgctagggatgggaaaggagagtaaaggggtttggaaccaaatagtatttggagtgcgtaaagagaatttttaccctgtggataagggctccct

SEQ ID NO: 640375 - DNA, 1074 bp, Homo sapiens
taaaagagattttgtgagagagggggggggggggggggggggggggggggggggggggggggggggggggggggggggggggggggggggggggggggggggggtgttttttgggggggggccccgggggggagaaacagcacgggttggtgtgtggtgtgtgtgtctctctctctcttagagagagagagagagagtgtggtgtgtgtgtgatgatgatgatagagagaggtgtgtgtgttgtatctatctgatgatgattaaggggagaggaggaggggagagagagagagagaaagagagagggtgggcgtggtgtgtggtggtgttttaagagagagagagagagagagagagagagagagaggggtggggaggagagggggagagagatatatatatatatatagagagatataataagagagagagagagagaggttgtgaggtggggggtggggaaggagagagagagagagagagtttatatagatatctcctcagcgcagagagggggggagagagagaggaggagagagagatagtattgatagatgatgagagagagaggggggaggcgagcgtgtgtgtgggtgtggtgtgtgttaataagaagagcagacagagagagggggggggagagagagggagagtgagagagagagagagagagagagagacagagagagagaggagagagagagtgctgttatctgggaggagagggagagagagagaggagagatagtctttctgtgatatagagagagagagagagagagagtgttgcggctgtataataaatgatgtggggatgatgagagaaaaagaagaagcagatggtctttgtaggtagtaacgaagagagagaagggagtgagtttgtattgctgattctatttagtattgatctcgtgtcttggtggaggagaccgccagaagacagagtagaagacgaggggggggggggtgagtaaacacctagtaaatgtgtttgttgagtatgaagaagactaggaggattattggaatattaaaacaaacaaaggggtagatggtattgaatgagtgtga

SEQ ID NO: 640376 - DNA, 936 bp, Homo sapiens
ggtcaccgccatgacgcgccggtggttcccgtctgggcgagtccagctgcagggtgccccaggtcgcttcatcagcacagtaggcagcatggcatggcagtgagcgtgtaggcagcgggagggtgtcgatccaggtgacagggcacaggtcctccttgctgtccgaggaggccctgcccggcaagtggggtcacagctcgcattctctgtatggatgctgcatggtattcgcttatctcttccgagtaccctggcaggagtactgggcttacagttgcatcgggcatgtccccaaggacttgtattaccggggttgttgtgtccaatgtgagctgtactttgggtcttgggtgggcacttccctattgcattggcggggctgccccccttgtctcgcttgatttggcgtagaagcatagggcccgctgtgggtaagcatttcccgtcgggcaggcctggtcggtggtcttcgccttttgggtggcttggtggtcgccaccctgggttctggtacaattccatcgattcgcagtgcattttggacagttgcgcaatggtaccttctctcgtgtcgctttttcctctacgggcaccctatgggctacacccgaaggggtcccgggggccttgtggtggaccacgggtggtgcaccttcatttggttgtcagactgttcaaactaattccgccagtggctttggccacagtgattgtccagggtgtggagtgacttcgcaaaggctgctcgagtgtggtattgacttggaacgacccgaggtgtaccccagtggggttcgagacccaggttgtgtggatgcattcccttgcaagcaggttgcggccaaacgaatccggggtggcttgtcccattgaaggggggggggggcaccctctggttacggggaacgggtccaaagggagtggcataacaggttg

SEQ ID NO: 640377 - DNA, 357 bp, Homo sapiens
acgcgcaccgtgtcaaatgattctcctgcatcaccctcccgagtaactgggattacagtgcatgcatcaccacgcccagataaattttttggtattttatagtagagacaggatttcaccatgttggccaggctggtctcgaactcctgacctcaggtgatgcatccgccttgcctttccaaagtgctgggattacgggcatgagccaccacgcctgacctaaaatcatgtatactttgccaggtatttgttacagtatcgtggtttaaagtcttggataacaggtcatgtaggacagtgattcctaaccagaagcatatacaatgtagttgcggggtgggaggggcagatgttttc

SEQ ID NO: 640378 - DNA, 145 bp, Homo sapiens
tggtacccagactctctctgatgtgaaatgggcagtttgggacccagttgagtttagccattgtagaagatactttcgtgactaatgtccagtggatcatatgagatggccccgaaataaaccgttcttccgcaccagtatatgt

SEQ ID NO: 640379 - DNA, 237 bp, Homo sapiens
  misc_feature (213)..(213): n is a, c, g, or t
gaggctgacctagaggacccggctatacattatcgtcaaggacctgtaggaagcctaaagtctgtggcagctattctagaagaagcactgagacactcacaagcttgtcactgcagcacagcgggatgggagatactgggacagcagcaccagtactgagacacgtgactttgtaaacatcgaatcacctctcactgagaggggactcttcancatcagtggatagtgtgataagcg

SEQ ID NO: 640380 - DNA, 385 bp, Homo sapiens
ttacatagatattcagttacatagagactaaacttctatctcttctaaatctgctgatgtatacaacacttgtttcctcaaataaagcactacctattgttgcttcaccattacctagaaagtactagtgtactctgcttaactgaccataacagagggaacctcacattcaaatgaacacaaaatgaaacagactctacagctgaaatcaattcagttggccacctgagaagtatactgggatccgtgcacgttaacgattactaggactatgcagaaaccagagagtttaagaataccgcatgggaatccttgtctttcttcaaactatacataccgacaccctagtacttcccttctctcttcttatcttttcttaattaat

SEQ ID NO: 640381 - DNA, 151 bp, Homo sapiens
  misc_feature (145)..(145): n is a, c, g, or t
ttcacgagtacagtcaggagaggctcgaggatagctatgcaatacccagaagacaccgcatatgcaccactagatagagactaagatagggcatggtctctcgtgtagattgtaacccatatttgcatatagcagagatacatanactgta

SEQ ID NO: 640382 - DNA, 706 bp, Homo sapiens
  misc_feature (277)..(277): n is a, c, g, or t
atttgggccagcttaatcatttattgttggttttccatgactgtctgcaaccggaaagggcatcctgttcaagcctgtttccccacctaacattgtcaccttatgccacagcataccttgaccctgaagatcctgggaagaaaagctgggaggaaaagacacccagcattgcattaccatcgtggaataatctatcgcaaacctaggaaagctgaagccacaaagtccgaaccacctttgtactcacctgcaggagctgccatgaagcatcctctgnatgaggcaagccctagcgctcattgctgctgggtgttgctatattcaatctttacggcttcctgacttctgtgacaggaagccaagtgcaaatacacttgatgagaatttcctcttttaataatgttatttgaacaccacatatctttaaatttattttatttgaaagtattaggtccattgagcctggaaaaccacactcctttagattgggggccgagaggcgacaacccaacattgagcgagagttattattaaacatggctagttggcactatgtacgtgagctaggttttttatgtagtcgagttttttaaacgcacattctggaaactgcttcatctatgcctctttataccatgtaattataaaacactagaattacttttaccttaaaagaggtttaactttgtgagaaactgagtgtgcc

SEQ ID NO: 640383 - DNA, 197 bp, Homo sapiens
gcgcgagcggacgcggcagcgcctcgtctcgctttttcttatttttcccccctttccccttcgtttttcctttccttttctcccctcccccccttacacatcccctcggaggcgcttcccgggagggcgaacggtacacagcaaaaaaggaaagcagaagaagaacagtaaaacagcaaacaaaaaaaaagagaaaa

SEQ ID NO: 640384 - DNA, 161 bp, Homo sapiens
cattacgtttgttcatcacgtcatcatattccagcaggcgcttacggataccaaatgttgttctcttccacttagcgttgtgcacgctcaatacttttgtgtaaccatgctgtgctggatcacctcaccttctttgtgaccaaaacggtccatgatagaag

SEQ ID NO: 640385 - DNA, 211 bp, Homo sapiens
agtgcattcgactcgggtctggaggatctctagagtctgaccaggctccagtgttaacgagtattttggaggtccgtactggctgctcacgtgtcggcgggaacttgtacagggaggcatgcaccgcagtggtgaatacacgtcgaccaggctgcatgtatgcgttcttgggacgtgatcatggttctcctatattgaaggagctgtgtat

SEQ ID NO: 640386 - DNA, 284 bp, Homo sapiens
tgtgatgatccagacgagacagagatgcgaaccaccaaaaacgcacacctgccctatagccctgagacagacacacagcctcacgccccctggaatgcaagttgtttcctggtgcttcccacggaggagttttgtcagccagacttctggaggaattggttgtatagaagatcctagtgaccaaattcagcctactgcctcggatctctccagccgaagtctgtggactgcaagtctttgtgatgcttctggctcccatcccgttgattgggttgacgtcagga

SEQ ID NO: 640387 - DNA, 261 bp, Homo sapiens
gcaatggagtgtgggtccaccttagcctctgacttcctaatgtaggaggtggtcagcaggcaatctcctgggccttaaaggatgcggacttaatcctaagccagcgcccatgttgtgtatccaaggggttttgttggatgggttaaaataactggaaactcagggcccatccatttcctcagatctcctgaaaatgaggcctttcgatagttcggggcagtaaaatgcctcctgcggtagttttcaaggttttggggcttt

SEQ ID NO: 640388 - DNA, 328 bp, Homo sapiens
atgatgatgggtattaagtactcttggcggtagcgccctcttatggtcatgagctaaagggccattgctcctggtctgaaaacatgcctgtcctccagcagcagctcctccagcggcggatccattacttatgtgactgggcacctggacagaaagacagacccagagccatcagcacttacagtaccttggggtgaattagaataagggggctttcccccttatggtatggcaaacggtcctaatatactatttttaacagaacacgggccggtataacaccagcatgtattattatataaatccctatgtggtcctcaaggtgcca

SEQ ID NO: 640389 - DNA, 652 bp, Homo sapiens
  misc_feature (578)..(578): n is a, c, g, or t
tcgctcttctactatgaaccgcacgctcgctgatagctgagaaggtggccctccgtcgatgcagacagcgctgcgctgaattatgatgcctaggctggccttcatatgcctactagtgcctgttcgttgcacatctgtgtctggtgtaccccttcccctgctgatcttggcatggatatgacgaataagatcacatgaacagcatgaaatctcatatgaagtcaccctagaccagtgcgagtgctactatcaagattactaataggtggctcctttaacctctccacccttatctagcaacacaaggaggcacctctgattacgtcctgccatcatgacccgtgggcactagatatgatatatctccagcaactaggcagaagaccgaaaccgaatgcgcccattcgaggcgtgcgcgaacggtggagttccggaggcgtaggtctcatggcttttgcaacatcgaactacgccgacatgttcccgttcgcccgtagttcttcatagccgaatacaggcggacacttggttgataactaaagcacccttcatcactagcaagtcttccttagtgaacngaacatagtgacggccagctcttccccctgaacctcttacctccaacgcagtagttagtgttgaaaaaaccagg

SEQ ID NO: 640390 - DNA, 941 bp, Homo sapiens
  misc_feature (941)..(941): n is a, c, g, or t
gacctcgaacgaaagtctgaccgaactccgggatctacgtcccgaccccaggacgacactccagtgagtctaaatggtggtcgcacactgtgtctccctcctctagcgcccatcgtggtgaattatgaaggagattagtacgagcatccttttcagatgctggagtgggaaagatcgtgagatctttgacgtacagaattgtttgctcgaaaagaatgatgtgacatatcttagtcatttaggatgatttaaggatatagtattcctggtcatttaagaatgtcatgctattggacgccgggagctgtctctgccgacacgtcatgagctcaacatggtcggtatgtaactcacgggccttcgtccaagcgccagcgtgtgagtcacttgtcctagttgcagtccctgtgcttccgttctaacggtgctgcgagcaaagacgagggtgacttgaggcaaatcccgcaagtcctgcttctgacagccaatcgtgggggcccgtacgtccagtgtctagaaacctggcttgaaagtgagatgcgaaggagacgcgtgtgatatcctcagatttgagcagcccgtccgatggaagtccgggaggggggtctctgacggagggacttacgtttcatcggggtgatagggagcagaacgcaggcgcgtggtaaggtttagctggtcagattccgccattgttctgtatgcccttgtgtcgcccagccaggacctgcctttgcccgagacacttccgagctttttgaacgtctttccctgcggtagcggccctggcattgggactgcagcactcattgggggtgggatactaccgcggtgttaaggctcccaaggaggcagcggggcgcgacctttgcccccacctcggtggttgtgccccaaggttcaacttggcgccaagggcgagagccccccgcggaacgacn

SEQ ID NO: 640391 - DNA, 156 bp, Homo sapiens
ggcacacgcctgttaataccagctactcaggtggctgaggcataagaattgcttgagcgtgggaggcagagattgcactgagccgagatcgcgccactatactccagcctgggcaacagacatcctgtctcaaataaattacattaaatgtttaag

SEQ ID NO: 640392 - DNA, 248 bp, Homo sapiens
gagacggagtctcactccagcctggctgacggagcgagtctgtctcaaacgtctcaaaaacaaacaaacaaacaaaaaacctctttgaaggggattaagtggatttgtcccaattaactagcaaacacctgtgaatgccagctttgtgtcaaggggagagtgatttgtatagctaaaagatatttattgcttaggaaaaacatgactgaataaatgcatcctcattaaataaaaaatgctccaaaaaa

SEQ ID NO: 640393 - DNA, 120 bp, Homo sapiens
gcatagcagagtaggtgatgcgttctgaggattcaacaccagtgcctgacggtgtattcacagtctgatgggcactttaaatctgtgactacttcacacagccttgtcttagcgagatat

SEQ ID NO: 640394 - DNA, 368 bp, Homo sapiens
tacggttcgcagtccccaagcttcatgacagctggtgtaaagaagctggcacctttcgcctctctcttgctcccctctccccatgtgatctctgcacacacaagctccccttcaccttccgacttgagtgggagcagcctgaggctttcaccagatgcagatgcaggcaccatgcttcttgcacaactgctgaatcatgcaccaaataaacctctttcctttataaattacctagtcttgggtatttctttatagcagtgtgaaaacggactaatacaccccatacgtttgatatgagcttaatatccagaatatataaggaactcaaactactaaagagcaagaaaataaccaggttaaaaaacagg

SEQ ID NO: 640395 - DNA, 672 bp, Homo sapiens
  misc_feature (135)..(135): n is a, c, g, or t
gggttgaatttggcttacagagttccgtctcaccatcctgggcttccaagtggagactgcggtatccgcggttggagacccagcgggagtagcctttgtgctcccggacggacttgaggtgtggagtctgtgtgntggggaccctgccttgtgaagcgcccgagaggcttaaaggatggcctcgtcagatctgaacaattatgctctcatgtaatgacaacgatgggcaatattaagaaaacccttatcattaagaaactgtggccaggaacctaacctgtgaaaagtgtattacataacaataggagatgagatcatgtgtaataaattgaacttctaaaatacatggaattgtgcaaattcagtatcaagaacaaaccaacaattcactcaaggaaactctgtggaatctctgtgaagaaagattaccaaggacttagaacatcttaacagaaacattcctttcccattgtgcctcaatgtaacagttaccccagaagctgtgtaaagggatcagactctgtgattcctgaagaaccaatcacagttgaagaacctgaaacccgtaaagaagctcccaaagagccaaagaagtattagggacattgccatttataactttgtgactgagtccacgggggtccttcgtacatggaatcccgttaacctata

SEQ ID NO: 640396 - DNA, 162 bp, Homo sapiens
ctgcatgtatctatactgtagtccgcctttcccattcaccatgcctaattgtatctgttcttttttggtttcacacacactgattcatactcataaatattttcatgttttacacacacaaaaaaacaacaccacaaaacaacacaaaccccacacaaaaca

SEQ ID NO: 640397 - DNA, 109 bp, Homo sapiens
gctgttaccgaaggcgacgctggtgtctgcatcctgttgctggcgtcaaactccacacccaccgtgcagcgtggtcacgggcttgtggtagtatgtgcgtgcatgcccg

SEQ ID NO: 640398 - DNA, 179 bp, Homo sapiens
ccctgagacggacttctgctttgttgcccaggagtttgagaccagcctggcaacacagcaagaccttgcctctgcttcaacataaaataaaataaaaaaataaagctgggcacggtggctcactcttgtaatcccagcactttgaggccaaggcaggcggatcacttgaggtcaggagt

SEQ ID NO: 640399 - DNA, 370 bp, Homo sapiens
atctttttataaagtggaaataggacgggcatggtggctaacgcctgcaatcccagcactttgggaggccgaggcagccagatcacctgaggtcaggagttcaagaccagcctgacccatatggcaaaaccccctctctactaaaaatacaaaaattagccaggtgtggtggcaggtgcctgaaatcccagctactcaggaagctgaggcaggagaatcacttgaacccggggggcggaggttgcagtgggccaagattacaccactgcactccagcctgggcgacaaagtgactctgtctcagaaaaatacaaaataaaaaaataaagtggaaataacttcctctgcttctagctatgcagtttgcttg

SEQ ID NO: 640400 - DNA, 381 bp, Homo sapiens
  misc_feature (116)..(116): n is a, c, g, or t
ttcccttgggggttgccggccagaattttttcccctgggggtcccacctttgccttaccccagccttaaaaatagcccctggccaaaggccttgttgggtggagcctttgtgtgantccatactcctccccccacaacatttatttgtcaaacaccaagcactttcagcctccccgccttcagctgtcagctttttggggctaacttttttgcctttgtggttggaggcctgaggccttttggaacttttgctaacctgttcaaaagccaggaaggaagactgcccatgttttgaaagcacagccccgtcaggtccggcttgtgggtttccctttttgcacgcctgtgtaaagctattataattaaaatggttttccggga

SEQ ID NO: 640401 - DNA, 612 bp, Homo sapiens
ctggggtgggccctgtgtgggcccatggtggccctgggatggtggaacctgcgtgtggcttccgcgtgagtgtttctgtgcatgtgtgcatcctggtggccggtgtgtctgctgtgcctgtcggactgtgtggcctggtggcctgaggccgcaggaagctctgcaggagtgcaatggccgaggataagtgagtgtgatgccctgtcaccaaggttggcgcctgcatttggtcacaggaccattgaaagcattcaaaggtcgacctgtgaatgtgaaagcagtcagtaagtcgttctattatcgtcgcacatgacccgcaagttaaagggaattcaagaagaatcactctgacgtttgcgttttaccccatgtagatgcaaggatgagtatggcacacagatatcctagtttccagtttccgacaaagagctggtgggcacgttgtagacaacccggcgggagctttacatcagactgcgtacgtgaacgaacgaggcggaacgatgtcttcacagtttagcgcgccacccgaagatgagtgtctcggccccgaatgggcaaaagcacaactgggaccaagacgagaggaaaaagcggaccacaccaagtagt

SEQ ID NO: 640402 - DNA, 210 bp, Homo sapiens
  misc_feature (140)..(140): n is a, c, g, or t
gagatgggagtctcactctgttgcccaggctggagtgcagtggcgcgatctcggctcactgcaacctctgcctcctgggttcaagcgattcttctgcctcagcctcccgagtagctgggactcccaaagtgttgggattntaggtgtgagccactgcgcccagtcagtatgcttttccctccctctctccttcccttctgtcgtcttctc

SEQ ID NO: 640403 - DNA, 891 bp, Homo sapiens
  misc_feature (877)..(877): n is a, c, g, or t
ggagttcctccttgctctcgcccctactctttctggtgttagatcgagcaaccctctaaaagcagtttagagtggtaaaaaaaaaaaaaaacacaccaaaggctcgggccacaaaggggatgaaatttcttctgggacatcctcctcgttctcccggttaactggatcggtctggtccctagagtccttcgtgaagctttttattcctaagaggagaaaatcagtcacgcggcgaaattggtgctgatacaggagctgggcatggaatgtgggagactgactggcctatgaattggtaaattaaaagcaagcgggttctctgggatataaataagcatggatgaggaaacagctgccaaatgcagggactgggtgccaaggttcataccttgtgggggtagaagtgcagcaaaccgagaagatatttacacgtctgcaaaggaaggtgaggcagaaatggggatgtagtatttagtaaataatgctggggtagtctatacatcagatgtgttgtggtacacaagatctcagatggaaaagacttttgagtaatgtattggccatttctggactacaagggatttcttcttgcatgcgaggaataaccatggctttgtcaggggttcgggaagtggacattttgggccccttttatggttacgtcaacagttggtggtggttctaaacttggcagtgacatggtgttacaataatcggtcaacaccttgtggtccatccgactgcgtctcaaccggtcagttggcgctggcggaggaagggggggtagagagaggatacctcagtaaagggacgcggggaacacgttttctttctctctcttctcccttcatctctcttctccttatatctataaacngaagaaaaaaagag

SEQ ID NO: 640404 - DNA, 414 bp, Homo sapiens
tgcagggtcatgtataaatggggccatatagtacatacatatcatactcttagggctggcacacatttgaggtgcatccatattttatattcactcatcaggagctgtaaacacattcttaaaggagcattttcagatatgaataagcagggatgaaataaggattaggctaagggaaatggctgaggctttcctaagtgaagcggaacaaccacagccttgtttttaaagggatggccaatatgcatttatctgttcaagcattttaagatctccacgaagatggcctgaggaatcaagagtcctcattgagggggcggatatcccaaagggagaatgatctgaaaagaccatgtgctttttggaaatataaggaaaattgtgaaaaaaaagaccccccccccccccttcttt

SEQ ID NO: 640405 - DNA, 221 bp, Homo sapiens
cccgatagcccgacagtggaggtgtctgaatgaggactcacggaacaattgtgaatctgggagagcatgttcgataaatctacgaacggtgtgcttgtccgtatttcgctgggggcttcaaccctgaatgttctatgacatatctgacaaggttttgttgagcaagctgaggctctggaatccataggattccaagtggtattctgtctaactactcggtc

SEQ ID NO: 640406 - DNA, 222 bp, Homo sapiens
gtcgggcgcggcctccgaacgtccgcttcggcgggcgcacatcgaccccgatgccgtgctgactccatcgtcgcaagctgccgtcctggcgtcttgccgcgccgctgcatggtgtctttcgctgcctgcaacgtggaatccaatactgcactcgcccctttctacaacggggccgaacacatggtgcgcgagcccgtcgcgcgtgacgcggccgacctgatc

SEQ ID NO: 640407 - DNA, 338 bp, Homo sapiens
  misc_feature (29)..(29): n is a, c, g, or t
  misc_feature (102)..(102): n is a, c, g, or t
  misc_feature (298)..(298): n is a, c, g, or t
  misc_feature (324)..(324): n is a, c, g, or t
ctttttttttttgagagggagtctcactnttttgcccaggctggagtgcagtggtgcaatctcggctcactgaaacctccatctcccgggttcaagcaattnttttgcctcagcctcctgggtagctgggattacaggcgcctaccaccatgcccggttaatttttcttctttgtatttttagtagagacggggtttcaccatcttggccaggctggtgttgaactcctgacttcatgatccacctgcctcggcctcccaaagtgctgggattacaggcataaaccaccacggccggncttaatatcaagtttttatgtgaatnagtttgaggtgaat

SEQ ID NO: 640408 - DNA, 162 bp, Homo sapiens
caggtcccgtgcggggggctagtcctggcatccggtatgatcaggtcgcaggcctgtatctccagcagctccaaaatcttcttgaggcgctactcgctggcggcgggaacttagctaccggcttccagtaagtacacgcattcgctctcctcacccataatg

SEQ ID NO: 640409 - DNA, 279 bp, Homo sapiens
aaaaaatttaaaaatcccaaaaaaagtgaaaagggccggttccccccttaacgggggccattcccttgtgaaattccttttctggggtcaaaagctcccccgttgggccccttttgacccccggccctgccccccaaaaaacaaccccctttggggggaattggcccccccccccccaaatcctataaaacagccccccccctgtttcccttcaatgactccttttttagggccagccggccggcccccaggggaaaaaaacacccttgtggctcccca

SEQ ID NO: 640410 - DNA, 414 bp, Homo sapiens
  misc_feature (32)..(32): n is a, c, g, or t
  misc_feature (37)..(37): n is a, c, g, or t
  misc_feature (49)..(49): n is a, c, g, or t
  misc_feature (97)..(97): n is a, c, g, or t
  misc_feature (119)..(119): n is a, c, g, or t
  misc_feature (283)..(283): n is a, c, g, or t
taatatcctactgccaatgtgagggctaaaantttgntcttgcaatttntttagtctaactctcttccagagtttcttaacaccttcactactgaancttttggacaagaaaattgttntgagaggttgtcctctaaactggaagatgtttaatagcatgccaatagcaccttcccagttgtgacccatgagaatgtttccagacactgtcaaatgtcccctaaagggcaaaatcacaactctacccctacgccaactgagagccatacaccataaaaatctnggagttgtgagtgcagggaaatggaaggattaggtggaagagtagctaaggagaacagggtgggttttttgtttttgtttttttgagacagagtctcgctctgtcacccagtgtgagagagtccgctatct

SEQ ID NO: 640411 - DNA, 409 bp, Homo sapiens
  misc_feature (409)..(409): n is a, c, g, or t
cagttggttgagaaatagccaccctccaacctgtctgccggagacactgggcttcccttgtctagaagggagcattgctctccttcccttggttgactgctaggttcaaggatactcatgaccttgcaagtcccccaccccccgtgtccctgggctggggctcccttgcccaccccttacttccagagcttctctctgcccttgtatctcaggtgtcccttggctgctcatatgtttggggccttgaggtgcccacctgtattggggtgctcctcttggcctgagcagtgtgtttaccagcaggccagggtgttgctgtcccttcaaaaccaaattgactgtcaactggacagtgggtaccatcttcttgggatgactgcttgcctgctcaggtcttggtaacttgctn

SEQ ID NO: 640412 - DNA, 338 bp, Homo sapiens
agcagagcagttcagagcgctgggctgttgtccacacatctgtgtctgattctgtggcaagggtagaggaagagaggtcactgatggatgtttctggagaaagttgtgcatcgttttccttcttagctaggagggaatagggggtgtgtcgggagggtgaatgggagaagtgagggcagatgagtggatatgtgagtcgtgttagcaagccagattaaacgaactgcttttggtttaatctgatgctcaaataacacactttgcctttttttctaggtatggaagaagagaaagaaaagcctaaattggcatgagatccaagtctaaacgcctctaca

SEQ ID NO: 640413 - DNA, 189 bp, Homo sapiens
tgacagtgccaagcctgtagtcccagctgctcgggaggctgaggcgggagaatcacccggactcaggagttcaaggctgcagtgagcttcttggcacttcactccagcctgggtgattttttttaagagatgggggtttcactattgttggccaggcttgaccttgtaacttcttgacctcagtgcaat

SEQ ID NO: 640414 - DNA, 602 bp, Homo sapiens
ataagcttgattcgtattctactccaccttccggaagtcagtgggtgggtgtggtctgagcacctggtaggacctgccacctggaaggaaagctggccgtgaagcgcaggaggtcaagggtaaacgataatccatgaggtcaaactgcaactcatctatgacttcctccagactcagtgacacaagtgacccgcacaagatgcggatgcccttggctctggagttgtacaaaacaccgaagcgggagagcctgcagcaagcagctgggggacctgagcccatggctgccccacaccagcagggtgcacaacatgccacagcttctgcagggcctggcgccctgtgctggcctcggagatgggcctgctgtttccttctctccttccaggttcctcagtttctcctgtagccagaccatgcagagcaatggaagtggcgttccagttagctacggtgacatagcataaactcactacaacgctcgttggctgttttggtttcagacacagatttcagttttattttcagctttctaatttctctgttttgccctcttccctctccctcctccagggggattggttgaaatggcatttctgatg

SEQ ID NO: 640415 - DNA, 714 bp, Homo sapiens
aaacacaaaaatcagccggacatggtgggcgggtgcctgtagtcttagctactttggaggctgaggcaggagaatcgtttcaaccctggaggcggaggttgcagtgagccaagattgtattactgtactccagcctgggtgacagagcaagactgtctcaaaattgaaatgaaaatgaaaataagaataaagttttaccgtatgaggataatttgggaaagtacttgtacaaaaaaacattagagaaacagaaaaaaatttctgatatccaaagacaaccccttctttaaggggtgggcaatttttccttcttctttttttttgaaagggatttatttttcgggaaatggggtctcgaaaaccttactggtattgtcgcaggtaagtgtactctggcctatctggcggtataacctttcccagtatatacatttccgggggttaccacctggcatttaaacgctggtattccttctcaattcggtcacccagtgtcacgtgtcaccgggcagtctccaagggttgtgttgggccccggggatccggatcatttatcacgtgaggggccttattaaaattttcaggggagcctccaagtggcgctctgccttttcccaccattggcctcagggtgttcagccattaacccgtagggtatctttacaaaggtctacagggtacgtgacacttaccacgtggggagacgaagaggcc

SEQ ID NO: 640416 - DNA, 472 bp, Homo sapiens
  misc_feature (409)..(409): n is a, c, g, or t
ctaaaggagtggctcttaacatggttagaccagccatctcttttaaaaaatattttacatggctattttttttttcctgagatggagtctcactctggcacccagggtggaagggcaagggcgcgatctcggctcactgcaaggccaagcctcaggttccagccattctccttcctcagcctccctagtagctgggattacaggcatctgccaccacacctggctaattttggtatttttagtggacactgggtttcaccatgtgggccggctggtcttgaactcctgacctcagttgatccacccacctcggccttccaaagttctgggattacaggcgtgagccactgcacccggccttagtgtatgtaagtgtagtgtaagtgttaaggtaagtgtaggtaaggtnagtgtagtgtatgtaaggtaagtgtatgttatcttttggagacagcatatcagggtaccgagc

SEQ ID NO: 640417 - DNA, 811 bp, Homo sapiens
gttcttttcttcgggttcaacttgactttccttttgtgactggccaattgttggtaattttttttccaccgtaaccccgtgtggccgggacccttttgaaggcacgagcttttgtacggccattgtgccttccttgcagaagccccctcgacctggttagcagactattatccatgggacccaccttattgaaggcctttggaccgtctgctcacccacaggggcaccccaccaccatctgtccagccggtaggcaccactggcccaattgtgaaagtcacttcagcccagttttcatttgggagctacccacagggcacccctgagctcctatccagaagtgatcgcacgtgaccccctttcaccagattgaaaggggtgaatcaccactgctgcattggataactgggtactttgatcttagaatgtgatcttggaaatcactttgggactgggatcccttcgctgatgaccaacagactttctgggaccctgatggagtggggaacaacgcagatagagtgggactgggggagaccccaggcccccgggctgagcactgtgaggcctggatgtgaagactcagcccacgcgaagctcattcccttacccccggcccactgctgctgcttcagtggaagagatgaacccaaggcccggatggaaatccctaccttcagagactttagcccagccccacaccattttttcctgacctctcagccttttccctccccagggccccctgttgaaatctgggcactttaagtaaatttttaggcgtgaaccgtggaacaaaaagaaaaaaaaa

SEQ ID NO: 640418 - DNA, 329 bp, Homo sapiens
agcctctaacacctgcttagtctttagtcattcttagtaacgctgctctgtccttagtcatccttagacaccgtgctctgtaactgtctttcccgctgaaactactcaccctgccactccagctcatacccctgccctctttgaaatagccaatctgaattggcttagagtgtgcagtccaaccctatccaatagggaaaagacacaacagtagggactagctgcattagaaataagaacactttcccctcccttgtccggtgtgatcttgcctttgctccatctgcaagaccactcttccatagaagtaaatttgccttgctgtaaaa

SEQ ID NO: 640419 - DNA, 790 bp, Homo sapiens
ggaagccgtggggacgcgcccagggagctaatcagattacctggctggtgtgcttgtctggagtgatcttctgactgaaaagaactatgtcatgatcaaggaaggagagctgtctatttgggagcggttctgtgccaccatcataaaggcaggccaatgccgaaacacattgcattcataatgggacgggaaccgtcgctatgccaagaagttggcaggtgacgcggcaggaaggccactcacagggctttcaacaagcatagctgagaactctgcgggtggtgttgacaccctggggccatcctagaggtgacagtctacgcattcaagcattggaggacttcaaaggctcccaagagtgagggtagacgggcttaatggggttctgggcccggcagaaagttccagccgcttggatggacgacacgggaggacagtggcagaagccatgggggtgtggactccggggccctggggcggtctgcacttgttggccttggatctccaggaggctgatttgcacaaagttgtacagggccatgaggaactaccaacatgatttctctggagtctctgctggaaagtgcctttatacaaaggtctcctcatctgaattttgatacggactctgagaaggcggtgagtgactcttgtaagaagccttactctgctgtgccaccgtttgtgcaagtatcatttgacctttgggcatctgattccgagacatggtgccaaaggtcgcttgtgcggggtgagggattgcacacccccggtaggtcgcacccgggtc

SEQ ID NO: 640420 - DNA, 144 bp, Homo sapiens
ttactgtgcgttaatgttcacagcaactttattcattatagccagaaaccgtcaacagtaaagcttgctgccaacaaaagaatggagaaacaaactgtggagtaatcatactacagtgttatggttaattttgttttttttcaa

SEQ ID NO: 640421 - DNA, 691 bp, Homo sapiens
cttccacaggggacattggcaatgtctgaatgcattttgtgtggtcatgactggtcagaaggatgttatcagcatctagtgggtgtcagccagggaatgctgctaagcatttgataatgcataggtcaagcgccttcatcaaagtaattatctaccctcacagtcaatagtgctgaagttgagaaatcatggtttacggagtcttgattaaacattttcatctggggtaccctgagatggtgatatatactagtatgctatgcttcacagtgtcagctttctcagcatctgcagcaggtgagttataatcttcacagaaccatgctcctggggaaagactgatcatacacgatattctcattaactttgactaaatctttcaccatgcccattagcatatatcgacgttctaatgtctcagcagcagcgagtctctgtatttgaatatatgtttggttatatctcatggcttgtttccacgtatggaaaacagagtcgtaaatggcaacagttatagtttagtgctgcctttacatagtgcctgatcctcttatagcacaggcacagttaagtaccttgagctccaagccatcacaccacatgctcacattctagcatgtaatggtctcagcattgcgtaggttgatgtaccactgcagcacagttccacttagtgaacatacaattgtcc

SEQ ID NO: 640422 - DNA, 718 bp, Homo sapiens
gctttgttaaacagatgcttgaaggcagcatgctcgttgagagtcatcaccactccccaatctcaagtacccagggacacaaacactctgcctaggaaaaccagagacctttgttcacttgtttgtctgctgaccttccctccgctgttgtcctatgaccctgccaaatccccctctgcgagaaacacccaagaatgatcaataaaaaataaataaataaaaaaaaaaaaaaacgaaaaaaaaaaaaaaaaaaaaaaaaaaaaaaaaactaaaggaaaaacccaaaaacaaaaaaaaacctataaagaatcaaattacaattcaattggccgaagattaacaacgacaaaaaataaaaaccccggggggggccccgaaccaaattgcccctaataggaggccctttaaaaaaaatggggccgtctttaaaaggtccgaaccggaaaaaccttggaatatccccacttaatgccctggagaaagaaccccctttgccggaattcgtaaaataaaaatggggccaaccctttggccctttacaaacattctgtacgcctaagggcaaactggaaaatttcctcgtaaaactttggaataaaaccgcgttaaaattttgggtaaaaccacgcttttttaaaccaacgggcgctaatgcgcgaatcctctcttaattaaaggggattaccccgcaatagcgggaagggcccctcaactgaaa

SEQ ID NO: 640423 - DNA, 815 bp, Homo sapiens
  misc_feature (50)..(50): n is a, c, g, or t
  misc_feature (67)..(67): n is a, c, g, or t
  misc_feature (186)..(186): n is a, c, g, or t
  misc_feature (396)..(396): n is a, c, g, or t
  misc_feature (445)..(445): n is a, c, g, or t
  misc_feature (513)..(513): n is a, c, g, or t
  misc_feature (559)..(559): n is a, c, g, or t
  misc_feature (592)..(592): n is a, c, g, or t
  misc_feature (610)..(610): n is a, c, g, or t
  misc_feature (649)..(649): n is a, c, g, or t
  misc_feature (657)..(657): n is a, c, g, or t
  misc_feature (667)..(667): n is a, c, g, or t
  misc_feature (675)..(675): n is a, c, g, or t
  misc_feature (677)..(677): n is a, c, g, or t
  misc_feature (703)..(703): n is a, c, g, or t
  misc_feature (713)..(713): n is a, c, g, or t
  misc_feature (742)..(742): n is a, c, g, or t
  misc_feature (752)..(752): n is a, c, g, or t
  misc_feature (814)..(814): n is a, c, g, or t
ggagctgagcaggaacagggcctggctgcctcttctctgccacagctctnacctgggcaaggctggnagctggcatcgtaatggatgggggagtgggtggaggatctgagggtcccctgggtaggttccgataccttggacaggtgggcctcaccctgactaagaactcggggaggggccactctnccttcccctccttccagcagccgccccaccaccctccacctcctgtcctcgacatgtgtcccagaaaacccagccatgaggaccgccctcagaagggtctataggctttgcaagccgaaagaaaggtgggctgacctctgacctggattcagggggtgtctggggtcatccccaaagccaagtatggttggaaaggagaaggactgaganaagacgatggccctggcatcagccggtgaggcccaggatgacccatgcnagaatctgggggaggacgcgggctctgccagccagcagttggtcatctctgggggccacaaaggccangccagttagcttcgctctcgcaccgggcccggccatggaagaagtncctcaagaggttctgggcctcttctttcacgcncctcccaggagaggtctnctgagttagccagttttaaaaggggcgggcaaagctttnaacaactncttggaagcnaacttgcncnccttgtagaaaggggtgagggacttnaccacaacanttgcagcctccttcaaggagaggccaggngcggagagcnggaaggggttttgagccgtgggatttaaggggccccgttcgctggccgagacgctgcccttna

SEQ ID NO: 640424 - DNA, 316 bp, Homo sapiens
  misc_feature (16)..(17): n is a, c, g, or t
  misc_feature (202)..(202): n is a, c, g, or t
  misc_feature (212)..(212): n is a, c, g, or t
  misc_feature (214)..(214): n is a, c, g, or t
  misc_feature (254)..(255): n is a, c, g, or t
ttcaagccttcagtanngtagggatgcttttaacttttattattaattattttgagatcttaaaaaaatagaagaacaccccctccatttttgtggtcattgaaaagctcatttcacagtaccagagatttttactgggagtatatattttggaggtaggcatagagggagccctaccccttccacaaattacgttactcangagacagctncnataaaatgcattatctccccagaccagagacagtggcccnntaaaaaaatcatggggctggaaatttcccaaatcaaaccagcctcctggtgcttgaaggtt

SEQ ID NO: 640425 - DNA, 601 bp, Homo sapiens
cattcaaatactattttttatccacatttttttttgttccccaaactgtaatgtacaaggcatcatgtgtgcataatgcttgtggattttgcagtcaatatttcttttttctttccagaggaaaaaactgcttggggatatttttcagcataattttaacactataatttcaggcatacagtgattattggctcaatcttgaccccacaattttcagggtcaaaactattaatatgtcgtcaacgacaatcctgtggcacacagaagactcctgcacgcttcgcatgttggaccatacgatacaaatgtttcacagcagtatactacttttttcgggttgggacattcactatacttacaatttcagcaagcaggaaactgcgtaacaatggttacaataccttgtaccaatgcgctttaacgttacgcaattggattggtacgcatggggttccctccagaggtttcaatgcatatgggcagcagtttaacacattatatcaagattcgtttactctcgttaattcattttaccagtaaatttggaataaatcctaggggtcattatcacttaaataatactgtacctaggtctttcaaa

SEQ ID NO: 640426 - DNA, 112 bp, Homo sapiens
ggcgagctcaaggaggacagaaaccttccgtggagcagaagaaatattatactagcatttaccatctcacttctgagaatactagtatatcgctcacacctcatattctccc

SEQ ID NO: 640427 - DNA, 843 bp, Homo sapiens
tctttccgagacggtgtctgtgcttatcgcccaggctggagtgcagtggcgtgatctcggtcactgcaacctccacctcccgggttcaagcagttctcctgcctcagcctcccgagtagctgggattacaggcacacgccaccacgcccggccaatttttggtattcttagtagagatggggttcatcgtgttggccaggctggtctcaaacactcttgacttcgtgatctgcctgcctcggcctctcaaaagtgctgggattacaggcatgagccaccgcacctggcagaccattttttctttatttaaaacttaaaagagattatcaaacgaatgcctaggtctttcagaatggctcaagggccagagaagcgggtcacgggctattttcctcctagcggtcctttccctatgagaactcactaatttttgcagtcacctctgtacccgtcgtactcattgacgcattaccgcgagagagaagctgagtcatggttataagataagaccttcggggagtctagtgggccctgctttgtcgcaggatttgccatcacctttaatatgggggggacatacgtgtggatgacaccctcgtgggaacacggtgtacacctgcaaaacccgggttcccgttgccgtgacgcagggagtggagagccgctttataatgccccagagttgtcgcaaccagccttccaatagtgtatgaaactgaaattccaatcctttatgcagactgtacaacctgttgtttactaacggcgagtgtaccacaccttttagccatgaagtgagcgggagcatgaccactgattagtgcagtctgttataccctgaag

SEQ ID NO: 640428 - DNA, 664 bp, Homo sapiens
gggaggaccgtgggcagccagggtcggtgaaggatcccaagatggtgggcgaaacttgtctaaaaaccattgactgggtagctttgcagagatcataccccagaacaaaaggcattgtagttccctggaaatcctggaatgagacctcactccaggttgggtgtttacctgagaatccaccagctatcgactgggcttactacaaggcaatgtgggcaagggctggcttgggtggatgactttgagaagaagtttaattgcgctgaaggtttcccgtgcagaggataatatactggcccaggtgggatgcccgaagacaacacgaagatgtgacaatctttgtgctgagggggtggtctctctccaagggccaggatgggtagaatattgagaacaggagatgggagcaagcatgaaagaaaccttaaattccattgtgatcaagcttgacccattgggagggactttgaatgaaggctttctccccaagaaaaccacacttcagaaccacgcacaacagtatccctatggggctcaaccaaaacaaatcgagacatttcattccacttgagtccaggaaggaagctctggcccttgtattacaacattctggaccttcaaacattataatttatacccgtctaacaacaccaacaaactcaca

SEQ ID NO: 640429 - DNA, 236 bp, Homo sapiens
acttgtccagcgtagccggaagcctctaccgagactcaatggctgaacaagcccggaaacctgaactaaacctctcaccctcagaggcaatccccaaaggacaggactaaaggaactagcatgagggaagctttgaatgtcaatgccctcatgtatctagtatgggaatataataaaatcttctatttccggagttgtcaataactcattttgtaaccttgggccagacaccttat

SEQ ID NO: 640430 - DNA, 1348 bp, Homo sapiens
cgacgccaacggggtctctcgtgatcgcggcgcgaggcaggaggggcggggcaggagggcctgctggcagtgcccgggcctgccaaagttgtcagcaatggtctgatgggccggactgtggtggccccatgagctgactgctgatgtgctgtgctgggactctggatgtactgtgactggatgcccctgatgctctctatgcccgacactgcctgccctcgggccatcctcccggatgccctcggcttccgcacaccccaagttctggcttcacctgtgtccttatctggcggccaagagtttcagccctgtactcacttacatgggcctgcttggggacgtccggggcccccccgagactctggccagcctcacagtcctgtgggcacccgtctaccccgccatttccaacgcttacttgcatgccggtcgcaagtccaccaccccttttccgggacgaccgttcagcccatgctctactttctcaaggaatccagtgcccaggtgagatcctttgacatcttcgcagcggcagaatcccaaccatgctccgacaggttagactctctttcacacttcaacaacacgggtccttcgtatccaacgaaatcttcgtctcctgcccccaagagtaggactagactttcaaacctggcgtacatctcaactcgacggcccccctaagacgcttcccggggcaaccacaactgactaaactaaacatacccgcctacatcaatattagcgcgcacacacgcgcgtaagatccctccaagacaacactgcccttcgtctcgcacagacagccatattttcaccgttacacaaaccgctaatttatgccgcccccttatgccctccaactagcgctacaaagcctactcgagcacacaccccttcgactcccgcgtttcatagcaaggtataactccacacagcgacacaacagcccacattttgtgtacccacaccgtcgtgacactacgtaagatatccgagcaacaacacttgccgccgcagatgcgacggtgcaccaccggctaccgaccacagcgttcccatcgctgtcttcctcacgaccgcgcatccactatggatgcttgtgatccgcgtacaacaagccggcctacccaccctcctccccctgcgtgacgcgcgcctgctgttctctcccctctttgatggtctcgacgcggctgcttactgtgcacttccctagaacctcctgtgtgagtcgctccccgtcccttcgtcgttctatcaacacctgtgcgagtgctctcacgcccgctgctcgcttatcccccgctccatcccacctgcttcgtcgcctgcacctcctgatgcc

SEQ ID NO: 640431 - DNA, 248 bp, Homo sapiens
ggcgagcgactgagtcgtccgtgagaaaaaagaggcgaggctttttccgagatcgtctcagctatggcgcttcgctcgcagttttggggttctcgctttgcaggaccctggtcaggttcgcagccctgtcaaccagcttccaggcggcagccaaacttgagtggccctgtggaaattaagctgtgcccagattcaccaaccggacccccggacctggagcttttatctgtagccaggaaagacggctg

SEQ ID NO: 640432 - DNA, 124 bp, Homo sapiens
tcggtacgtcccatggcttagtttgggtacacgtcgtagctccaagaaatacaaagccattgtatcaaagaagcgtagagtaggtcaaataatacttgagatcagatgattaaaattctgagat

SEQ ID NO: 640433 - DNA, 1244 bp, Homo sapiens
gacagagggtgatcccgagggatctagacttcatgtgtcacgagtgtgaagactggcttcgtggtccctgatgggatacgacattgaacaggctgtgctagtgtgagagcccattgggataaccagggtctttccgacaacgctcaacagccgaccagacacagtttgatgatgattcccggatctcccagaaacgctcctggggtatgctgaagctctgagtctacatcacaagacgccaggtatagtgagccacaggaccaaaggtcttatcgcacggttgcctcggagaccaagcttcatgctgaacctactgatgtgcgaggagacggaagatgcgtgtcattgcagggcaacctcaacgatttctaggctatgctttgagaagacggtgcctgacgtcgccgcgaacatgggccctgcaacatggggcaccagggagacgcgcacggaggccaggccagtcggggcagcggatcggcaagcgcaccgggccccgttgcggctgggtagcgtcggtcatgggttggtcccttcgtattcccgacaagaggccttttctagggagtgcgtagggcagcgaagctactcgccttgctaggtcgctcgcctttgcgtacgggctacgcattcccttagggcgggcgcggacctcgggtcgagtcaccacccattcagccttcggcacctttccttgggcggttgtaccttgggtgggcccgccgttaggcacgaaatccccggtgttgcacctacggccttggaggcgacattggttatcccctgtgacttcgcgtggcacgttggacgtgccattgcgggatgatctccgggcctcgccgggggggagaccggggcacgcgggttggacacctcgctatttccaaatgcgtccagtcacatggcatgacgcccttcgacgaaagcatacggtctgaagggccatgggacttggacaccaattgcctccggagcaaagacaaacctctgtgcctagtggaaacagcatttgccggggcacaagccggcttgggtcgtggacctttcccggttgcgggggctgtgatacccgttgccccgcgtcgcacggcgggcttcccgttgtgtaccttcggaggggcatctctacctggtggcgtggggtgcgatgtgccactccgggtggtgaggccattcactgagtcggcggcctccttggcgtctgcgacggttgcaggtctgcctgcggctttgtggggacacct

SEQ ID NO: 640434 - DNA, 207 bp, Homo sapiens
  misc_feature (207)..(207): n is a, c, g, or t
tgagagtctctgtggtctctttgttacacctcgtataggaaatttgcgctttcttcttgtggagagggggcttttctatacacctgtgtatcattttgggaggtggttctaacgggggggtgaacccccttaccccgcctgttctctttattatttttatctctgagagacattattctgcggcccgtaatatatagaagtgtgggn

SEQ ID NO: 640435 - DNA, 250 bp, Homo sapiens
ctgcattcaatatgttcatcattattgcactctgtgttttatgtggtgcctgacggagagcaaggaagtttaagcatttgcgtgcttcttttgtcgacagcagcttgagcatctttgcctcacctgctttacaatatttgtcttgcatatctcttggtgttgtggggctgggaaggtttcttactttctcttctttccatcttgtgttgtgtccgttggtacggataggagctctggttcaagattgctc

SEQ ID NO: 640436 - DNA, 1326 bp, Homo sapiens
  misc_feature (1326)..(1326): n is a, c, g, or t
agaagcggggggagggggggtttggtgaaaattttggtggtatgatgtctgtgtggaaagcggctgtgcagacattcaacttgttattaaaaaaaaaaaaaaaaaaaaaaaaaaaaaaaaaaaaaaaggggcggggcgcgcggccggcagatctaaaaacggtcttatccgcgaaggcgggcgcgcgtcaaaaattctccggcgggggggggccccagtatacggcgcgttccccccgaggttttgtgtgtgtgtccccaggggggtgccccatattggggtggaggcgggtatttatataaggcctgagggccgtgggggcgcgcggcgtttttaaccacacgcgtccggggagcggggggacacaccggtggcaacgctgggggaactcctctgggggagagagggaaacctcttaaaatttgcgggggggggggggggcaccatatatgttggcgcgccccacaacttttactctaaagagagagatattttaaaaaggtccagaaggggaacacattttcaaccactttcttcgacaggggtgtaataaccgtgtgggttcaccccctgaggggcggaattatagggtggggagcgctttagaaaaaattgcggggatcaaagcggagaataataacatttttgtgggacacacttttttttataacgcgggggggttctctgttgttaataatataagggaaaagatagaagagaaagaaagaagagaaaaggacgcgtaaagaagtaaaagaatagaagaagaaggaggacgaaaaggagaacaagaggagggataagaaagaaaggaggggcggaaaaaggggggggaggaggagcgggagcggaggagagaggagggagagggagggcacgaaaacagatccacagcaaaataggaggaggcacagagcagggacaaaggggcacaaacacaagaacggacggggagggggaagcacccagcaagcaacgaaagaacaaacgagaaaccaaaagacacgcccgagtgcgagaacacaaaagagcgacggacggagaaaggaaggacacggctgagccgggacgaggagcgagagaaagaagagagaagggacgggaggacagagcatggcgcgatggggcaggaagggaggaaacggagaggaagggaggagacaaaaaacgataaaagacgaaggaaaaaagaggcaaggaggggggccagacggaggaacgccaagcgaggacggcagcaccaggacgaagggaaggagagagagagagcggcaaaccggcgcgcccagagaaacaggcggacaagagagatctgcgaaaacaggn

SEQ ID NO: 640437 - DNA, 726 bp, Homo sapiens
  misc_feature (14)..(14): n is a, c, g, or t
  misc_feature (79)..(79): n is a, c, g, or t
  misc_feature (84)..(84): n is a, c, g, or t
  misc_feature (139)..(139): n is a, c, g, or t
  misc_feature (142)..(143): n is a, c, g, or t
  misc_feature (197)..(197): n is a, c, g, or t
  misc_feature (212)..(212): n is a, c, g, or t
  misc_feature (226)..(226): n is a, c, g, or t
  misc_feature (246)..(246): n is a, c, g, or t
  misc_feature (282)..(282): n is a, c, g, or t
  misc_feature (285)..(285): n is a, c, g, or t
  misc_feature (307)..(307): n is a, c, g, or t
  misc_feature (346)..(346): n is a, c, g, or t
  misc_feature (349)..(352): n is a, c, g, or t
  misc_feature (370)..(370): n is a, c, g, or t
  misc_feature (391)..(391): n is a, c, g, or t
  misc_feature (395)..(395): n is a, c, g, or t
  misc_feature (403)..(403): n is a, c, g, or t
  misc_feature (414)..(414): n is a, c, g, or t
  misc_feature (418)..(419): n is a, c, g, or t
  misc_feature (436)..(436): n is a, c, g, or t
  misc_feature (455)..(455): n is a, c, g, or t
  misc_feature (495)..(495): n is a, c, g, or t
  misc_feature (499)..(499): n is a, c, g, or t
  misc_feature (525)..(526): n is a, c, g, or t
  misc_feature (528)..(528): n is a, c, g, or t
  misc_feature (643)..(643): n is a, c, g, or t
  misc_feature (654)..(654): n is a, c, g, or t
  misc_feature (666)..(666): n is a, c, g, or t
  misc_feature (725)..(725): n is a, c, g, or t
gtctcaaacagggncggaatgtttaacacagaaaacagggggttttagcactcactcgttctcctggctcccgaaatangagcngccctgccccagttcatccaagcccatcaatatagttgtcctcgtccttaatctncannggtgttcaatgtgagccaactgtcagatggctttcatttgctcaactgaataanccatttatgcctagngttccattactggnacgctaagcttatgggagtnatttatatcttactgctcgaggtcctcaccaagatntgnttttttcacaaaaaaatttgtnatctccagcataaatggaataatcaaagcaattgtggcngtnnnnggggggcagaactctagngtttaatcttcgcggcttgantggnttgggggngttcctgtcantgtnnaagatcttgtggggggnggtgggggggcgcgggggngggtccccgggtgtgcttcgcgggtcgtggcccggtcgtngtcncggtggagtttctgctgcaggctgtnngngccttcttgccgagggccatgttgggccttgcaatcgtgctggcggggcggctgaacgaggggacaggtttttgaagccacccataagtctgagaaatttcagtttttggtcatngttctcaaaancagcagtatccnactggccaaactgggttcccgtccacttcctggtttcagaagcttccgttttgcctgant

SEQ ID NO: 640438 - DNA, 614 bp, Homo sapiens
ataagctggtcaagaaaagaaaatgaagtcctccagtaggggactcaataacttaagcaggtggattcggttcaagacagctttggcttgtttggtcaactccaggtgacatgtccagtgtagtcatgcagcactgtggggttgaatgcatccactagcatcttgtggagtttgagctctagaaccatctcattgagcagcatgtcatgtgcatctttgttgtagcagtatacgctatgagttagttaatgcccgctgggagctgtgactgcatacattagcattggcagctggaccgcaccgggctataaagcccctgtacgcaatgtcaagtacatgcatgaccgcacccaagttctcatcataggatctgtcatagtcatacttggtcacgtccaggaaggcctccagcaggtcaacatagtcgttgttcaccagcaggccccaggggcacacactacccagtgagcactcacggactgttctgtcaagatccgcctgagtctggatcacaacccctaaccgcgcgacatacgcgtgcagagctggaccgttccgcgccctatacctgcaccggtgacacagcagcagtcggtctgcgaggaacagctcca

SEQ ID NO: 640439 - DNA, 610 bp, Homo sapiens
  misc_feature (147)..(147): n is a, c, g, or t
agcggtactgtttgatgatgatatgatcatatacctagagaaacctaaagactcctccaaaaagctcctataactgataaatgaattcagcaaagtttcaggagacaaaattaatgtacacaaatcagtagctctgttataccccangaagcgaccaagcttagaatcaaaccaagaactcaaccccttttctgatagctgcaaaactaaactaaactaaaataaaatacttgggaatagacctaaccaaggaggtgaaagatgtctacaaggaaaacaactttagtatttttaatgggttaaaatgagaggcagcaggtacagcagaagaagtcagtgcgtgggcatccgcatccaatgggtactgcacctttgatggtaaggctttggttttgacttactaaattactaggtacgattattttctagtttttgtcattaaaccttaaaactactaagtaaccccttccatttcttgttaaatattgtaaaatttcatactctcatttatgctggctgacgttagagtgtttgtttctattttgtgactaccttaaataatacctattaagagtaaactgttagtagtggtgttgctgtgattaaatgc

SEQ ID NO: 640440 - DNA, 785 bp, Homo sapiens
  misc_feature (605)..(605): n is a, c, g, or t
  misc_feature (612)..(612): n is a, c, g, or t
atcaaagtttattttaaaaaaaatgaaaagacatgcctttgaatttatgaaatataatatatacaacctttctgaagagccccatggttgattagtgtatcttaggttctgagaaacactgcagtaaaaatatctgttaagatttctttaaactagcatttcccaaaccacctgattagccatttgagtttctatcacaccactctgtctcataacatttgttagaatttctttggctctttcactgccaagttgccttattgtgaggaggcattgaaaattgggattcacccgtaactcactgccatgcccaaggaaggcattgctgctggaggcgtagtggacattaacactgctttgcaagaggagctgaagaccaccctcatccatgacggctaccatggggaatttgtaaagtagtcacagtctcagacaaaagccacgcccatctctgtgtttacattcaactgtaatgagctttgtatgtcaagttggtggaggccctttgtgctgaacagcaaatcaacctaattaagactgatgacaccaagagactaggaatcgatagtggcggaaaccccaaaaaaatggttagttgcagttgngtagtantaaggtctatggcaaagaatctccggccaaccatgtcattaaagagtgcttcaaatgccagaaatgaacaaataaaatgttggctcaaaaaatttgaaaataacatggaatattatccaatacaagcatggcaaaggcaggctatctattgaaatatttgaagaaattctgag

SEQ ID NO: 640441 - DNA, 832 bp, Homo sapiens
gaagcaagctagttcgcctgagcgttgataatagatcggccattcattggcagtatggtgagattgagttatctcaatcagtcgagcaaggcctattcggattccatactagataggtccaggagattggtgaacacatgtgctaacagccctggtagtaatgtggaactgacattaccattcgtctatctttgacagaggaaacttagtcgtgatccaatagtaatattctggaccgcaagctttccaatggagtcgggagggttcgctggcagtttgtaatacatcatttacggtaagcgcatttcccgataatcgtgccgtttatccattgtagctacagcaacttatcctaggagaactgtcatcttcgaaggggtccccatactcataggctgcgacagagaaatccgcaacgttgaaagtgtaatcggggacttgaaagagaaaatttacttcctccttgaccctacaagcacttctaagaggtaaacctacggaattacggctacctagaagaatgtccgaaatgctaaccgctaggcacaatttgccgaaataacaccccttctgccacttcccccactccgggccttccgatatggccaactagacaccacggcgctataaatacatacccaacggagagcgcgaccacaataaccgatggcgaacgcgaaaccacccaatatccaaagaatcaactagagcgtccaccaaaccaaacaacacccgcggggaccacgaccaaccacctggggcgaaaagagcccccgccaaacacataacgaggaccctcagcacacacccaggcagcccctgagcatacatg

SEQ ID NO: 640442 - DNA, 357 bp, Homo sapiens
tagaatctagaggatcccagactgtcacaggttgagtgctacccatattcactcagagagaatttaatccagtactggcagctccaaaggcatcgtgtgtgaccggctacagacccctgtcgggtctcctagacaggtacctgtggccaagcccgatggaccctatctctcctggcaggatgccaggaatcaacgcagatcgcatgacaagcacacataaaactacagcactcaggtcctgactccggcttccccatgacagagcgaacttgtgtggtgtatccccagacgtctgtgaccaccaggacacgcattgctgaggaacgtttaaggtctttggacttgttgaactgggca

SEQ ID NO: 640443 - DNA, 869 bp, Homo sapiens
  misc_feature (285)..(285): n is a, c, g, or t
agcggagggcttcgcttgagtacaggagtggttggcgttgatgttgcgttttctcaacggcggcatccgaggagttcgtcctcaccactgcgcgccgacggttcttagactctgtgagtaaagacagcttcatcttcccagttcatcatggcttcaacatccagataacaacgaacttgatgcaagtgataggtttgccaaggtcagacctctcatcatccggatgaactgcaatttccagaagcatgcacccttggaagagttctacagctttggcgagttatntatggcaccgaaagcgaaggaagctcctgctcctcctaaagccgaagccaaagcgaaggctttaaaggccaagaaggcagtgttgaaaggtgtccgcagccacacgcaaaaaagaagatccgcatgtcactcaccttcaggcggcccaagacactgcgactccggaggcagcccagatatcctcggaagagcacccccaggagaaacaagcttggccactatgctatcatcaagtttccgctgaccactgagtcggccgtgaagaagatagaagaaaacaacacgcttgtgttcactgtggatgttaaagccaacaagcaccagatcagacaggctgtgaagaagctctatgacagtgatgtggccaaggtcaccaccctgatttgtcctgataaggagaacaaggcatatgttcgacttgctcctgattatgatgctttcgatgttgtaacaaaattgggatcacctaaactgagtccagctggctaactctaaatatatgtgtatcttttcagcataaaaaaataatgtttttcataagaatgacaacttaattagaatcaaatctataagctttaaaaaaa

SEQ ID NO: 640444 - DNA, 1041 bp, Homo sapiens
gactgaggcttcagcgggtgccgcccggcctatagtggagtggagcggtgagcacgtcaggcgtggggggcgcaggtcaagctttcaccagtttttaattctttgatggggtaaatttgagcagttttctcgacttgtcgacattcgttcattaactgatgccatggaatcaggagaggatacccggtcctctccacacagcaccagcacgtggtagacaggatgacagtcaatatatgtaagatgatacgttggttccctcgggaaaggcgggacaactcgaagcagggtagggggcttccagcgtcactaggagtagcctacgattagcatttgctagtctttacgtcctgcgcgtgaggctgctacactacatgtcagaagtcatgctggtggcccggacattgaagggagagaagtggattcgggagacattgtagtgagatggcggctgtgagctaatgaagctctgtgattccttccgtaaacgtcctgaagagcaatagctggaggctcttttcaggccaaggactgcgagtgtgagtggtgtacgctaccactggcaaaaaagaagatccgcatgtcactcaccttcaggcggcccaagacactgcgactccggaggcagcccagatatcctcggaagagcacccccaggagaaacaagcttggccactatgctatcatcaagtttccgctgaccactgagtcggccgtgaagaagatagaagaaaacaacacgcttgtgttcactgtggatgttaaagccaacaagcaccagatcagacaggctgtgaagaagctctatgacagtgatgtggccaaggtcaccaccctgatttgtcctgataaggagaacaaggcatatgttcgacttgctcctgattatgatgctttcgatgttgtaacaaaattgggatcacctaaactgagtccagctggctaactctaaatatatgtgtatcttttcagcataaaaaaataatgtttttcataagaatgacaacttaattagaatcaaatctataagctttaaaaaaa

SEQ ID NO: 640445 - DNA, 279 bp, Homo sapiens
cgccacagctctcggggttgcagactttcacccacagaatatggtccaatggagccagtcgatgggctggtcccggttcgaacatgacaatgtgtatgtgtgaactgtgctgtctctgtcaatgtgtgtcactgtgtgtgactgtgtgtgaatgtgtgtgtatttgtgtgaatgtgtgtgctatgtgtgtcaggtgtgtatctgtgcaatgtgaatctgtatgtgaatgtgtatgtgtgagtctgtgtgcctatgtgtgtgtgagaggctgtgggggct

SEQ ID NO: 640446 - DNA, 175 bp, Homo sapiens
ctgtcgctgctaacattctctttacctcaaacatcctacatgtagccttgatcctattcatgctgtacactagggggagtcaatacttcctaaagcattctttagttttttttttagaatgcatttttttcttattcgtaggggaagggtccagttcggggatcctctcagaagt

SEQ ID NO: 640447 - DNA, 202 bp, Homo sapiens
  misc_feature (25)..(25): n is a, c, g, or t
  misc_feature (80)..(80): n is a, c, g, or t
  misc_feature (123)..(123): n is a, c, g, or t
  misc_feature (175)..(175): n is a, c, g, or t
  misc_feature (189)..(189): n is a, c, g, or t
cagcggcgtgccctatttctacctnagcccgctgcagctctccgtgagcaacctgcaggagaatccatatgctacactgnccatgactttggcaaaagacaaacttctgcaaagaaacatggntttgaattcaaaaaagtccctttgtgttaaaataatgctgtaaggaatgtgnacaaaggtgaatgnaacagaaattggt

SEQ ID NO: 640448 - DNA, 1777 bp, Homo sapiens
  misc_feature (40)..(40): n is a, c, g, or t
gtagttgtgtggtgttggtggttggtgggtcgagggagtnattgtgtgtgtggaggtgtggggtgatgtggattgtttttgtgttggtagatttttgattgtgtgtcgatgtgtgttcgtgttggggtgtgtggttgtgtttgctggttgatgagtgttgggtgggatttgatgtggttggtgtatgtttggtgatgattgtgtattttgagggttggtttgtggttttggtggtttggtggggttgtgggtgttgtatggttgtggttgttgtgggtgtgtgacaacagagaaagtaacagacaggacactaagtaggagccgaacgatctggtgtgattgtttggaggtatgcggcgctgttcttctttgtggtgggtgtttatagggtgtgatgatgagtcgttgtgttggttagacatcgctgacatcgagcggaccgctggggtgtgctaacgacgtgtgtgtggacgtaagacacggggagggatcgctgggttgcaacggggggtttgttgccgctgggccttgtccccgcccatgggtgtgagatgttcggtggtgtgtttgtcgagccaaccgtgtgtgggagttgtttttttgtgttagtaggtgtttctcgattgtggggggcagactgcaatgtgttgttcagcgtcggccgcgtcttgtggtgtcatgggtgggggccccgtgggggtggtgtccgtcaggcggggagagtgttgttgctattgatgtgcaccgggagaggtcactcgcttggggctgtagtgttagatgtagattgttgggggcgtggtagatgtggctcgatgatgtgattgacgcattggggggacacgcagaggaagaaaagagggggggtgtgtgtgatagatatatactgacgggggcacccctgtttctgtgggtgtgagaaatcacagatgtggtagatggaagagacgggtttttttcttgagagcgaatatcacaggtggcgcacacgtgggctcacgacttagaacttctgggagggaccgacgttgggcggaggacaccacgcggcggcgctcacagggtgattatggttgggcgagtcttttttgttgatgagagagattgtttgtgggcggagtgtggttggatgatgcataaagagttttgtggtgtggacccacgctctaatgacatgtgtggtgtgtattatgagatatatgttagagagaaactatatatgagatgtgtgtatttatgcatcacactgtgtgttgtaattaactaactgtggggagtgctctcctcctacaagaggcacgtgcgctcaccaacacgatggatttgatgtataacgagcagggagagatctgatcgaggaaagccggattgctgagggcgccccagctagcgatcagcaccagcagagaggtaggatgagggggctgcacacgatcgctcggttgtcctttcaatggagtgacgaggatggtgtgtgtcgtgtgaggagcacgtagtggatagtcatacatcgtcagaactcacgctctgctgaagtttggtatgtgcaggtctttgtgtgtggtcactgtgagcgcagagagcccattctcatatatagaggtggtgggtgatgatagatagatgacagatttgttttgttaaaaggaggagagggggtggtgcacacacacaaagcggttagaagtggccttcaagagaccgatggggtcacctgaggatgtgtgtaaagatgtttaatataatgttgcctctttctttaaaaaaaaaaaattaa

SEQ ID NO: 640449 - DNA, 261 bp, Homo sapiens
ggattgctttagactaaaatgaacaataacaaaataagaactcacttatattctttatatggtcaataaagaagtgatagtggaaaaaaacaagatcaaatgaaggtgatgatttaggaagttggaaagatagctgaaactacaaaatggtatataaccagtgaacacttagacacactgattgatgaacttcagctttagcttggtgagagcataaaatgagagcagctgaggtttgcaaatttgtaatctccttgtgga

SEQ ID NO: 640450 - DNA, 373 bp, Homo sapiens
gtgtcctgagtattgtctcgggggagtgacaacgctagccatgtacacccattgttgagtttctctctcagggctggagctcttcagtcattctctccatctgagctgtccacagatatatgcttgtgacaatacagcatggacgatgtcaccaagtcgggttcgacacaacccaccgttttcaacgtttttcctccaatatgtctttcatgattctgcagagtgttctcaaactttgtctttttctcttcctgcttctttttctcttcttcatcctcggaagtccaggccttctttggtgactgacactaaagtcttcccctcaaattccttcagctgttggacacagtactcatcaatctgtcaatcataa

SEQ ID NO: 640451 - DNA, 200 bp, Homo sapiens
gtgtattcaccactgcggtgcatgccatccctgaacaagttccgatcgacacgtgagcaccgtgctgagcttccaaatatcgttaagctggcgcctggtcgacgtgtaatcaccattgcggtgcatgcctccctgtacaagttccgtcgacacgtgagcaccgtgctgagctccaaatatcgttaagctggagcctggtc

SEQ ID NO: 640452 - DNA, 117 bp, Homo sapiens; identical to SEQ ID NO: 598175

SEQ ID NO: 640453 - DNA, 288 bp, Homo sapiens
  misc_feature (29)..(29): n is a, c, g, or t
aggcttaaaataatttttccgggcaatanagagtttctttttttggcttagaatgtcataaatacatgtgaacacgtttaatgcagggctttttattctctccaaaatgtcaacagtattttcagaataaagacttttaaatatattgctgtagtggttaattctggtcctttgtctttaatgtctttttgagtggataaattttatttacccggtttgtagtttttttatttccgtgaatttttgaccttgcaatgggttgcttttaaagagatttttttaaaaaaa

SEQ ID NO: 640454 - DNA, 1296 bp, Homo sapiens
cccgtccattaccaccatcgttccacttgcacgattggctgtgacatccgggccagaacagatggcgtcagttaacggcagcagccagaactgtgtctcgggtcaggagcgcggccggcctgggggtccatggccatgtcctgcatcaatgaactcatgtccacagaactgtgtgcctcatggcatctctgaggcagtctttactgcgtcatgttccagcagactttctcacctccatgccagacaacatcaccaaggcataacacatgcccacacagtgacagagccaggctcagcacagcagctcgcatgcagcagctcatatcgcagcaagtttcactgcacttctcttcgcgctctttggtgcagatgttccaccataagacagcaatcgcagtcttcactcccaggttcccatgctggctgcgcaggttccctgaccacatcttcagtaccaagatacacattctccatcagccatactcatgacggttcacttcatcattggatccgcactctctggcacagctcgcttcctagggacctatctgaccacagtcacaattccacaccgtccgaactctgggagaccaaggcaacgcccagccctcccaacaggtaccgacacccatgccactggctgcctcccagcactcaccagcagggcggatgcgacatcgcactccaggacccaggcatcacaacaccaaggccacccaggcatgggacgcgacagctcagggaccgcaacggaccacttcgtgggattgaacggcatccagaacgaccgcgacgtcggacacgcaggaacactaacgggccacacagcctagcgacgcgctagcggcgaccacaagcgcatggcaagcatcactgccacacacgcacagccctgtcagccccaaaacctggtacacaggcgaccagtaaagggacaccagtcaccgacacgctaacgtcaggcgaagtcacaaacgagggacacgaacagagaccaccaccacgctgcacccccggacaaaccaccgggttcgaacccactcaccgcggcgcgacgaacacgacacgacagcgcacgcagacaccggcgacccaagtacagaaacaaccgaacacaacaccccgcgccagcgacacacccgcaggtagccagccaccggcgagcaaacagacaattcacacgccgaagagagtacacaccgccgagcagacacaccacgaggcagcacagcagcacgagcgccgaaaatgcgcgagaaccacatcccagaacaagccaaccaacaaatgcggcca

SEQ ID NO: 640455 - DNA, 916 bp, Homo sapiens
cattgttggttcaatatatgaggcaccattgtagtcttttaggaaataaattagcttttatcacagatttaggaaacttgtctaaaaaaactgtgatcatcagttacagagggaaggaaacatattgaacacaaggcatcatagtagctggaggccttaaaaattatgcacgaccaaaaagaatgatttggtgagagatgtgtagctgattgacaattttagtgtgaattcatattcatttaacccagcagcaatctacataagctatgctttttcccgcctgtatttatgtttcttagcttataaagtcccaatatattatatcttttgttgctttggcagttttaatttagagctctgcgttcacagagatgccacctatagcaaaaactatctttaagaattggaaaataaaatgaatgttttagataaaatattgcaagccattatgtgtagagttaatgtatggaaatttgcatttgtttttctgaatcatggtgtacattaatcactcattgaattctatttctaagcaaataagagaatcaaacatttctaaaaggaacatatgtcttgctattaataacaaggagacaggtaaaatagtaaggtaatataagcaaaaaaaaaactgtcctgaatttagctatctaatgggattttaccgatggtgcttctagaaattgaatctttgaggattccgtggttatggtcccaggaaatgattcagggaagaactataaaagatgtggaggaacgattggcgaaatttttgaaaacgctgtgggaatgtggctttaaccaggaaaatacaaatgtgttcataccgggtaagagaagtacagtaccgagtgaaggggagtgataaggggagtgaataaaggaaaagatagagaagagaagtgataagagggct

SEQ ID NO: 640456 - DNA, 219 bp, Homo sapiens
cagctgtagcgatgagagccatctgcaggacagaagaaacaaaaaaagatgtcatacagcaggttcatggataaactgtggacaatccagaaagctttaacattcttcaaagaaatagaaaacacaatcctaaaatttatatgggaaccacaaaagacttagaatagtcagctatcctgagcaaagggaatcaaactggaggagtcatattacctgact

SEQ ID NO: 640457 - DNA, 1666 bp, Homo sapiens
tattttattatattaaggtggatatatacgtattaatataaaactccgtggaaggggttatggcagggtcttcatcagtagtcccttcaaattaaaaaaaaaatatacaaaagtctcaggtcagaacacggtcagaatcaagaagagacctacaactctatcccacgaacctccaggggccacagatcacatctcctatatgagagcacccgtgcaggacactacttacaggaggaaccccctgtggaaaagatctcaggaacactaacacgagagataaaagcggagagagacaggaacaaccgggtgaaagaaatataagcatagagacgcactacatagtcacaatcacacacactcatccgtgtgaatgagaggtataccatcctctcgacaatcttactcctccacgaagaacacccagtttaacttcatccctctccaacaagagcctctctctctcacaggaatacgcaccagcccccaaatatatatatagggggaccagtgtatcccccgcagaggaaacaccttgagaacgcccgcaactatgacaccccgagaaacgggggcatacccgccgggagaacctaactaagagaggaggaaaggagaatagagaagaacccagttgggagagacctcagagacgaagcgaaaaggggagagtgcataaccccacggagagaaaaacacagtagtaaagaaaccagaagagaaaccgagagagagaggagtcccccccggagagaacaaccccagagaggaaaaaaagaaaccccaacgcaaagaagacgaacgaacacacatgaggaagagaaaaaacaaacaggacgagtcaacagaaaacacagcaggagaatagaacaagaagcgaataccgccggaaaggaggagcaacggaccactaatgcacacgagcacaccacgaagagacaaaatgtcaacacacctaccaccaacaaccacaaatataaaacagtgcaggagaggggaagaaaaacaaccctggatggacaaccaacccacgaatggaaaaaccacaccggagagcagagaagagaacacaacacacggaacaacgccgagaaaaaaaaaaaggcgacacaaccgacacaacaaagagaggaggcaataacaacacacaacaagaagaaacaacgccgagggcgacaccccagaggagaggcgaccacaccaaaaagtagggaacccacgagaccaaaaagaagccccccatccggaacagttatgaacacatgagaacgaaccacccaagtcaacgggaggacaaccaacatgaagagaaggacaaccaaagaaatgtcacccccggtggtggggaaaacacaccaaggacctagagtcggaagatcgtattgagtgcaacaaaaccacccgacagaactaccacacctagattacaactgcaccggggaggaaaatcaagcgagaggcgaaaacaaccaggactgcgacatgctgaacaacctcccagaggtcagaaaacacaggcacaccaagagaaaaactacacgccaggcaaaactgcaagtaggcagcaccacaatcagcaagagagcagaaagggacagaagggaaccaaagcaaacacagcatcaagacagggcagcgacgagaccacgacacaccaccgacagcaggc

SEQ ID NO: 640458 - DNA, 217 bp, Homo sapiens
tttactcaatattaattacttacaaataacctcacataaacactactcagccataaaaaggaatgaattaatgacattcacagcaacctggagactattactctaaaggaagtaactgaggaatggaaaaccaaacattgtatgttctcactcataagtgggagataagctatgaggatgcaaaggcataagaaggatacaatggactttggggact

SEQ ID NO: 640459 - DNA, 232 bp, Homo sapiens
ggtggcagatgagtggtcagtgtcagcttccggccgtgcccagacctgtgcccagcagacctggctgaggccgtgtggggctgctgtttgcaggccagtgaatccggtgaaacgggcaccgttcatgtggcttgtgggaactgtgggtgtgggtgctgtctgtgttcgtgggtgtacacatgaccctgagacagtccagtgcaggtcccatggattccatgtctgttcttca

SEQ ID NO: 640460 - DNA, 819 bp, Homo sapiens
gtcctcttctccagcatggtgtgtctgaagctccctggaggctcctggtatggcagcgctgacagtgacattgacggtgctgagctcccacactggctttggatggggacacccaagcacgtttcttggagcaggctaagtgtgagtgtcatttcctcgaatgggacggagcgagtgtggaaccatgagtcagatacatctataaccaagaggagtacgcgcgctacaacagtgacctgggggagtaccaggcggttgacggagctggggcggtctgacgctgagtactggaacagccagaaggacctcctggatgcggaggcgggccgaggtggacacctactgcagatacaacttacggggttgtggagagcttcacatgttgtcatgcggcgagtccaagcctaagtgtgagctgtgtagtccttcaaatgacgcgcagcgcactctgcgatggaccacgaaccgtccatggtcgtgctctgtgaagtggttatctatcctaggcagcaattgaatgtcaggttggttccaggaactggccaggaagagaaggctggggtggtgtccacgaggcctgatccagaatggagactggactcttcgcagaccctggtgatgctggaaacagtacctcggagtggagaggtaacacctgccaagtggagcatccaagcgtgattgagccctctcacagtgcaatggagtgcacggtctgaatctgcacagagcaggatgctgagtggagtcagggggctttcgtgctgggcctgctcttacttgggaccagggctgttcatctactgtcaggaatcataa

SEQ ID NO: 640461 - DNA, 739 bp, Homo sapiens
atttcaagtgggtgaaacagcagtgtgaatttgcaaaacaagccctagaacccagtaccaaggccctaaactggacctgggcttcaaggagggccagaccatcaagctcaacatcgcaaacatgaagaagaaggaaggagcagctgggaatccccgagtccggacctgccagcacaggacgggctgagcctgcttaccacccctccccacaggggggaaaacctccacacctgatccctccccctggaggagacagttgagctgtgagagagggatccctcgataccagaacagacagttgatcccagttcaggaggtgcatcctgtaccactggaccacagaccaatcctgacactgctgacatctggggagacttataccaaactctacaggatcaaacttacagaacagaaccagcacaggacacaggctgggtccagatactgaccctgagacacggattcttaccatcactgtgacttacatgggaaaggcagcaccactcatctagagcacaaagagaagggaggacaaaaagacccatcactcagatggacaagtgatcaggcggacatgaaaatccaacatacctcatcccatccatagaacaaggacataccggaactgaacaaaaccgcgcgcaatgctacaagaagactcaaaatcagagaaaacagacgaacaaacctgtaaaccaggagaactcccaaattatacaaaacaagaccaccaggagca

SEQ ID NO: 640462 - DNA, 218 bp, Homo sapiens
atcacttgagcccaaaagtttgagaccaacatgtcaagacccagtctctacaaaaaataaagaagttagctgggcatgatggcatctacctgtggtcccagctactcgggaggctggggtgagaggatcacttgagtccaggagttcaagattgcagtgagctgtgatcataccactgcgcttcaacctgggtgacagagcaagaccttgtcttgccc

SEQ ID NO: 640463 - DNA, 1219 bp, Homo sapiens
gacccacgcgtccggaacattctcctacataaccccccatgctattattgcacttaggagaattaatgatcatgtcaagtatcagctaatgtctattccatatttaaatatactagaactttcaagtatatttgcagatctggtgtgttcacctcccttcccaacctcaaatggctctttgcctattcttgtttctttctttttttgttttttgattgaagattatactgcagttagttatgtctcttttactctaaaacagaacagaaatattatattgtttttcgtgatattgacttttgaaatccaggcgagttatttggttgaaggtcctgcattctggacttgtctgattgtttcctcattgtctgattcaattcaggataaattctggggtataggttaggagctattctatactacccattgtatctcctcaggagggatcgtgtccaggtgttggtgatgctgttgataagttggtgaagctggcatccacctgatatttccattgtaaaggctacatttcgtgttatatgagtagattatttgtgggatgatatgtccagatcacatgggatatttctccagcaaactttcactgatggtttagcttctagagaatcttggtgaaccggtattcaattgacgttaacacggggccacattctaatccataattgtcccggtttttgggcccttccctggcaacagaatcctttccttcccctattagggtaactctctataccacaaacgcgacgcacacaacgattatacaacaagtctcacagagtttatatcgggagcgccagcgctcaacttcgggataagctcgcctgcgccgtttataatattatttttgctttattattattttgttatgagctcatcaaccaacaacctacacgtacacagcccacatgccgcccagacgcagacacgatgaaacaggtcagacgtcaagcggaaacgagtgagacgacgcgacccttgcatctgactgacacacactgacagcacacagaacaggaccacaaacgccggccgaacagcgcaactcgaagaaacacacgacaagacagtcgcataaagaccgaaagcatgagcgagtgataatccagagacgacatcgaaacaacggcaccacacgaccaaaagcgcagaaaagcgcagtaaggacggaagtgcagccaaccagacaagcatgcaagcagaa

SEQ ID NO: 640464 - DNA, 481 bp, Homo sapiens
ccccgaacccaagagctactgaaacctacgtaaacagtttttataaagctgtggaaaggcgcaagttgggtcttttatcagcttcccttaacagctttccattaattgaagaaagaggtgggaggggtgaattcatttttgcatgcacaagatgtactgcttaacgaaacactatcagcttgttttaaatggatcttttaaatatcaactgtagcctggttggctaattctttctaatcttccccattactttcgcctagatttcccatagatcaacaggcatagtaaaatgcctcatcagaacacacttctccacacaattcaaaaagggagctcctgtgggctcaaagcaaccatcagtccagcaatgcccatgatttatctgaaactgcttcccaagagacaggagtgcagatctgagtagctgtgctgccaatacagataggtttagcactagatatttagtgattgtggcaaggaa

SEQ ID NO: 640465 - DNA, 227 bp, Homo sapiens
aaatcccaatttttttaactgggcttcctaatatatacttctatcaagtggaaagggaattccgggcccatggaaacttggatatgggtaatttgatgcccaataattttccctaagggtcatgtccaggtttttatacttcccagctattccctctgtggatgaaagtaacaatgttggccccgtatattttaccccccgaaataaaaaatgtgaaaaatgctcca

SEQ ID NO: 640466 - DNA, 152 bp, Homo sapiens
acacagctatcattgccagatatgaagctaagcatcaggtggcacaatacattctatgtgccgttttgttgttattcacattttattgtaacttagagaggtgaacgacctaagttacaataaaatgtgaataacaacaaaatgaaccaagt

SEQ ID NO: 640467 - DNA, 217 bp, Homo sapiens
gaaccttggaagcccagccagggacaatgcaccttcacagagattctgcactaatctgagtgaaggtctaaggtttggaatctccccctcatggagagaactttgtatggctgtctagcttgaacgtagttatccgcaacttgaccttcaggtcgggagaggtggagagccatgccttgttctccttccttgtctaggtttaagtcgacactatatt

SEQ ID NO: 640468 - DNA, 550 bp, Homo sapiens
  misc_feature (24)..(24): n is a, c, g, or t
gagctgacacatgctgcacatggnatgagccttgaaaacatggacatggccaggcgcagtggctcacgcctataatccgagcactttgagaggccgaggcattcagatcacttgaggtcaggagttcgagaccaacctggccaacatggtgaaaccctgtctctactaaaaatacaaaaattagccggatgtgcttgcttgaacctagaaggtggaggttgcagtgagccaagatcgtgccactgcacagagtgagactctgactcaaaaaaaaaagaaacatggaggccaggtggggtggctcatgcctgtaatcccagcactttgggaggctgaggcgagtggatcacaaggtcaagagatcaagaccatcctggccaacatggtgaaaccccatctctactaaaaatacaaaaaattagccgggcatggtggcgggtgcctgtagtcccagctacttgggaggctgaggcaggagaatcactcgaacctgggaggtggaggttgtcgttagccaagattgcaccactgcactccagctggcgacaga

SEQ ID NO: 640469 - DNA, 180 bp, Homo sapiens
ggtcggcctggttgtcatgagtattgattgcatgcttgcatcagtcaacatttcaggcttcgcaggctgtaaagtgctgcagctccttagctttgctgttgttatcgtgtcgctggagccatcgacagttagttagttcgttatgagtgcgcacagctgggtgccagtacaattttaatg

SEQ ID NO: 640470 - DNA, 847 bp, Homo sapiens
gcaaatggctggatgacgccgtgtgcagcgtgggtggtgccctggggtgccctgtgtggccctgggatggggaacctgctgtgtgtgcttcctgctggagtgtttcgtgcagtggcatcctggtggcctggggtctgctggccgtggactggggccggggcctgaggcctgcggagctcgctggaggcaaggccgaggataaggagtggatgcccgtcaccaagttgggccgcttggtccacggacatgaatgatcaagtccctggaggagatctatctcttctccctgcccattaacggaactcagagatcaattgatttcttccttgggtggcctctctcacggatgacggttttgaacgattatgccatgtgcagaaggcagacccgtgcctggccatgtgcaccaggttcaaggccatttgttgctatcggggactacaatggccacgtcggtctggctgttaagtgctccaaggaggtggcacctgccatcccgtggtggccatcatcctggccaatgcctctccattcgtacccctgtgtcgcatgaaggctacttggggtgtgaacaacgactcggccaatgccccacactgtacctttggcactcggtgacagtgccgctgcgggcttcttgttgcttggtaccgcctcatcccttgaacccacggtgccacttggccactcgtctccgtcaccttgctgccccttaagcaaccttgcctcactgactgggctggctactcgattgaactgccaccacgcttcgagtcctgggtgtctgccactgccgaccctgggccaacttccgccaatggcccaccgttggatgccccatttcaag

SEQ ID NO: 640471 - DNA, 127 bp, Homo sapiens
  misc_feature (2)..(2): n is a, c, g, or t
cntcaattctagattaatcgaaatcttcctgtagagtaggttatgcaggtaaaactacaccaccggctgtggatatataaaaaaaaacaaaccactcgagatagtcacagccttccatatctcgcct

SEQ ID NO: 640472 - DNA, 169 bp, Homo sapiens
ctaggacatatggggcgaagtatgtaggagctttaagattagtccgccgtagtctcgtgctactcgctgcgcttcagtaccattggtggccaattgatttgatggtaagggagggatcgttgacctcctctgttatgttcaggatgcgtagggatgggagggcgatgag

SEQ ID NO: 640473 - DNA, 130 bp, Homo sapiens
ctccttgcgtggctcttcgtgaggctcatcgggtggcccgaagagcggctctttgtgcggctctttgtgcggctcatagggtggctcgtggggaggtggagcacgagcgcacgtgttaggacccaaagcg

SEQ ID NO: 640474 - DNA, 528 bp, Homo sapiens
agacgctcgcacaagcaagagagtcatcgcgtcgacaaggtcgacgatgcagaggatgagaaatactgtgctagacaggggcacacgcctccgagggtgagcataggagatctctacagagcgatgccgaggaggaggtgcccctatataacctgacaacttgtaagacatcttgagactctaaggtctgtatcttaagatctctagttctggaggaggtggaaagaaatactcaaatacactgctggtagaggtggtgggtggtaaagtagcctatattttctttctgtttaaatatattttttgggagatggagtctggctcggtcacccaggcgggagtgcagtggcgcactctcagctcactataacctcgcgcctcctgggtccaagcgtttctcctgcctcagcgtcccgagtacctggcataacagggtgcatatcaccacacctggctaatttgggattctaagtaaagatggggtaacgccattgtgggcagtcgggtcttgcactcctgacctcaagt

SEQ ID NO: 640475 - DNA, 1177 bp, Homo sapiens
acaagatatgctgcttgccgagtagattctacctcgaatacctcctagcctggcgctggagacaccgtgggcggggtgtcctgccgcaagtacctcccttcctcctctccgctagcccggagcatcatccaggccgtgtccccggcccagccctcgatggggtcgggtgtctggcatccgcggttagcgcgctagtggtcgcgatgtcgtgaggggcgggcactcggctcgtggtatccggcggtgcgtgccgggcgtccgtgtgcggcgtgcggtgcgccggtgggacctcttgcgtgcgtgccccgcgacggcgtcgcctttgtggcctagccgcttggttgctgtggccgtctcgccgtggcactgttgcttttcgcgtgcgcgcgagcgtgcctcgtttctcccgcctgccgagcggccgtggtagctggggagcgtgtgggccttcgtctctctgtgctgtcgcagcccataccggtccgttggcgccgaggttactgggccgtaggttgcatcagacgccgtgcggcacgcgctggggtcagcgcgcgccgtttgaccgagacccgtcggcggcgcgggatctccatgctgcgcgaagcgcggccaatgcatccgtgccgtcgcccgcacgccggggagacagggcagctggctccggccgacgcctcaaccagcctgagatcggtccggtgccgtatcccgtgcccgtgctcaaccacgggtggtggaggcgtgctcccgagtcgcgtatgggagcgttagctcagctagcgcggctcccgttcgcgggccgcgggcgcaggtggacgcttccgccgcccggcccgccatccgctgcggccgacccacccttggctaacgaaagcgcgacgcaatctgcgcccggtcggcttgcccgggcggtctgcgtgctcccgcgcgaccccgcgcgcgcttcgcccgccgcctgccgtcgtgccccgtgcttctcctcctccctcggtcctgctgcccgcatgtgcggcccatcccttggctcggccgtcctgggcccgcgagcttcggcggggtctggcgtgggtcgccggggcgggtctcgtgcgctgcgttgctgcgcgtgctgttctctcggctggtcgcggcgggcgccctcgccgttgtggcgcgcgtggccgtcgcgccagccgtgcgg

SEQ ID NO: 640476 - DNA, 341 bp, Homo sapiens
  misc_feature (24)..(24): n is a, c, g, or t
  misc_feature (27)..(27): n is a, c, g, or t
  misc_feature (36)..(36): n is a, c, g, or t
  misc_feature (44)..(45): n is a, c, g, or t
  misc_feature (58)..(58): n is a, c, g, or t
  misc_feature (62)..(62): n is a, c, g, or t
  misc_feature (87)..(87): n is a, c, g, or t
  misc_feature (123)..(123): n is a, c, g, or t
  misc_feature (133)..(133): n is a, c, g, or t
  misc_feature (144)..(144): n is a, c, g, or t
  misc_feature (162)..(163): n is a, c, g, or t
  misc_feature (213)..(213): n is a, c, g, or t
  misc_feature (243)..(243): n is a, c, g, or t
  misc_feature (276)..(276): n is a, c, g, or t
  misc_feature (313)..(313): n is a, c, g, or t
  misc_feature (326)..(326): n is a, c, g, or t
  misc_feature (329)..(329): n is a, c, g, or t
acgaattcggcacgcgggaaatgntancgatggcgnctgtgccnngtgggtgtctgtngccnccgtttgtgctaccgttgttgttgncgactgtgctctaagcggtgtctgcttttggggcanagttttcatnggaggcatgcngagaggtaggcttttctnncaacttgctttgcagctcttgtgatcttttggacaggtcaacctggttanctggatcccgattgcagaggatgctgtcangaggaagcacaatttggaaccagctgtatgcangagctattcttgaaggttgtggatgtgcttttggacnacaatgggaacantgntggagaactggc

SEQ ID NO: 640477 - DNA, 171 bp, Homo sapiens
cctcctccaagtcccatgccagggagaatcgctgctgctcctgctgggagcagaacccagcatttagagggaacgggtactttcactacaaaagctggttgtggcccctttggggatcggctgggccccagccaaaatgtccgcctgcagtgtggtgagaatgcccctgca

SEQ ID NO: 640478 - DNA, 371 bp, Homo sapiens
gtaggagacgggtcgttgccacgtagtcccaggctaggttctcgaactcccaggctcaagcaatcttcctgacctccgcctcccataatgctgggatgacaggtgggattacagagcaccatggcactctgccagactcaaggactcaggtcggaccatgtcaacagcatccttgaggcgtggaccggccctctccgcgaaccaggggaactgcactctccattagaagtcctacgttggatgctcacgagctgcatgtctgtcatgtgacttggaccttcgggaagaaaaacaaccatttaatccgtgttccctggagaatccagcacttgagttggatctgttacgggtcatgttcaccctcttgaggt

SEQ ID NO: 640479 - DNA, 540 bp, Homo sapiens
ctagaaaaaattgcactcttctcaagcttgtaatcttctttaccacaagacagaatctgtgtctcctgtcctggtgacatcaggcagatcagtatgaacgacggtattacacgtaccactgagcatggttccatatctcagtcttcagtgtcacagcccacgactgagggtgccccgccctgtggtttgaacaaagaacagtcaaatcttctgctcgacaactccttaaaggtcttcaatttcaactcgtcaagtacatcacactccagttggaaaagtccaagccacatggaaaaatacccgcaaaaagagaaaaccaaagaagatctggattcacgaagcaacctacacttgccagaaactaaattttctgaattgtcaaaactgaagaatgatgatatggaaaaggctaatcatattgaaagtgttattaaatcaaacttgccaaactgtgcaaacagtgacaccgacttcatgggtcttttcaaatcaagccggtatgacccaagcatttctttttctggaatgtcattatcagac

SEQ ID NO: 640480 - DNA, 304 bp, Homo sapiens
  misc_feature (3)..(3): n is a, c, g, or t
tgntacctactcatggctgagggaaaagcatagacgaagcggacgctgtcaggacctggctaaggagaggctgtcacaagaggcaaggcagatgagtgagacacaccaacccatccctcctcattccagcctcatcacacagcttgcagagaggaaggtgcagctggggagaaagaagcaagatctctgtccttggtgcttggtgggctctcggcatcattcactagtggagggacctcgaagcactgaactcctcactttctctgtcaacagtgtctacaccccctgagaccccgtctccaca

SEQ ID NO: 640481 - DNA, 536 bp, Homo sapiens
cattacttcatgctacgttgagatactacatacttttaccatactatagtccccacctctcccatgacatgctatttaacatcctttgcaactttcctttgccatcaacaggagtactctactaatcctaggaagacttaacaatagtgagttgtcctcatctctgatacccaggtgtgcttaagatcaaaatttaatattcccttttcaatattaatccattcattttattttagttgcaatcattcagtggttgggagtaacacttggatcacttaaagcagtaaagaaaattagattacaaaaaatgcagcagctgttcatgacaaactctgcatgaaaattgtaggtaaagaccagaatccagatatatcatgtccaccctctgccactgtccttataggagggagaaatttgcagttattccaataaaggtttcatttaccaagaagctttaaaaaaatacctaagttcccattcatactgcaaaacgttcatttaaaaccacttttagctagtcactaaatcattatatc

SEQ ID NO: 640482 - DNA, 182 bp, Homo sapiens
atcacccggttgtggctgccatggcctgttacttacctttgtgtagccgatttgctctcgggttctattccgactaccccgccgaggacgctgtgcacgctgccctagttgcgccacccccgaagcgcgtcggcgtcccccgtcctcctttacagggacaagggcgcgttcatcctacccgc

SEQ ID NO: 640483 - DNA, 101 bp, Homo sapiens
tcagcacagatcgccaccaccagcggtaatcctccccagacaactggaatctaggtgagtgcaattggagatgcaaatcccccaccactcagcaggatggc

SEQ ID NO: 640484 - DNA, 853 bp, Homo sapiens
  misc_feature (394)..(394): n is a, c, g, or t
agcggctactcagccccagcggcaggtgaaggacgtccttccccagtgagccgactggcccaatcacagcgcaggtaagatgaacggttctgtgggctgcgttgctggtcacattcctggcaggatgccaggccaaagtggagcaagcggtgcagacagacgccggagccccgagctgacgccggctatgaccgtaggctggcaggcaatgcggccagggcgctgcggaactgggcacctggagtcgccttttggcgacttacctgacggctggcgtgcgagagcagctggtctgatgtcagagtggcaggatgggagtctgctcacgggtcctcagtgttcacccaggagagctgagggtcgctgagtggacagaaaccgatcgaagggaagntctgaagagcctacaatattctcggaacatggatggaacatactgatcggccccggtggccggatgggaggacccgcagggctacgggctgatccaaagtgagttgcagggcgtgctgcaggcccgggctgggcgcggtactagtggaatggaccggttgttgtcgcgaccgctcgtggtttgcccggtacgccggcgggcagatgagttgcggggccaattgcttcgggactcgtaggcaggcaggtggcatggcttgcgggggttgccgccctccgctcttcccaccttgcagcgagccttgcgttaaggcgcgttcccttccggtgattggccagattgaacctggcacgaaaagcgcccttggacagttggttccaggggcccgggggtcccagcggaggggtctgccctgaggcgcagggccctcaaggtgcctcattcgccgctagccgggcg

SEQ ID NO: 640485 - DNA, 368 bp, Homo sapiens
tgcatgcgtatttaaacataggaactcagaaactcgtttcagggtatgctgaagttaaaaattaaaaaaagaactcagccgggcgcggtggctcatgcctgtaatcccagcactttggtaggccgaggcgggcggatcacctgaggtcaggagttcaagaccagcctggccaacatggtgaaaccctgtctgtactaaaaatacaaaaaatttggctgggtgtggtggtgggcgcctgtggtcccagctactcgggaggctgaagcacaagaatcgcttgagcctgagaggcggaggttgcagtgagccgaaatcgcgccattgcactccagcctggccgacagagcgagactccgtctcaaaaaaaa

SEQ ID NO: 640486 - DNA, 359 bp, Homo sapiens
  misc_feature (71)..(71): n is a, c, g, or t
  misc_feature (75)..(75): n is a, c, g, or t
  misc_feature (80)..(80): n is a, c, g, or t
  misc_feature (239)..(239): n is a, c, g, or t
ggcacgaggactgcatagggctgcgtggaattgttcaccactttgctctggagcaaagtgtacaatttccncgcngttcnaggaatgtcgtgtttgatgttcagatccccaaaggagcattcatttccaactgctccatgaccgtggacggcaagacatttaggagctctattaaggagaaaactgtgggccgagctctttatgcacaggccagagcaaaaggcaagacggctggcttngtgaggagcagcgtctttgatatggaaaacttcagaacggaagtaaatgtcctcccaggggcaaaggtgcagttcgaacttcactaccagggaggtgaagttggaggaagcttgggctcc

SEQ ID NO: 640487 - DNA, 150 bp, Homo sapiens
accctatgaatcagaagacagaaagatccaaggataaataaccatgatttcttaaaatttcaagtgaaacttgaaggcaagaaggaacctgactatgaaagccattgatacttactattacgcaacttcagatagacgcagctcagaacc

SEQ ID NO: 640488 - DNA, 534 bp, Homo sapiens
cccatcgctcacatttcgtgcgtagctcctcctcctgtcataccagcagtggcattagattctcataggagcgtgaatcctattgtgaactgtgcatgcaagggatctaggttgcacactccttatgagaatataatgcctgatgatctgtcagtgtcttccataacccccatatgggactgtctagttgcaggaaaacaagctcagggctcctactgattctaccttatggtgagttgtataattatttcatcatgtattacgatgtaataataatagaaatacagtgcacagtaaatgtaattcacttcagtcatcccgaaactatccccctatccccaccccggatctgtggaaaaattatcttccatgaaaccagtccctggtgccaaaaaggttggggactgctgctctaaggaagactttttcgtgccttggggactgctgctctgaagaagactctttcatgcttcctccttagcttctgatggctcctggcagtccttggcttgtggctgcatcacttcagtttct

SEQ ID NO: 640489 - DNA, 119 bp, Homo sapiens
  misc_feature (31)..(31): n is a, c, g, or t
  misc_feature (89)..(89): n is a, c, g, or t
  misc_feature (115)..(115): n is a, c, g, or t
ccaccttcttacggtgtcctcacatgctggnagggcctcttttataagggcactaatcccatccattagggccccatcctcatgactgnctaataaccctcaaggcccccccccnaaaa

SEQ ID NO: 640490 - DNA, 1704 bp, Homo sapiens
  misc_feature (438)..(438): n is a, c, g, or t
cgtgtggggtttgtgtgtgtggctgacggtagcgtgcgcgtgtgtctgtttgtgtgctttctttgctcgagtatctctcactcggttgtgggggtgagtgtgtgtgctgtttttgtgttgcaccactgcgcacctagttcttgatgtggtacctctctgttctgttgggggtgagggtactctcttagattgattgttgttgtgttgttgtctctccgctgttctctcgcctctctcattgtgtgtcatccatcttccccggtgtgcgctgccatcgtttggtgactcgcggtaggtgggtctatctcgttgagtgctactcgctcttggtcttcgtgtgtcctctactatgattattgcttcgtcgtttgtgtgttggtgctcagcagagtgttgccgcgcccctgccacagtgggtgttgtcgtcccagctagcgnagttgtgtgtgcatccgctctggtttttatattgaaagagctggtgtgtgttgtttgagccgctccgttgtggtggttctccctctggcgggcatccccaccatagttgttttgtagagcgggtgttctgtgtcgctttcttgttggcgctctgtttctactactcctttgcgtccccgccgggggaatggtgtgtcttctcctcgttagagggggttgtgttctgtattaggtgtcctgcgtagtgggcgacctcctactaatagtgattgtgtttttgatattagtgtttggcgcctgcatgtgtgggtgcgacaccccccactctgcggtgggggtgggttgtgtggttgtgcctccttctcgttcgtcgtcgggctgtggtttgtttgtttgtctgttataatatgtcgtgtccgcagcaccgtcgtgttgattttgttggagcagcatgtagtgaaggagtgtggtcttagtcttcttgtgggtcgttccccgccggtgatgagcgcctccacgtagattgtgtttggcgccaccccggctgctgcagcgagggccagcaggttgtctgttgtcgtttggtcgtttttcgtcacaacacgcgccgcgcatgtacgcattcctcccgctggttgtgcgtcgcccgcgctatgtgttgtcacgcactgcatttagtcactcacggtcttcgccacgccttcgtcttctttggggcctcttctgttctacccctttttgggtgtgagaggcgccacacacctgggttaggatatgtggtctcccctgtggtaatttttgtgtgtgtgggggtcgacacaccagtagggatattgttgtgtatatatacactggtgttaataattatatagacgactttgtgttggctctcctcagatacgattctctctcttctgtctcgctgtgtgagataagagggttgtgtagttctctcacaagagatgatctctaaaacaacctctcccaccactatagccaccccctgtgggagatatttctctcctctgtctgtctgtatttgatacactgtttaacatgtagaggggtatcccccgagttgtgcggagtattggggcacacacaccttgtggcccacacacagtattcatgtggttgcatttccaagaggtacacctatatcgcccctgctccctctcctcctggtaatacaacagaggttcatgcgcatatgtgtatttaagtagttgtcccagagcaattatagaattatgtgtgccccaaata

SEQ ID NO: 640491 - DNA, 307 bp, Homo sapiens
agttcacggagactctcagaaaatcaccccccgtccgggaaggatcaccattttatcttattttattttatttatttttgagatggagtctgctccatagcacaggctagagtgtggtggcgcaatcttggctcactgcaacctctgcctcctgggttcaagcaattctcctgcttcagcctcccaagtagctgggattacaagcagcaccaccacacctagctaatttttgtatttttagtagagatgggtttttgccatgtgggccaggctggtttcaaactcctcacctcacgtagtccacctg

SEQ ID NO: 640492 - DNA, 938 bp, Homo sapiens
  misc_feature (33)..(33): n is a, c, g, or t
  misc_feature (101)..(101): n is a, c, g, or t
  misc_feature (106)..(106): n is a, c, g, or t
  misc_feature (124)..(124): n is a, c, g, or t
  misc_feature (133)..(133): n is a, c, g, or t
  misc_feature (135)..(135): n is a, c, g, or t
  misc_feature (137)..(140): n is a, c, g, or t
  misc_feature (155)..(155): n is a, c, g, or t
  misc_feature (165)..(165): n is a, c, g, or t
  misc_feature (170)..(170): n is a, c, g, or t
  misc_feature (180)..(180): n is a, c, g, or t
  misc_feature (193)..(196): n is a, c, g, or t
  misc_feature (199)..(199): n is a, c, g, or t
  misc_feature (202)..(204): n is a, c, g, or t
  misc_feature (224)..(224): n is a, c, g, or t
  misc_feature (234)..(235): n is a, c, g, or t
  misc_feature (238)..(238): n is a, c, g, or t
  misc_feature (243)..(243): n is a, c, g, or t
  misc_feature (247)..(247): n is a, c, g, or t
  misc_feature (250)..(250): n is a, c, g, or t
  misc_feature (258)..(265): n is a, c, g, or t
  misc_feature (269)..(269): n is a, c, g, or t
  misc_feature (283)..(283): n is a, c, g, or t
  misc_feature (292)..(292): n is a, c, g, or t
  misc_feature (295)..(295): n is a, c, g, or t
  misc_feature (298)..(298): n is a, c, g, or t
  misc_feature (302)..(302): n is a, c, g, or t
  misc_feature (309)..(309): n is a, c, g, or t
  misc_feature (340)..(340): n is a, c, g, or t
  misc_feature (346)..(346): n is a, c, g, or t
  misc_feature (355)..(355): n is a, c, g, or t
  misc_feature (371)..(371): n is a, c, g, or t
  misc_feature (594)..(594): n is a, c, g, or t
  misc_feature (730)..(730): n is a, c, g, or t
  misc_feature (813)..(813): n is a, c, g, or t
  misc_feature (855)..(855): n is a, c, g, or t
  misc_feature (920)..(920): n is a, c, g, or t
catcaattttattaacaatttacggcaataganatttacagaacaaatataagacagttccaagacaaaggagtgtaaaagtacagcacacaggttaatantcttnaccctcatcctctccgtnagcactaanangnnnngcctcctcataatcnttctaaaggngagcnatgtactcangggcatctggcannnngcnttnnnccatcccctcacccaggtancagtgaacgnnggnacgcntggngtncgtcgggnnnnnnnntttnttctttttttttcnggtttcggnaanttntgtngttttgntcagcttgctcacagctctctgtaccttggncaggtntccgccagnttccatttttggaggntggtaatttatgccaaccttgaagccagttgggcaccaatccacaaactggatggtacgcttggttttgatggtggcaatggcagcattgacatctttgggaaccacgtcaccacggtataacaggcagcaagccatgtatttaccatggcgagggtcacatttcaccatctggttggctggctcaaagcaagctttggtgatctctgctacagtaagctgtncatggtaggctttctcagcagagatgacaggggcatatgtggccagagggaagtggatgcgggggtagggcacaggttggtctggaattctgtcaggtcaacattcagggctccatcaaatctcagggaagcagtnatggaggacacaatctggctaataaggcggttaaggttagtgtaggttgggcgctcgatatcgaggtttctacgacagatgtnatagatggcctcattgtctaccatgaaggcacaatcagagtnctccagggtggtgtgggtggtgaggatggagttgtagggctcactacagctgtggaaactggggngcgggttaatggagactc

SEQ ID NO: 640493 - DNA, 1219 bp, Homo sapiens
  misc_feature (685)..(685): n is a, c, g, or t
  misc_feature (728)..(728): n is a, c, g, or t
gtcctctgtcagtaacttccattgattaggcagacatattcaggtaaaccctaatcattaaaaaaaaattatcaatgtagaaagtaattcccttttttctctctgagatatacctcaatcacacacttccccacccccacttgaaacagacctcttcacttgtgtttttttttttttttcccggggggggagtcttcccccgtgttggcccagggctgggatgtgcgcagtggggatgagatctgggctcactggcgaatcttctggccaccgtggggtccaaggggattctcggtggcctcaacctcctggatgtacgctggggactggcaggcaccgcggccacctggtgattctcgggtaatttataaggtaagaagacggggggtgttcgcgccatgtgttggcccaagatgtggtgtctctgagaactcctcgggggccatacaggcgtagattctggcgccactctttggggccctcccaaaaatgtggctgggggatataacaggggtgtgtggacgccacccgggcactctgggcgcaagaaccggtgtcacacctgggtaacaacagaacttttagcgggctaatataacagaaaggcgtgggtacgttctccgcgagagaaaatcgcgacacactttttaaactctttaagaggctctttttgcacctagggtanaaatagcgtccaccatttcccacaattttgctactcccccttngggtgacaacagggggggggtaaaccatacgggtggagccaataaccgtcaattatatttcctaagtggaagaaacatgaatttttgtggaacgcttggttttaccacacaatcacaatggaaaggtggcacatatggttacttcaccgcttgttggaatcaggcaattttttgtaataacgtttttgattattaaaacaaggggttaaaaggtgggtcaaattaaacggataaactcttcgggcgtgtggttgaagaagcacatctccggaggttatttcaaaagggttctttctcttaaaaatgatttggccattaaggaaattttcttccacatatgttttttcaaaacaaggggggaagagttatggggtgaggccccccttttataagatagtgtagctttacaagaagggggctcctttttgtatttattaaaaacagtgtgggggcatgtgagaaaaatattggggggggaaatatgaatttga

SEQ ID NO: 640494 - DNA, 370 bp, Homo sapiens
ggacacgctcgccctagaagaggagaaccagatggaatgcttctgtgtggacgacgatgaaaatcacattaaaaaggagaatcatcctctcctcgtcggacacactgcctatgatggtggccacgcagcaggagtccaacattgaatgtgctgcttataaccctgaaccttacctaaataatgaaagccagccagattcattttccacggcacatgctttcctgtgggtaagatgtgtttatttggttttggtacaaagtttcacagagaatcaacgttcattgtcggtgtgatgagagactgagatgtgacttgctcagtagagagtcggcggtggcgtatcccagagtgtacttcgaaacatgaaaac

SEQ ID NO: 640495 - DNA, 876 bp, Homo sapiens
ctgagactgggtggagggagaggcgcggagaacactggtggctctgacgagctggctgaggccctctcagtatggtgggtcacgcctcctggaactcatgggaccccaagtttctgtgcattcaggtgcgggtgctggccccaatgccctgtgcataggtgtgccatggctgcatcccagtcgatcagaccagaggcagcagcagtggactcatcaattgtgtgaggaagccctgggtgaccctggggaccttgccagactctattcccagaccagctcctaggacaagcctcagagccaacacccgactcgaaccatctcacacggaacccatccccttcataagtctattagcagatgatcagccgggtgtcgatccttattcccatcacagtacagggaccaggcagtggacgccgacccggaacgactgagacatcgaggggcaacaggtgaaagcactggaacaggggtctggcatgggttcatgggcgctcggagagaccaagaatggaagggtggctggactagtgcggcccagtgtggaagcccaggcagaccaaaagataggcacggttggaacacccacacgaacgaacgatcggccagcacatacgtaaaccagtggaggacgccagggaggacagacaaaccaccgccaaaacgtggcgtagagcgccaagtgggaagggagttaggcacagtaaaacaccgagagcaaaagagaggaaacgtattacacagagagtagggaaaaaggacaggccacgttgcggcagggccacgagcagtagacaaccacagagaacacggacccaggagggagatactacaaatgaggcgatcacccaattgacgtggggaaagaaaacaagg

SEQ ID NO: 640496 - DNA, 1901 bp, Homo sapiens
  misc_feature (370)..(370): n is a, c, g, or t
  misc_feature (543)..(543): n is a, c, g, or t
ctggattgccgctacgattatgttacgacgcggagaaacttgccctctagttctggaagtccctatgcagttgtcctgctactagttgaacgagacgtgtagcgtactgtcactttccagtgtctcttgactggccagggatgcctcacattgaagatgtggcaacgccctgtctgtgcatgttgcgcagaactgcgttgagatccgagccagcattctcattagaaggaacaaaggtgattggagcattctattattataaaattctcaagcacggtatcctggtgactagagtcgttactagactgggacaaggcttacgttagtcaaactttgatttgtcgcaactatagtagagacaacacactgnacatagaaatagatacaaagatagatattcatattcccatacaccacgggaaatactcggcgcgagtagtggtcttgttgccttgcatatgttgtgctcgccttgtttcaaatttgtgaatgtcccgagctaactcatattattgggtaaggtctcgagattatactaactancctagaggataatcactactacatctccatatccacacgcattgcgcatgtgtgcatggccctattccccagagtgtcacgccccatctggggactatacttataagttaggattaaactaagtatgcgcaccctatgtgggaccttagaatcgctatctccaaggctctttcgtgcactctgtgcatgtggcgagttccttttcaagtagatttaaaataacccattaaccccttttagcgccactttgggctgtgctagagtgggttacaatcaaaccaaaggaagttttcctttcccttacaatgactggtcatactggtttggggagcgaacttatgtccgcgatccgcaccatttgaccaagaaacaacattctataagggaggaacggccctatctatacgtacgaatggtggcgaagatctcttaccagtgggatagggcgatagaggcacattagcattggcggtcgttcacagggacgaacaaaggcatcttccttttggccggtacaatttgtccgggttgggacaaaccccgacgtatatacgcaccagattggataaccacgccccccaatgaggagtcaaaggattcggagtttgcgcctctagaaattgggtggtcaccatatccggttaccgagaggaacagcacattctccttggaacacgcaccgcactttgggacaccgacatcacttgacagcgaaaagaccacacgggctttggagaaatggcactttggaaggcaaaaacgaggcacattgtttgtaagccgcacccgggacgatgagaacttttatacagggggccagcaccactgtagaccttgggaggccccccgcgctcacatctagaagaacttacaccaaggactaaactgcacaaagcccttcgacgagctgtgtacgacaaccccacggcgtcgctagaataagcgaggcatccacagcgtcgcccccccagtgcagcgccaatatgagcggagcaaacaacccccataattgtgacaacatgagagagacaggcacacacatagccgacagcaaacaacatagattattgcacaccaccacaccacatatacaataaccacacaatggaagagacttatcacccaacattatatatactaaacaacaaatatcacatagaaattaacagaaacccacccaacaagcactatcatacaaaacaaatactgataaaaatagatcaaacacataaacaacaacaaacaaaccaaaacataccacacatacaatcaaaaacattattatgcaaccaacccttaacacaccaataaaacacaccaaaaataacaacagaacaataattcaatcatacacaaca

SEQ ID NO: 640497 - DNA, 191 bp, Homo sapiens
aaatcccgccacaccacggaaattctgggatactcaccagaggtcccatcctggccacgctacctccccccattcacctgctccccgaaaccctcccatgatctaccactcccccaaaactccatccctcatgtgaccgatacaccctctagtctatactctgcacgcgaataccacctcgatgaaactcc

SEQ ID NO: 640498 - DNA, 290 bp, Homo sapiens
aagaaaggggtatcagttgatttgaaggttgaaattaaattgaaattgaagtgagaaggaaaagttttagaggaaaaaaggataacaagaaacgaataaagcctccaagaaatatgggactatgagagaagaccaaatctacgtctgattggtgtacctgaaagtgatgggcagaatggaaccgagctggaaaacactctgcaggatattatccaggagaacttccccaatctagcaaggcaggacaacattcagattcaggaaatacagagaatgccacaaagatcacc

SEQ ID NO: 640499 - DNA, 404 bp, Homo sapiens
accagagccttctgcagatgctactgatatctgctgtcagtggacctgcatggacatcagctcagcatcaagacatagatagaagatgtagacaagaagacgtacccttggaaatatcagatggaggagactctgagcagatacatagatagaggagcgtcagggaccaccatttggagaggacagcaatcatcaaacctcatgctggtgatgggaaccagaatgatggccctcagcagggaccaccccaacaaggaggacagcagcaaacaaggaggcttgattacatcactcccatcatcccctcaatgatccacgtgcctgacagacacagggacataatcccacctcctgaaagacacaaaacacacacagggattagtgaactctatgaggggtttccc

SEQ ID NO: 640500 - DNA, 913 bp, Homo sapiens
tgtacagatggggtcgacccatgtggctcaggctggtctcgaattgccgggctcaagtgatccgcccggctcggctcccaaaaggtgtgagcaattgcgcctgacctacgatttcttgctttatatatcagtctgaaacgcaatggcggtggctgtcggattctgtgagtcataatcgtgatattggtttccacgcgttttggccgatggaggagctcctggagatcgtcgtccttgtgccccgtatccattattttccctgcacctttgtttgacgtgggggatgtcgtcagttggcctttgttcccagctctgcaaccctgagctgcttctccagggagcccctccctcatctcggaggaactggtgattggagcaacccagaggactctgggtagtgggtgtgcttgctgagcttcggggcccctcgctgtgcccacgagctggggagggtggatgctatgacgcgtgcttgggtgcacttgagccgccctggttggtactgtagctgtctagtcccttgcggtcctgtctcacctgccccttttccttagtgtgtagttcttcctgtgacaggggagagactgcttctcagagtggactggtacatcctgtttaggcatgtcagtgctgtagtggaactgtcaacctgtgcgcaaggggggcggcgtcacgtatggaggcacgttattcctaacggtgaggaggtcggtttgaccgtaagactagctagcgtccaaggcgcaaagaagtgttgctactcactcgtgaatgtgttggtactgccccctgtgtcaggaatgatccctgggccccatacgggctattttgaagcctttgcaaacgactataattgcatacataaaacaggcgcgtggagcaaaaattgaggactcttgtgcgcggtggacaa

SEQ ID NO: 640501 - DNA, 113 bp, Homo sapiens
gatctagaaggatcaccttgcgtgtatcatagatatggatggtgaccgtggagacgtggcaggagggctcactcaaagcctcctgcctatacggtgcagactccccagtgttc

SEQ ID NO: 640502 - DNA, 379 bp, Homo sapiens
actggtcccggtgcatagagctgggattcaggcatgagccatcgtgctggccatttttttgttctgtgttatcagtgacaggtatcttgctctgttccccaggctggtgtgcagtggtgtagtcatagctcactgctggctccaacccctgggctgaagcgatccttctgcctcagcctcctgagtagctgggattacagacacatgccaccatgccagggaagttttttattttttgtagagacagggtctcactatgttgcccaggctggtcttgaactcccaggctcaagccgtcttcatgccttggcctcccaaagtgctgggattccagtcatgagctcttattgcccaggctggagtagctcttattgcccag

SEQ ID NO: 640503 - DNA, 931 bp, Homo sapiens
  misc_feature (63)..(63): n is a, c, g, or t
  misc_feature (81)..(81): n is a, c, g, or t
  misc_feature (117)..(117): n is a, c, g, or t
  misc_feature (137)..(137): n is a, c, g, or t
  misc_feature (153)..(153): n is a, c, g, or t
  misc_feature (189)..(189): n is a, c, g, or t
  misc_feature (215)..(215): n is a, c, g, or t
  misc_feature (291)..(291): n is a, c, g, or t
  misc_feature (304)..(304): n is a, c, g, or t
  misc_feature (315)..(315): n is a, c, g, or t
  misc_feature (317)..(317): n is a, c, g, or t
  misc_feature (354)..(354): n is a, c, g, or t
  misc_feature (425)..(425): n is a, c, g, or t
  misc_feature (673)..(673): n is a, c, g, or t
  misc_feature (700)..(700): n is a, c, g, or t
  misc_feature (791)..(791): n is a, c, g, or t
agcgtgtcggagcgtgaagtggcctggtggcggtaataacctggaggagcctcgtggcctggncctggccacggcggagcnacttgtggggcagggagcctctgctgtgcttctggncctgcccaactcgggtgggnaggcccaagccaagangttaggaaacaatgcgttttcgccccagccgacgtnacctctcagaaggatgtgcacacagntctggctctagcaaaaggaaagtttggccgtgtggatgtagctgtcaactgtgcaggcatcgcggtggctagcaanacgtacaacttanagaagggccananccataccttggaagacttccagcgagttcttgatgtnaatctcatgggcaccttcaatgtgatccgcctggtggctggtgagatgggccagaatgaaccagaccaggnaggccaacgtggggtcatcatcaacactgccagtgtggctgccttcgagggtcaggttggacaagctgcatactctgcttccaagggcgggaatagtgggcatgacactgcccatatgctcgggatctggctcccataggtatccgggtgatgaccattgccccaggtctgtttggcaccccactgctgaccagcctcccagagaaagtgtgcaacttcttggccagccaagtgcccttccctagccnactgggtgaccctgctgagtatgctcncctcgtacaggccatcatcgagaacccattcctcaatggagaggtcatccggctggatggggccattcgtatgcagccttgaagggagaangcagagaaaaaacacgctcctctgcccttcctttccctggggtactactctccagcttgggaggaagcccagtagccattttgtaactgcctaccagtcgccctctgtgcctaataaagtctcttttttctccacagaaa

SEQ ID NO: 640504 - DNA, 892 bp, Homo sapiens
  misc_feature (433)..(433): n is a, c, g, or t
ggtaatcttatcaaccatcttcagccgcgaacgatcataaggcgcacgcgatgcatgcgccacatgattatatgatacgcatgaagctaggtgctagaagagtacaaacactgcgttctatcggagtctcacaggctatctaacctgacatgactgattgagagctccgctcggtatcaacatcatgagatactagacgccaatccgaatgttatttatcgcctcgaactggcaagaggactacactcggccaattctctaatatagttgcgcttttcatatagtaaggcatgagtgcccgtgctgtacagaacgagaatactagcctcgtcctgggcaacagagtgacaaccaatacaagcctagagtagcataccgagactacacatactctagtacagtataatacaatacatacaatgcgtgtaatagnacaagtgaaatatagcataaagcgcaaatttaggtcgcgccccgttctactagcatgtccataagcacgttgcgctcgacgcacgcgctcgatcgcgcagatcgttgcgacccacacctccctcggaacgaataaccccgaggctcttcgacgtatgcttgtggcatcctaaaccattgtactagaaagatagcttgaagttcgcacacccgatttgcctcctagaatcctaattatagtaacctctacacactttcttccctgcaccacttccatcaattagaaagccgtattagaccgcccacatgtgcctttcccttgctagcgtgccatgcgtacctagaatacgttgcaagttcgccagttttcgactcattgcccatgagccaaaatctggcattgcgctagaggaagtatgaataaaccccaaagaacatcgccactaagtgccattaaccg

SEQ ID NO: 640505 - DNA, 465 bp, Homo sapiens
ctgcataaagtatgcaactgaccaggaagagaaaaatacacagcacaaaagttggctcacaattccactcaaagagggtctacaccaaagtgaagttatgcaccaggatgaacatgagcatgagatgagaggacttgaatctgagacttcagcatgtctcagtccggtgtgcctcttcacatagtgagcattctgaatgctgtacatgattctagttgaagagaatacttagttgaggcgtataaacagtctcctaattaacaggccaactatttcatttggtatcgcaactttgtgctggacatatacaccaaaccatgtttatatactttaatgttggggtcactggagatattttgcatgcatcattttgcattatttggaatcctcactttatgtgtaaactttacaaactaaactcctgccggaagatgcagcattttactttgccgcagaggatggcgc

SEQ ID NO: 640506 - DNA, 112 bp, Homo sapiens
ctaacgttaatttccaccaactcggggagctgaaactttcacaggcttcacaatcttttgcttaggtctgcctttgtaggtccttagcagcagccattgcagtctttttaga

SEQ ID NO: 640507 - DNA, 935 bp, Homo sapiens
  misc_feature (63)..(63): n is a, c, g, or t
  misc_feature (81)..(81): n is a, c, g, or t
  misc_feature (117)..(117): n is a, c, g, or t
  misc_feature (137)..(137): n is a, c, g, or t
  misc_feature (153)..(153): n is a, c, g, or t
  misc_feature (189)..(189): n is a, c, g, or t
  misc_feature (215)..(215): n is a, c, g, or t
  misc_feature (291)..(291): n is a, c, g, or t
  misc_feature (304)..(304): n is a, c, g, or t
  misc_feature (315)..(315): n is a, c, g, or t
  misc_feature (317)..(317): n is a, c, g, or t
  misc_feature (354)..(354): n is a, c, g, or t
  misc_feature (425)..(425): n is a, c, g, or t
  misc_feature (673)..(673): n is a, c, g, or t
  misc_feature (700)..(700): n is a, c, g, or t
agcgtgtcggagcgtgaagtggcctggtggcggtaataacctggaggagcctcgtggcctggncctggccacggcggagcnacttgtggggcagggagcctctgctgtgcttctggncctgcccaactcgggtgggnaggcccaagccaagangttaggaaacaatgcgttttcgccccagccgacgtnacctctcagaaggatgtgcacacagntctggctctagcaaaaggaaagtttggccgtgtggatgtagctgtcaactgtgcaggcatcgcggtggctagcaanacgtacaacttanagaagggccananccataccttggaagacttccagcgagttcttgatgtnaatctcatgggcaccttcaatgtgatccgcctggtggctggtgagatgggccagaatgaaccagaccaggnaggccaacgtggggtcatcatcaacactgccagtgtggctgccttcgagggtcaggttggacaagctgcatactctgcttccaagggcgggaatagtgggcatgacactgcccatatgctcgggatctggctcccataggtatccgggtgatgaccattgccccaggtctgtttggcaccccactgctgaccagcctcccagagaaagtgtgcaacttcttggccagccaagtgcccttccctagccnactgggtgaccctgctgagtatgctcncctcgtacaggccatcatcgagaacccattcctcaatggagaggtcatccggctggatggggccattcgtatgcagcctctgctgtgcttctggacctgcccaactcgggtggggaggcccaagcctttccctggggtactactctccagcttgggaggaagcccagtagccattttgtaactgcctaccagtcgccctctgtgcctaataaagtctcttttttctccacagaaa

SEQ ID NO: 640508 - DNA, 477 bp, Homo sapiens
ggatagatctccatatttaacacctccggaagcaactctttataaaatcaaaagaccatttgatgaataaaaaacacaggttgccagcaataaggctaaccagagggtctacaaaagatctaaaaatcccaccaaaatcttaaaatctctcatttaaataaatggatgcatctgaaaaatgcagctggaatttctctgatgccaggagcaaagcagcacagaagtccatggagggcagggagtaaacactgaagttgctccacagcgacccacagcctctgccctcacagagtggtactgccccacagcagtaccagcagacctcagagatactgtaggttcagttccagattgcctcaataaaccaaatatcacaatacaacaagtcacaaaaaaattattttggtttcccagtccatataaaagctatgtttacactatactgtagtctcagtgtgcaatagcattatgtctaaa

SEQ ID NO: 640509 - DNA, 934 bp, Homo sapiens
agcgggtttcctggccgaggtgggtcggtagtagcgatggcgggtctgactgacttgcagcggctacaggcccgagtggaacgagctggagcgctgaggtgtacgggccgggcggggcgcgcggtctcggaaggtggctgacggcctgctcaaggtgcaggtggctttggggaacatattccagcaaaaagggagagggtgaagattctctaacaacaaagattgaagatctgatcaagatagcctggatcctgagtatcgtcgaccgacattgccatacgctgatgcctctaagctgcaatgcatcctagcagaggagcatgtttatcctttcccagtgtggcactcctggagcaggtgaatgccttggtgcccatgctgaagatatgctcacgtcaaagccgttcctgagacatgtctagcccgcctgtgaggcgctgtggcccagatccacattcagacagcagtgaccagtgtgtggaaactcactgaggaggtccaaggggctctcctggaggaatacaagcaagactacaatgcttctctccaagacaattcgtgcagagggatgagctactttgccagctagaggccgcacgcgagtgaagccatgcaaggagtgataactagtccgatcccacagtgggcttgggcagtcaggcgtccaggcctatgcaaacggccttgtgacatgcgacgaagctagtattatggctgacgccccttcgggaagcgggatcaaaatggagtcaggtacctgcggtgcactttacacccacctccccagaagtcttttcggcccatcactcgtgtaacaaatactccgcgtgcgcgaagacaatcgggggcacaaactgtccaaggatggcggagaggagtggcagttcccacatcacaacaatatgaagcggaaagaaaacacaaagcacaagaa

SEQ ID NO: 640510 - DNA, 373 bp, Homo sapiens
ctttccaattttgtacctcaaatttatttctcttgtattatttattttttcagtagctagagtacaataataattatagcgatgagagttggcagacttgtcttgtccctggctttaatgagaaatgattgtaaagtttgatcataattatgatgctaacttttggtcagggataagtataattttcattttaaggaaatatcaatggatttatatttcattaaaattttttaaataataagtagttgttgaattttgtcaaatgcctgttcaccatctgtggaagtcattatatgattcaggattatatgatttttcattgtatatgtattaatattatatgtactaataaagatctgtgaaagttgtcaga

SEQ ID NO: 640511 - DNA, 758 bp, Homo sapiens
tagcaaaacaaaagataaatatttattcagaacaaaacttttaacaatcaattttacattctaagcccacaaaggaaatagcaaaaacatatagcaaaggaaaagcaaacactaaaagaaaagcagggtacggggcttttctacgggtataacatgttagtgggcccagtgaccctctccgcatgtggcctatcttcccaagtacatttatagagttaacagctcactcataatttggggttaaaatccatctttctcctgaagaatcaggagtggcacatgagctccagctagctgcttctctagggttcgtagctatggaggctaaggtgcaatgtaaaccttgggtaggttgctttacacaggggcacccccatttctcactggtggcacatgaattggggaaggggtagggcctccaaaggaccgggcacactgtatttccagaagtggtgccccagggagcaacgaatgccccctggagtgtggtccttggtccgtgccgtatctcccaagtattcagaagcccctccttaaaaagccttctctttctgctccctcctccaggtgattctcagcatcctcgggcgatcatctggagagatcagaatttctgggcctcaaggtgtgggggaatcgtgtgacgtgtgagacgtctgttggattggccccggcttggggtcagggcctacatagggggtctggaccgaacgttgtgatttccccgcattacctttgggcggtctcccggggaaccg

SEQ ID NO: 640512 - DNA, 739 bp, Homo sapiens
tggctaggtctgatggctgggtgtttaaattcggcatcgatggcaccccatgtccctgtgtatgtcccgtggagaagcagacacttctcagcccatgtgccctggactgctgatggtgcatggtggaacccctggcgccctgccctgctgatcccctgtgctgacaccattgacatgctcagggccctccctgaccctgcccaattggtgtgtgctgccttttcagcctgtggtgtgcttgccactaggtgtgccatgtgcctgggatgtgcccttgtgaaaatggcacctgtgtacatctcagtgagatcaagaagagtgctgtgaatgaatgcttcctagtttccacacctctgtgcatgtttgtatccttgtcctgtagaatgcatgtggactgatgcttgcatgaatgtgtagatccttgattgcttgttgtgacacacctgtgacccctaactttccatgatgctgagccatgcatgtagctaatgctgcactgacccctttgccatttcgcacagcctgaccacagatatgtgtgctacctgttgggaagactcttgccacttgctagcttatgcttgacatgtggcattgagaagacccataaccatttaacattgccacgttgcgatctaacacatcgccacccctgagaacggcacaaccttgaattcgtgacgcgcactgctgcgctagacaacaaaataacatcccttagcgacggggtaaggcacac

SEQ ID NO: 640513 - DNA, 980 bp, Homo sapiens
  misc_feature (980)..(980): n is a, c, g, or t
agtcatcactgtgggcctcccctgtgggctggaacgtctgcatggatgcccctttgagaaatgctgttccacagaaccctgcctttcatggccttggagactgtgggcatgggtgatgaatgcacgcgtccctcagagccaggcctgtgcatgtggtgctagcatggggccaatggcccatgtggatgcattggtctcctgtcggagggacctgggcaagccctctccactgctgccatgcgtggtttctctagcatgggtgatggtccagcaccacacctgcttgtggaacctgtgtgtgcctaaactgcaaacaggatgccaatggcacaaatttaaccaaacaccaaggttgctgtgaggccccatttcatgagcctgggctccaaggacgtgtccttaggctggctctggaatgtgcccagctgccagcccccgtacctctgttaactgggatgccatgtcccgcggctccgcccaggcatggtagcctgatcgcgcccccagggtagtagggggcacctgaggagcagggtctgccctggcatgagcatgagcccaggatggggtcaggggtcaggccctgccagaggctgagggtgcccaaggcgaggccggtgagtgccagctctacaaattaacagtgttaatatacaggagtagtctctccagggtcccagttccctggccaccctcaacccagacccagggagacgagggcggattgcaagaggagctggccagaggctgtgcatgtcctgagttgggcacggtaggcaagagagaaggcacgagccctgggtgcccaagatcccagggtacgaggccaggcctgcctggctaatgagcgagggagcaggtctaatggcacggctggttccatgacggcgatctctgtcaataaccgtggtcccatcggataacaccgattagatgaggcctgagatcctcttcacccttttgtactccaatggtccaan

SEQ ID NO: 640514 - DNA, 500 bp, Homo sapiens
tctaagccggaccgtccttcatcatacctaccaagatcagatatgcatcctttggcgggtgcagtggctcacgccatgatatcctatgcactttgggaggcgatggtgagcggatctcttgaggtcaggagttcgagaccagcctggccactatggcaaaaacccgtctctgctaaaagtacaaaaattggccgtgtgtggtggcacatgcttgaggtcccggttacttgggaggctgcggcagggagaatcgcttgagcccaggaagcggaggtagtagtgggccaagattgtgccactgcactcaagcctgggtggcagtgtgagactctgtctcaaagaaagaaagacagagagagagagaaagagagaaagaaggaaagagagaaagaaagaaagaaagaaagacagacagagagacagagaagagagagagagagacgagaaagacagaaagaccgacacgaccagagagaccgggtagggtatgatgaaggacg

SEQ ID NO: 640515 - DNA, 949 bp, Homo sapiens
  misc_feature (59)..(59): n is a, c, g, or t
agcgaacggtgttcgccccgtaacaatagtacgccgatgatgtgtgttataagtgcgtnataaaacccgcccctttaggcccgtcttttccccgggtaattctttttagaggatcacacatatgaggaaacctcttatgtggcggcaccccctctcgagaaatgggtcctcctcattagccaaaaaggggacaaagttccctttgccgcaaaggaacacccactctggttttgaggccgccccctttcgggattataccgtgagtatacacttgatctattttgagcaccatctttaaacccgttataaggcaccctttttaaacctcaggcaaagacctttatcaataacacaggcactctgtgcgcgtctgcagacaggggtattatggacaccctggttctcaaagacatttacctccccccgggggcccattcagtcatacatagagcggtcatttcggagcgttgactttagtagaaaaaaaaaagccctctttgtagtccttgccgcgctaaaaaaggaggaatcaatacaaatttctccaggatacacggtttggcactaatgtccggttgatgagcactcctccaaacccccccgggatatagacagtacgtgcacccccctggtccgcgcccccaaaaaacggggttatacggcgacgggcgtcaatatcgccttgcatgccctgtgcaaccaccctttacaggggattgcggcacccttgcatgcaagaaaattgccttcacatccggcctgatttttctcagagatacatagcacatagtgctcccgcgctgggtgactgcagttagagttcaaccgcggtgcacgcgctcattcagcagctcagaaggtttccgcacaacacaaacaactcctttagggacgagttcagaaagctgtaaccccccaaaaaatacaggcagcttaacccccacatgac

SEQ ID NO: 640516 - DNA, 132 bp, Homo sapiens
atggcggtcgatgatccccagcggttcgcggtcctgcgccttggcccagtcgtgcttgaaatactccatgcggtctagcgtctgcgccacggcgatgctggcgccgcggatgttccacaggccccagtgtcg

SEQ ID NO: 640517 - DNA, 97 bp, Homo sapiens
gagcttcgtgactctgctgtgtatttctgtgccagcagccccccctcaggagcgggaggggagcagttcttcgggccagggacacggctcaccgtgc

SEQ ID NO: 640518 - DNA, 819 bp, Homo sapiens
agcgggtctcgtgtcttttcctcctcccagtgcccggcgtacctcccttcccccctcgccgccgaccgagttcttcctttaacagacagggtcgccttgctgtcgtcgcggatgattttcctgctactgctactgctgctgctgccaccgtcactaccactgaggctcattatgccactagatccacttcgccagcaagtcccagctctacataaggaggtccaacgatgctcagtacggacctttcgaccactgacccggcacgtcacacgcgtcgtctgctccggcacaccaatcctgaccctcgggcgactgtcttgactacttcctccggagcaacgctacaccactcgaggggcacgacctctgactcctcacgcggacactcactgcaccctgtggcacacacgccgttgggaccgcctctaccgtagcaccacgacgcctattcttggttcggctaaacacttggccacataggcatcagacagcattcttgtgtccgtgtagaagtccgtaactgcatacttcttccgtgggagactgtgtacgttgagcctgccatcgcggcccaacatcagcagggcgaagaacgtagaggcgcgaagcagcacgcgcgacgtggtcgccccgtcacaggaggaagtcccaactgagcggtccacgacagggacgcaggtagcccttgacagaacgagagaccacagctggaacactaaacgcaccttaacgcgcaacgcgaaaacacggccccagacacgagcccgaaccggtgaccccttgagcacggggttagtgacacgcaccgcttggtaccag

SEQ ID NO: 640519 - DNA, 961 bp, Homo sapiens
gccctccaagcctgggcaacagggtgagactctgtctcaaaaaaaaaaaaaaaaaaaggaaaaaaaaaaaaaccagaactttgggaatggcttgtttgtttaccctggaaggttatttgggaaaaacctattttccctctttatactcctgattttagaacctggtgttggtactttacaccctcaacgctagaactttaattatttttacggagggcgcattagcggttaattctgccttctccagaaggatatttttattctccaaattaccgtgtaactcctctggagggggttaacctcttttttggaggatagagctcttgggctcgtgactctgaaggcctggagttgcagtggccgccagcctctcgaacttcaccaaaaccctccggttgcccgggtttcagggcaattctccctggcttcaagcctccccggagtagctgggtttcacaggtggcgccctccaaccaatggccgttggctaaatggttgggttttcctaagtcacggagcacggggttcccccgtgtcgggctaggctggatcctttgactccctggacctcagtttgatcccacccaatctagggtctcccacagagttggcggggtttggcgttggttgaccccaccggtggcccaggacttaacaattcttggctaaggtccatttccttcccctttttccaatcagtttgtatggtggtgttttggtggtatgctcttgtggggggaaaacgagacacggggcctcacgtccgggtgtgccccggtggggaggggtagggttatgccacgatagcctcaacccctgggggcgggtggttaccccccgggaggcccggagatggtgggatttacatttcggcccaatttgtcttgttgtctgccacgagtctttgtcggaggggtgttctgcccccgcagtggggtgtggctccgaccccccagggtcc

SEQ ID NO: 640520 - DNA, 254 bp, Homo sapiens
gcaattgcttaatttgttcttccttcttagcattttgctgagaagccaaacgttgcgccaattcagaagattcacgccagaagtcgtagttaccaacgaatggtgtgatcttaccaaagtcaacatccaagatgttggttgacacggcgtttaggaagtgacggtcgtgggataccacaatcactaggttcgggaaatcagccaagaaatcttctaaccagttaattgtctgcacatccagaccgttggttcga

SEQ ID NO: 640521 - DNA, 100 bp, Homo sapiens
ttcaagcttctaacgatgtacggggacatgattatcctggaaaaagaagaaaagagcttcttctttgcagatgaaaataaaggtgtttttggccaaaaaa

SEQ ID NO: 640522 - DNA, 581 bp, Homo sapiens
  misc_feature (163)..(163): n is a, c, g, or t
  misc_feature (227)..(227): n is a, c, g, or t
  misc_feature (279)..(279): n is a, c, g, or t
  misc_feature (324)..(324): n is a, c, g, or t
  misc_feature (360)..(360): n is a, c, g, or t
  misc_feature (388)..(388): n is a, c, g, or t
  misc_feature (421)..(421): n is a, c, g, or t
  misc_feature (426)..(426): n is a, c, g, or t
  misc_feature (532)..(532): n is a, c, g, or t
ctttaatgaacctccttcgggccaaaagatacccaagattattctggttatcctggaacccattccaaaaatttttccaggcctgctaaaaaatcagggtgaaactgagaaacctaagaataatgattaaagaaattggaggcttagacaaatttgaagctcnacaaacccatgaaaatgagtctgtgaaaaggctttcgttaagcttaattgagaaggatttctcngtagaggaacagaaagatcaaaacgttgtaccagaaactacctctgaaggcnacactttccaagttcaggatggggctcctgggacctttaactttnaggtcatgtagctgagacataaatttgttgtgaacnacgtttggtattttgtctaaacgtttcncaactaagaactctttcttaaatgtggtttgtnactgnagcactttttacactgaaactacactcccaacagttccaactgtacaaacaaactgtatgaagcctgtcctctgactaggtttctaatttctatgtggaatttccnatcttgcagcatcctgtaaataaacattcaagtccacccttaaaaaaaa

SEQ ID NO: 640523 - DNA, 313 bp, Homo sapiens
  misc_feature (14)..(14): n is a, c, g, or t
aggcgatgtagagntgctgggtactctggactcaaagtgaaggggtatccgagttattgtatagccattatgattattaatggtgagattgattggagattggtatggtcattgtcggagagtatatttgttggagaggatagctattagaaggattatggatgcgggtgcttgcgtgaggaaatacttgattggagcttcttgtggacgagggtttaattttttgggttagaactggaataaaagctagtatgtttatttctaggcctactcaggtaaaaaatcagtgcgagcttagcgctgtgatgagtgt

SEQ ID NO: 640524 - DNA, 813 bp, Homo sapiens
ctggtggcgtttcaggcactgacacctgtagggaccagccccacagggtcagtgggtctctccctgtgtgcggcgatgagagagtgtagaaataaacgacacaagacaaagagataagagaaaaggcagctgggcccgggggaccactaccaccaatgtgcagagacctgtagtggccccgaatgtctggctgcactgttatttattggatacaaggcagaaggggcagggtaaagagtgtgagtcatctccaatgataggtaaggtcacgtgagtcacgtgtccactggacagggggcccttccctgcctggcagccgaggcagagagggagaggagacagacagaaagacagcttacgccattatttctgcatatcagggactattagtattttcactaatttactactgctatctagaaggcagagccaggtgtacaggatggaacatgaaggtggactaggagcgtgaccactgaagcacagcatcacagggagacggttaggcctccggataactgtgggcaggtctgactgatgtcaggccctccacaagaggtagaggagcagagtcttctctaaactccccggggaaacgggagactccctttcccggtctgctaagtagcgggtgtagttccttgacaaccttttgctaccgctggaccatgatccgcctggtaacgggcgtcttcccagacgctggcgtcaccgctagaccaaggagccctctggtggccctgtccaggcataacagaagggtcgcactcttgtctactggtcaactcttcactttgttccctctaggtctaa

SEQ ID NO: 640525 - DNA, 268 bp, Homo sapiens
  misc_feature (28)..(28): n is a, c, g, or t
  misc_feature (82)..(82): n is a, c, g, or t
  misc_feature (160)..(160): n is a, c, g, or t
caaaaaataaaaaaattagctgggtgtnatggcacacacctgttgtcccagctactcaagaagctgagatgggaggatcctnagctcaggaggtcaaggctgcagtgagccgagattgtgccactgcactgcagctggggtgacagtgcaagaccctgtntcaaaccaaaccaaaccacacacacacaaacacacatacacacacacacacacgaggtccaaatggtagcagggatccaaaggggacacagtatgtaggtcaaacttg

SEQ ID NO: 640526 - DNA, 368 bp, Homo sapiens
tcacctgagggggggagttcgagaccagcctttgcaacatggtgaggccccatgtctactttagaaaaaaaaattaggctggcagcagtagctatgcctgtaatcccagcactttgggaggcctaggtgggcagatcatctgaggacaggagttggagaccagcctggccaacatggtgaagccccgtctctactaaaaatacaaaaattaaccgggcgtggtggggggcacctgtagtcccagctaccagggaggctgaggcagaagaatcacttgaacccagaggcagaggttgcagtgagccaagattgtgccactgcactccagcctaggcaacagtgtgagaccctgtcccaaaaaaaaaatg

SEQ ID NO: 640527 - DNA, 220 bp, Homo sapiens
aatatatctgttaaatgtattcagtcagtacacaatccgttataaaagtagtatatatattatactgtcaataccttcatcacatctataaatacaagatttacacagcaccccatcaaaaaaaaaatatgtaaagcgcgttaacaattttctccttttttggaatccttttaaaatttcaaaggggggccccggttaaaaggggggcccctaaattaaa

SEQ ID NO: 640528 - DNA, 317 bp, Homo sapiens
gcatccatagcctacaaagtgcttttgtgtccacgatcttaccctagttcttactgagagcctgctgaggtagcaggtcattgttataccactgtgcagtcaagggactcaaggcccacactgtttatcggatccacccgaagccacagcttccgcctccttcatgacccctgagtttcctggcctgtttctggttgtgcctcctgtaactgcctgtaactgtttccctcgttttcatcagccaagccatctcctccctagccctccctgcccgtctactttaggaagcttcttcctggatctgcaggatgttcact

SEQ ID NO: 640529 - DNA, 919 bp, Homo sapiens
atgacccaccaatcacatgcctatcatatagtaaaacccagtcccatgacccctaacaggggcccctctcagaccctcctaatgacctccggcctagccatgtgatttcatcttaccactccataacgctcctcatactatggcctactaaccaacacatgctaaccatataccagtgatggcgcgatgtaacacgagaaagcgacataccaagggccatcacacaccacctgtccaagaaggccttcgatacgggataattcctatttattacctcagaaattttttgcgttcgacaggatttttctgagccttttaccactccagcctagaccccataccccgcatatatgagtggagggggcacttggaacctactaaactaggggcgtgcaccccacgacttgagattcccccttaggaacgtccctctacttcctaaaaagctagcattctctgttagtattaagttctggctagtcaggaggtgattcgatacatcgctgaaagctcactctatgaagtactacttagaaaagtcgagccgaagatccgtaaatgattcacaggcactgacttattacaaatttgaaccttgtggtctgtatgatgatccctcctacgaagtcgtcaacaagatacttcggagtctccccttcaccaatttccgaccggcatctacggtccaacatttttgtgtagccacaaggcttccacggacttcacgtcattattggctcaaactttcctcactatctgcttcatccgacaactaaatatttcactttacatccaaacatcaccttgagcttcgaagccggcgctggatactggcatttgtagatgtggttttggactatccctgtattgtctccatcctaattgatgagggtctttaaaaaaacacatttaaaaagcg

SEQ ID NO: 640530 - DNA, 287 bp, Homo sapiens
cgtgaggagcaggtaccatttttagtagtcacacaattccacctcctgtttttactactggcaacttctacttgagaataatgttctgaaaatggaggtgggggggggtttggaagcaaacacatttggggtttttaaccaattgttaggttctttttatttagggttgtgcagggaactgttgggaggtttctttaggtgggatggggggactgggtgttggtttttggggggtttttgggacgggttttattttgtcccttaacttggtttgttgggcaggtggg

SEQ ID NO: 640531 - DNA, 680 bp, Homo sapiens
ggagagaactagtctcgagttttttagggtttttttaaaccagggaaaaacatcgggattccattgggtagttaaaaggttttggaaaatgttgatatacacaagcggtactgggagcgggataacagacataggaccgggatgacagacatactttaatcctttaattttggagagtggagtttcactggtcacccaggcgggaggtgcaagggagcgatctgggctcacgttggaacctccacctcccagggctcaagcaaattctccgtggcctcagcctccgtgagtagcgttgggaccacaagcgccgtggcaccacgcccagcataatttgtggatagctatatacgataaaaagacgggggttatcacccatttgttggcgccagggcctgggtcttcaaaacctcgcatcaacctcagggtagaactccaccttggcgctcggtttccgcaaaggtactgggagatatacagggcggtagacgccattggcccgcccgggcctttaacaatgaggatttgtcactccctagaaagggcacttttcccccaaaagaagattcaactcttaaggcctctggcgtgctaggccaagttcccagtgggacgtgcccaaaagaggccagggaaaccagtccccatggggagatgtgtagtcccctttaaacaatagg

SEQ ID NO: 640532 - DNA, 656 bp, Homo sapiens
ccaggtcttccctcaagctgattctggtctctatttcttctctccttgattatgttcctggtttctgatcatatccctaaatggtaaaaactggtatctggaaaattagaacataaataaaataaagttaagtccaatttatctaactccggtattgtgtgaacaagatttgaagacagctaaaacttagaaaataaactaaattcaaacttcccaagtattccttctcccaattctgtttgaataataatagctaacatgtattgaacgtgtgttataatcccaacgattattctaaatattttacatatactaacttgtctaattcttacaagtctatgagcaagacagcatttattattcccattttgtatatgaggaaactgagtcacataggagtaaactggtctaagttaaaaactggcaaactggcaaagttaggattcacatctaagtaatctggatctgagtctccattctttgctacaccataaacctacatatacaacaaaaactctctagccatagtctttcatgagaaacccaaaattactgaagcacaggtttatataaccttttaaccatacttatgctacatggagcattattattagcaatggtacagtatgttttatgagagcgcagatattatttac

SEQ ID NO: 640533 - DNA, 214 bp, Homo sapiens
  misc_feature (23)..(23): n is a, c, g, or t
cagggggggggggccccccctgntacccttttggtcccccttgggttttctcccccaatttaaaaagaaacctttggtaaaaaaaaacgggtctttttttaagacaaaggccccccccatagaaagggtttttggaaacccctttttttcccccccattttgggtcccttttaactacccctttttccataaagcccttttgttttggttttta

SEQ ID NO: 640534 - DNA, 117 bp, Homo sapiens
  misc_feature (16)..(17): n is a, c, g, or t
  misc_feature (107)..(107): n is a, c, g, or t
  misc_feature (117)..(117): n is a, c, g, or t
tacagggatcctctanncggcacaccaaacacacgtcaactaccaccattcaaaagttgagcaaattgggctatgaagttttggctcatctggcatactcacatggnccatcaatan

SEQ ID NO: 640535 - DNA, 1303 bp, Homo sapiens
  misc_feature (219)..(219): n is a, c, g, or t
gatggtaagggagcgaagtgcataactcctaagggctagtcgatggtcaatcattctaaagatcgttcctttgtcggacatgagtcgctgtagtacaatctacatgtgagctcatcgcaataatcaacagtcatcacgtgtgactctgtacggggactgtaggttgccagggaagatgcactgaagatacatgagattgtttggggtagaagttctagntggcatgctataagatcgagttgtagtctgaatgtgacacttatgtgtatccactttagggccgctagggacgtcagggtagtgagttacataggtccatggttaaatggcgcgcaaggatactcatgttgggtgaagaggcatagaagtgtgatgtgatggaatgtggctgtggggtgtcgggacgaagtatagtagaactacaagctttgaagcctaagcatatatccaatatatcatgtaacctatataaacatttaccgatagagattcatctatctaaactcgttatcttagaaccactaatcagagagttgctacataacttaaaagccataacaaaagaaattacagcacgagcgacgtgggctatcgcaggggatggcctctgctagttacccctatggcttggaatcgcgtgataagggcttgtgatgggacagcgtagagtaacatttgtgctttggtaaaaaccccggtgggaggaggtgggtaagcgttgggtcaagaatggagagccttagaaagagatacgacagagaccgaaaattgatcaggccttctcgggggccccttggaggacagaaagaggagggcacacgcggaagaaaactttcctgggttcattcaaaagacagtgggataataattgccaaaccacaatgatctcgtctgtaaattcgttttacataggcaaaacctagaggtgggatacgagctggatcaacccgcttgtacaatatggggaagggaacgttgccccagggaaattcccccaagttatttagcaaagtgaacacccacagagttggcccttattctaccattacagttgtgcgaacacacctaatgtagtctttgggtgggagaaataagacacgactgtgtccattggcaagggttaataacattggtaccttcctgggttggagcaaatttttggcgctatggttaattactatggcgaacaagtaagggggggaacagataacaaagtgggggaaaaacttacaagttaacaaaggaagagaattatatatgaataatttcattaaggaataggggaagatacttaggggaccag

SEQ ID NO: 640536 - DNA, 290 bp, Homo sapiens
  misc_feature (262)..(262): n is a, c, g, or t
gaaaaagacaaggaaaaagtatggtccatttacatatttataaaagcaatgtaagagctttcccatcagtggtattcttggaatctatggtctttactaacttactatagctccagccactgctggggctcttccttatgggccatagctaagagtaaccccagcagttgcctagaaacataatcactcctgatgattgggagaatgaaagtttcccgtttaaactgactttattcttctagaagaaactgcctgtgctggngaatacaactctaaaactttaatttttt

SEQ ID NO: 640537 - DNA, 633 bp, Homo sapiens
cactccctgctcagtgtcttccgttatggaggacttcttgatgagacccaggatgcacaatggcagcgagctttgcattatcttagtgccatctcagagcgttaactacagtgacccatgattgtcatcatgcatcttatgacggacaacgacacaaggatccctttatcagcaggaacggttccactgtggagcgtacatcttcagtcccccggagctgaaatggctgtctgacggcaacgacaggcatgtgacccccggcttgcgctgctggcattccagtccaagcctacttctgacgcaatgacggagactgacaaacctaaccacaggcagctatggacgacacctgtgctcccagcgacaaggcactcagcatgccaccagtaccggcgcattgcagcacttcagccccagcctccctgagggccctggccctttccgaaggagatcaccgcctcattcgtaaccgcaaacagctggttccatggacggtactttctgagacttcatcctcgaggcctggtggctaccggctcttttcatcttcacggccacccacagaaatgaagcagagtggcctaggctcacagtgcacagggctgttcagcaccacagtgctgggtggctcct

SEQ ID NO: 640538 - DNA, 816 bp, Homo sapiens
  misc_feature (217)..(217): n is a, c, g, or t
gtccgctgcccctttagtgtttattgttggttgcgtcctcctggcaacgaactctcgcagcgtaagtgtagcgggagatgagtgctcgtgacgttgacacgccccgctgtcgcggatctcattgtatttgccctcgctgcttctcctcacagtgggggtcttgtcgcacctagataggtttatgttcgtgtccgcccgcgccgcactaacttgaacncctttctggtggggtcgggtcacggctctttttccgtagccacccgcctgagctccgtctcgtgccattgagccgcgtttgcgcggcgtctcgttctgctctcccgctctcgctgtttgctcacatccccttccccgtggtgtgggaagctacactctgctctgctccaggaggtctcttgttgagaatcacacacgtttctttccttctcttcgttctcgcacatataatctcatcactctctcttccttgtcactctccacctgttcggatgctctgctctcacactacacacattgttctcactcacaccccacgtgtaaatgctctgctcgctctctgacacacacatttgtccctccctcacccacgcacacacatcaggggagggctctctcactccgtctccactcaccacacactatctagaccacacaacttatacaccctctctgtctctccccagtggacacaccaccctctttatttcttaccaccctccttcttccccctatttctctctcctctttctctctctctcccccccgccacgtcacaatatcccgggtgttattctcccccaacaaatatacaaacaa

SEQ ID NO: 640539 - DNA, 207 bp, Homo sapiens
aacaagaacacctgtcctggagaccgaagtgccattacaaccttgcggccttcggcttcgggccccaccttaactttttgacaattccgtgagatgacttccggagagttgtggactttgtaggtgaagggttaacatttggcttaggcgcaatgcgcaagctccaagctccatgatttaaatccttccttctaagatctaaaaaca

SEQ ID NO: 640540 - DNA, 905 bp, Homo sapiens
  misc_feature (14)..(14): n is a, c, g, or t
  misc_feature (19)..(19): n is a, c, g, or t
  misc_feature (23)..(23): n is a, c, g, or t
  misc_feature (28)..(28): n is a, c, g, or t
  misc_feature (359)..(359): n is a, c, g, or t
  misc_feature (422)..(422): n is a, c, g, or t
  misc_feature (874)..(874): n is a, c, g, or t
  misc_feature (904)..(904): n is a, c, g, or t
agcgggttcccgangcgcngggngcggntgggggcggggaggggggcgcaggaccccaagtgggggtcccggagccagagggccaattcctgtccccccagcagcatggcatcgtgtgctgaaccctctgagccctctgccccactgcccgccggggtcccaccgctcgaggacttcgaggtactggatggggttgaggatgcagagggtgaggaggaagaggaggaggaagaggaggaagaggatgacctgagtgagctgccaccgctggaggacatgggacaacccccggcggaggaggctgagcagcctggggccctggcccgagagttccttgctgccatggagcccgagcccgncccagccccggccccagaagagtggctggacattctggggaacgggctgttgaggaagaagancgctggtcccagggccgccaggttcgagccgcccggtcaagggccaggtggtcacctgtacatctgcagacgtcgctggagaattggcacactgggtgcaggaggagccggagctggtgttcactctgtggtgactgtgacgtcatccaggccctggatctcagtgtcccactcattggacgtgggcggagacggccatggtcactgctgactccaagtactgctacggcccccaaggcagcaggagcccatacatccccccgcacgcggccctgtgcctggaggtgaccctgaagacggctgtggacgggcctgacctggagatgctcacggggcaggagcgcgtggccctggccaaccggaagcgggagtgcggcaaccccactaccagcgggcggacttcgtcctggccgccaactcctacgacctcgccatcaaggctatcacctcancgccaaagtggacatgacgttcgaggaggng

SEQ ID NO: 640541 - DNA, 905 bp, Homo sapiens
  misc_feature (14)..(14): n is a, c, g, or t
  misc_feature (19)..(19): n is a, c, g, or t
  misc_feature (23)..(23): n is a, c, g, or t
  misc_feature (28)..(28): n is a, c, g, or t
  misc_feature (204)..(204): n is a, c, g, or t
  misc_feature (208)..(208): n is a, c, g, or t
  misc_feature (215)..(215): n is a, c, g, or t
  misc_feature (217)..(217): n is a, c, g, or t
  misc_feature (221)..(223): n is a, c, g, or t
  misc_feature (225)..(226): n is a, c, g, or t
  misc_feature (228)..(229): n is a, c, g, or t
  misc_feature (235)..(235): n is a, c, g, or t
  misc_feature (237)..(237): n is a, c, g, or t
  misc_feature (239)..(240): n is a, c, g, or t
  misc_feature (243)..(243): n is a, c, g, or t
  misc_feature (248)..(248): n is a, c, g, or t
  misc_feature (250)..(250): n is a, c, g, or t
  misc_feature (252)..(252): n is a, c, g, or t
  misc_feature (258)..(258): n is a, c, g, or t
  misc_feature (260)..(261): n is a, c, g, or t
  misc_feature (263)..(264): n is a, c, g, or t
  misc_feature (266)..(266): n is a, c, g, or t
  misc_feature (270)..(270): n is a, c, g, or t
  misc_feature (272)..(272): n is a, c, g, or t
  misc_feature (280)..(281): n is a, c, g, or t
  misc_feature (285)..(285): n is a, c, g, or t
  misc_feature (287)..(287): n is a, c, g, or t
  misc_feature (289)..(289): n is a, c, g, or t
  misc_feature (291)..(292): n is a, c, g, or t
  misc_feature (294)..(296): n is a, c, g, or t
  misc_feature (298)..(298): n is a, c, g, or t
  misc_feature (303)..(303): n is a, c, g, or t
  misc_feature (359)..(359): n is a, c, g, or t
  misc_feature (422)..(422): n is a, c, g, or t
  misc_feature (874)..(874): n is a, c, g, or t
  misc_feature (904)..(904): n is a, c, g, or t
agcgggttcccgangcgcngggngcggntgggggcggggaggggggcgcaggaccccaagtgggggtcccggagccagagggccaattcctgtccccccagcagcatggcatcgtgtgctgaaccctctgagccctctgccccactgcccgccggggtcccaccgctcgaggacttcgaggtactggatggggtttcttcttantctntttcatntnccannncnnanncccctncngnngangcttncntnaattcncnnanncngctngnggcccttnnaaancncncnncnnntnatgcnaaacagcctggggccctggcccgagagttccttgctgccatggagcccgagcccgncccagccccggccccagaagagtggctggacattctggggaacgggctgttgaggaagaagancgctggtcccagggccgccaggttcgagccgcccggtcaagggccaggtggtcacctgtacatctgcagacgtcgctggagaattggcacactgggtgcaggaggagccggagctggtgttcactctgtggtgactgtgacgtcatccaggccctggatctcagtgtcccactcattggacgtgggcggagacggccatggtcactgctgactccaagtactgctacggcccccaaggcagcaggagcccatacatccccccgcacgcggccctgtgcctggaggtgaccctgaagacggctgtggacgggcctgacctggagatgctcacggggcaggagcgcgtggccctggccaaccggaagcgggagtgcggcaaccccactaccagcgggcggacttcgtcctggccgccaactcctacgacctcgccatcaaggctatcacctcancgccaaagtggacatgacgttcgaggaggng

SEQ ID NO: 640542 - DNA, 534 bp, Homo sapiens
  misc_feature (86)..(86): n is a, c, g, or t
gccccccccaaatgcacaccgcgccccttttccgcatggggatctttgcgcctaatcatgttgtcgcccagtgccgcttctgggcntttggttttcagtttaaaaagatgaaaaagttttccggggggattgtttcctgtgggccggtgttttaaaagtcccccccccgggggaaaaactttggggtttgggtgggctttttcttccggagcggccccccccacatggtccgggaaaaccggggcctttcccccccagggggtgtttccccgtgcttcccaaacatggggggccggccccgcgccccagccccctccctttcgattattaaggtggggggggtttcggcccccaaattcccccggccgggtgttaaacagtttcccgactcccagatcaagtttcccctgcccccccgggttttgggccggcagccccaaccccgctttcccccccaaagggccccccccttttttttggggccggggccttgtccgggggtgcccccaattaactccgggacgccccggttga

SEQ ID NO: 640543 - DNA, 455 bp, Homo sapiens
  misc_feature (17)..(17): n is a, c, g, or t
  misc_feature (92)..(92): n is a, c, g, or t
  misc_feature (371)..(371): n is a, c, g, or t
  misc_feature (374)..(374): n is a, c, g, or t
  misc_feature (391)..(391): n is a, c, g, or t
  misc_feature (413)..(413): n is a, c, g, or t
agcggcgcccttttttngagatggagtgtgctcttcttgcccaggctggagtgcaatggcacgatctcggctcacctcaacctccgcctccngggttcaagtgattctcctgcctcagcctcctgagtagttgggatgacaggcacgcgccaccacgcccagctaatttttgtatttttagtagagacagggtttctccatggtcaggctggtctccaacccctgacctctggtgatctgcctgcctcggcctcccaaagtgttgggattacaggcgtgagccactgtgcccagccttatctgactattactgtaacagtggccaatcaaaattccttcttttctttttttttttcccttgagcctagaanttncttaatggaggggagantctagcaagcagttgagtcaangggtgtagattatcctacaggggtacaaaacgggcggccgtg

SEQ ID NO: 640544 - DNA, 100 bp, Homo sapiens
ctgcgacgttactggtgggcacggggctgtgtgggttgccgtcggagttggcccactccgcaccagttcctggcagcgttccacaaagctgcccccacca

SEQ ID NO: 640545 - DNA, 517 bp, Homo sapiens
atcagagtggattagtcattctggtctttcacacctggggggactaattcaaaggaaaagccctatcatttggccagcgtggagtttaagagtagcttgagttctcgtgtgaacaccagcgtgtacgtgcacttagaaagagtttattcaaccttttaatacattagagcattggtgataaactggtaacacttagaacatagtttcggtttactggtattaaaacatgtgtggattccgtgtaattccatgcattttggggaggctgacggtgggagcgatggcctagagttcaacgagttcaacgaccatgtctggcgcaacagtggtaggaccccatctcgtacaaaacaggaaaaaacaattgggcctgggagtgcacgcttgtggtcccagctacccaggaagttaaggtgggaggtttacttgagcccagaaggttgaggctgtgatgagccatgatcgtttcattgcactccagcctgggcaacagagcgagaccccgtctcaaaaaaaa

SEQ ID NO: 640546 - DNA, 204 bp, Homo sapiens
tgggagagggggtttggccttgtccccagggtgggggggcagtggggcaatttgggttaatggaggctttggcttcgggggtaaaggggattttcgggcttaagcctccgggggggggggaattaggggcccaattaaccaccccggttttttttggttttttaggtgaaagggggttttggcattgagggcagggtgggtttg

SEQ ID NO: 640547 - DNA, 411 bp, Homo sapiens
tctcgagaacaggtctccctgcaacagaagaattgacccaagggcctgggcgcgggtggctctacacctgggtaatctccagccactttggggagggcccaagggcaagcgggattcactttgaggcccagggaggttcgaagggtcaggcctagggttacgtgggtgaaaccacccatctcctacagaaaggtacgatacattagccgggggtatgcgtgcctgtgtcacctcgttggtcgccatgctaactcggagagagttgaaggtggggaggatcaacctgggacctgggaaggtcatagaaatgcaagtgaagccaatgaatacaatgccaaatgcaattaccaagcctaaggcaaacagaagcaagaaccataatatcaaaaaaaacaacaaaagaggggcggg

SEQ ID NO: 640548 - DNA, 539 bp, Homo sapiens
tccttcttttttctggttggttttaaaataaaaatttggaaaaaaaaaatgaaaaaatctctaataaaaaaaaaaaaaaaaaaaaaaaaaaaaaaagggggggggctaaaaattccccggggggggcccccgctgctgcgcgctctaccccagcttttctggcctcacaagggcgcccccaagaaggggagccacaataaaaaccccgagccgcggggccacgctaacacacacgctgcgcaaggagggaaacaagctgtccaaagcgcggggactcctcgtgggagagagaagaacccctcttatcttcgcgcggggggtggggaccattaatgttcgcgacaaactctccctctactcagaagaatgtataaaggcctctctcaagagggaaaaaaattcataacatcttcaagcgcgtatatagtgttgttcaacccacacagcgggaaattgatgctctggtcgcgtctgagagatagtttgtgcgcccaacacgcgaagctattatttctgtagaaaaatttttataccggaga

SEQ ID NO: 640549 - DNA, 800 bp, Homo sapiens
ctatcacgaacgaggaactctacctctctatactaagtctccctacaaatctccttaattataacattcacggccgcagaactaatcagtattttatatcttcgttcgaaatccagcacttattcccgcaccttggcctatcagtcgacgccgaatggaggcacacccacgtgcagcatacgccatgcaatcgcagcgcgacatagcttcctattctacatgcctagtggctcccttcccctactcatcgcactaatttacagctcacaacaccctaggctcactaaacattctactactcactctcactgcccaagaactatcaaagctcctgagccaacaacttaagtatgactagtcttacatcagatagtcttttatagtacaacgatacctctttacggactccacttatgactccctagagcccatgtcgaagcccccatcgcggggtcaatagtacgttgccgctagtactcttaaaactaggcggttatggtataatacgcctcacgactcattctcaaccccctgacaataatagatagcctaccccttccttgtactatccctatgaggcataattataacaagctccatctgactacgagaaacagagctaaaatcgctcattggataactctttcaatcaggcacattagcctcggaggtaacgggcattctgcattctcaaaccccctgtaaggctttaccggggccagcagttctcataaatcgcgcacggggttaaaatctcaattataatctgcgtagagaatccaattagaaagggctcccaa

SEQ ID NO: 640550 - DNA, 225 bp, Homo sapiens
  misc_feature (72)..(72): n is a, c, g, or t
agataaatatacatacaactcctaatctcagtagtcaggacacaaacactgcggaaggcgcaggatcctctngctaggaaaaccagagacctttgttcacttgtgtatctgctgaccttccctccactattgtcccatgaccctgccaaatccccctctgtgagaatcacccaagaattatcaataaaaaaataaattaaaaaaaaatgtaacacaaaacaaggt

SEQ ID NO: 640551 - DNA, 390 bp, Homo sapiens
tcacagtgcttgtattcaagtaacccttattttacttaataatgggtccacaaagtgcaagagtagtgatgctggcatattgttataattgtttaattgtattattatttttgttaatatcttactgtgcctgatttataaattaaatgctctcgtaggtacaagaaaaatgtagtatacatatggtttggtactatctgtggtttcaatcatgccctgggggtctgcaataagggcggactaggatatgtggagatggagtctttgacaggtaattaggtttagatgagctcaggagggtagaagcatcaggataggactagtgccttataagaagagacacaggagagcttgttcttgctctttttccaccatgcaaggacacagtgt

SEQ ID NO: 640552 - DNA, 303 bp, Homo sapiens
tttttttgaaaaagtcatggaggccatggggtttgcttgaaaccagctttggggggttcgattccttcctttttgcctagatttaagtatacgggtcctcgaatgtgtggtagggtgggggcatcatatagtcaccccaggttatggagggttcttctactattaggacttttcgcttcgaagcaaaggcttctcaaatcatgagaattattatattactgctgttagagaaatgaatgagcctacagatgataagatgtttcatgtggtgtatgcatcggggtagatcgagtaacgtcgggg

SEQ ID NO: 640553 - DNA, 493 bp, Homo sapiens
  misc_feature (19)..(19): n is a, c, g, or t
atggagacccagtgctgangcgagaaagaggaatatgaaacaatctggggaaatggccatacatggtggctgacgcctgtaatcccagcactttgggaggccgaggcaggagaatcgcttgagcccaggagttcgagaccagcctggacaacatagtgagaccccgtctatgcaaaaaatacacaaattagcctggtgtggtggcccgcacctgtggtcccagctacccgggaggctgagctgggaccacaggctcacaacaccacacctggcaaatttgattttttttttttttccagagagggggtcttgcaacatggcccagacttccttggtgttagttaataaagctttctcaacggcctcagcctttcccagctacggggaaaggctgaggcaggagaatcgcttgaaccggggaggcagaggtggtagtgagccaagatcacaccatggcactccagccgggacaacaagagcaaaagtcggtctc

SEQ ID NO: 640554 - DNA, 573 bp, Homo sapiens
  misc_feature (7)..(7): n is a, c, g, or t
  misc_feature (87)..(87): n is a, c, g, or t
  misc_feature (288)..(288): n is a, c, g, or t
  misc_feature (393)..(395): n is a, c, g, or t
  misc_feature (412)..(412): n is a, c, g, or t
  misc_feature (517)..(517): n is a, c, g, or t
  misc_feature (568)..(568): n is a, c, g, or t
aaccgtncttctcagaacatcacctaccactgcaagaacagcattgcgtacctggatgaggagacgggcagcttgaacaaggctgtncttctgcagggttccaacgatgttgaacttgttgctgagggcaacagcaggttcacctactctgtcctagtcagatggctgctccaaaaagacaaatgaatggggcaagacaatcattgaatacaaaacaaataagccatctcgcctgccgttccttgacattgcacctctggacattggtggtgctgaccaagaattccngtgtggaggttggccccgtctgtttcaaataagtgaactcaacctaaattaaaaaccaaaaacccctgaaaaaactttctctttgccgtttcctcctttaaaaannngaaacaaaaaacaaaanctgaaagctgaatccttccatgtcttctatgcatctacatcttaaactgtgggcaaaagagaaggattggtcagagcagtgtgcaatatgatccactaagtctcntcccttgggccctccccaaatggtttgcagtgttattttgtgggttttttntaaac

SEQ ID NO: 640555 - DNA, 808 bp, Homo sapiens
gggagtggaccagacaaagaggtaagatgaaacagtagtgtgtttataatggtctgtgactatttctataataattagtactatttaatggtgagcttttaaaaatgtaggatagagggtacagtggcactgtatatactatttatagtctcagctactaagggaggctgaggcaagaggcttgagaccaggagctcgaggctgtaatgtgccatgatgatggcacctgcgaatagccactgcactccagcctgggctaataaatatagcaagaccccatcctttaaaaaattttagaacctttttcaaaatcaaagtgcagatgtgttgtatgtaaaaccaaataaaggtagagtaagtgtgatatatgggagtataaaatagcttaaaatttctcgttgaacggacatgtggctaaagggtcaaaacaaggtctgtaagacttgtggagccagagcatagttatttcctgaaataacaagttagtggcttaaactatggtacatgtcgcttaaggaatttgtgaggccaccttatttttgacagaatgctgcaggcacatgtagacgtgctatatgtaggttgagctaacctgtgatctcttaagggactaaaactaacccaggttcccaggtcttccactaaggggtactggacaagtgtttaagccttactccaacctccttattagaaatccactttaccgaattaatttccaatttccacttttatacgaccctccctttggtaatatgcctaaaatttctcgggcagagaacggctgagttcccacagggcaacggttgca

SEQ ID NO: 640556 - DNA, 528 bp, Homo sapiens
  misc_feature (10)..(10): n is a, c, g, or t
actagtccancggttggctggtggataaggctgaggaggcaccgctagatggaccggagacctgtcttctttgctgaatgggggatgggcctcagcgatctccaggcttatactgctggggacatgcctgaacacagtcaccgggcacacggaatgggtcaccaaggtagtttggcaaaaatgtcaagtcaagtctctcttgctcagtcctggagactagatcctcttaaatgcagaccaattagtagattcagattgggccaatcgggcacagaaatcaacagttagtggttaaagaccttgtctgtctctggagggtagaagtatttgtctgtagcccagacctcattctgatggcgaataccttggccggagttcagcacctgggcgctaccagtgggactttgacagttatgatattctcaggggcctcaggacacctgtgatagctgacttgggcttgcctggctctggagatctctttgccctggtgtgtgagaacccgctacctgttcagtcatggacttg

SEQ ID NO: 640557 - DNA, 363 bp, Homo sapiens
ctgttgtcttcagagccctatggggtctcccgtctcctccaagacagagtccgtttcggataaggaggactaatctacccctgagcaccatcagcgaggcactgatgtgggccacgatgtcagcccccaccaccttgtccaagccctactggcagccccccggtgggcctccatcaagggagaagaccaagataagggccctgtctgctgaacaaggctaatgaagatcaagcgttgaagccctaatgctaaggacgttcaatcctactagagcctctgcttgtctgtgaataaatccaccagtacccctacttctccggggccccggactcattcaactccctctaccacggtgctataacg

SEQ ID NO: 640558 - DNA, 370 bp, Homo sapiens
  misc_feature (105)..(105): n is a, c, g, or t
ggggggcccctttgggggaaagggccccccccctttgtagtgttacagggtcccaaataaaaccgggggttccccccagggccccaagggcgcctttagcaacgntttttcaactgtcccccccctccctcccaagtggggtccccccgggccaaaagtttccccaacaaagcccccaaaggccagggttgggcttccccccccccctttccccagtgggggcaaaatgcatgcccaaaaacccaaggggcccccccggttttgttttcaacgcctggcctactttttggatttgccaggggggtttttaattaaagccctttttttttttttttttttcctggggccccataaatgggttttaaatcca

SEQ ID NO: 640559 - DNA, 676 bp, Homo sapiens
gctctctcttgtaaaggaggagctggagatgagtggtgaacgcagaatctttcgaataggtgcagtactctgctctcggacatgagaggcagattaccatcatgtgactgaaatatgcacgttatacatgatctccaatgtctaaaatcagtcaccagtccagaaaagttcttaaggacaatgtttaaaaataattttctaggtaatggctaaaatcatttattaaaaaatgggggcagtaggtaacgtggattcctctctttaaaatttctacggaatttagtgaatgaaaaagcaaattcatccaatgtgtactcatttcaggcacatctgaaatgatcttaattactagaagatctgcatataaatttttgtgaagagttcctcctaaaaactttaagtaaaatgtaatggtagcttgtgataacatcaaatctagggggagaaaaaaacaattattaaagcgcccaagcagtgtgcccttagcagaggaaaatgcaaatctcgcaagcggtggtgtaacgacttcaggagtcactagattcagcactaaatttccgtgttgtggaaaaactcattcttttaatttgagcggtgaatagggcgctttataaattgtggtcctattgaaattctgacattgctatacaaggatgatatcattaaattttaaacc

SEQ ID NO: 640560 - DNA, 1407 bp, Homo sapiens
  misc_feature (1239)..(1239): n is a, c, g, or t
agcgggggcgcaggcgcaagccggcaagatggccggcggctgggagctggccgtctgaggcgggtggcatcgtgctctgctgcgtgcggacgctcccgacgtgcccgcccggagaggtcgtgtcaggcctccggacctcggacttcttatcactaagacaggtggtatgatcactatatgacaagatcgctagaaacgtggcggtcctcgttgacaaggactgtcctgaaccatatgttaggaacgtggtacttggtggtgggctccgatgcagtggtggcgtggcactgtagagtgaaacatgtaccaggaatttccagaaggtgcgaatcgaaacacaagggtggtgcacaagactatgatcgtgagtggcctcaagggtttataaacaccactagtttggagagcctgtggttgtgcttcaccgccatattgtttgtccctttcccaaggactttccattatacaagccctaacgtggacaaccatggcgcgtttgccacacaggtggcaaagagaaaccgaggagtgacgtagcgtgaaagaccccctttgttggagagcttaaattctgacaacatacaccaccaagagaatcaagtcggccactgaaaaagggcaagtccttcagtggaacacttttcccgtccacacggggggataaacacgttggcaaccttgtcttccctatgttgcacctgggagcctgttggtaaccacggtattggccaatttttcccacagtgggcgtacaccgggccacctctgtggggtctcttggaaccttttgaaccttaaaaaaaccttttggagaaaaacgccattaggttaagaactcccaccgacgaaaaaaaactgggggtaacgaaaggggttcccatagcacaggtaacatctgtaggacgcattgtggaattgggcctctccctttactctcgcattcccgggggacacgagaaaaaagaacccttttctccccgaaggtgccagagttggcttctatatctgacaccctgagtctcagttggggtggtttgccctcgaaaaccccgattttggcgcggtggtggtgtcacaacgggttctgaccccacattattggtggacaattgggtttgcccaatagagaaacacgtgctccgtggcttgtatcacttgtccattccctcgaggcgtgtgtaaaaccggaagcgcctattattttgtgaaggagagattaaccgcggcccagccaataanttaacctttttgggccttgtgttgtacaaccccgggttttagagtttggaaaccctttccgttcacaggtttgtccagagaaggggcttaggagaatatacgtaaaccacaccacacaggttttgttcgcacagtattagggctcgccctgtgggaaaaatttcccgg

SEQ ID NO: 640561 - DNA, 1326 bp, Homo sapiens
  misc_feature (592)..(592): n is a, c, g, or t
agtgtgaagaagaggcgagaacgtaccccggtacgaccaagagcccgtcgcgcctgctgtcatccctgctgtccaggcacgctacgtccctgctgcctgtcgcccgccgccagccatgccctaagatgaataggctgacagtgggatgctagagggcagataagaggcaacaggtgaacgtgacgaaaccagcagacgacagatcctgcgacgggttggtcgttgcctaaatcgctgcgtccttccaaaaagccaagatgcccaaagccctatacataacggcccccgtgtcaaaacgaaccggcgacgcagacaacgtgtaccccaaacatgggaaaacaacgggtgaacaagtgcgtgattgctagtgcacagtgacgggcgacataaacccttgcaggacaaactgcgacgaatgcccaaaatcatgatccatgttgcacatgacaaagcctgacagcggtgctcggcagattgccaaaggtgcaacgtgtagatgcactttctctgactaacctttgtgttacctctctggcgctgaacttgtaccacgggttttgaagagtagctaactccttcctattcaacggtntttactacaacagattgcacgacattttcgggtgctaacaacctatctgacatactcttctagcttcctaaaccaaccgccatacgtcgttgcgcgtacaagcgccaacacaccgatgaagaccctaccttcttcactttctgcggtcccggtacacactcggggggccgtgacacgtgcgcgcaagtatataggtcccacgatacaagtactcacacacggtgtttcttcccccaaaaaatgaccgtgggagatatgtggacactgtgtgcgcgcaccgcaaaacataagccacgacatttttacaccccgtatatcataacgatatccgcgggaagcaagcaagctgtaccatcactaggggacaatccccaaaggggtacgggcaagcgggggaactttaccccggttgaactcttttgttgatcccaccgaccaattttgtggcccaaccccttttgggcgctcctacacaaatggcccctttgtagtgggggcgtactattgtcgaactagacgacgccaaaactattgggcgtcgtgtaagttgagtcaccgactcttatcgttccccccatttatccccaacagatggttgatacaggcgcgcattaggcaccattataaagctatcccccattataagacccccacgagccaacttcgtggttgggagaccccatgagagccccaaagatactattgggtgaaccaccggctggcacaaggccacc

SEQ ID NO: 640562 - DNA, 241 bp, Homo sapiens
tttttccccctccccctttttttttgggccccccccccctccctttttggccaggtaaatggaggatgggctatgggtttgcaaacagtgggacggtcagggggctttttttccagaggttccccctaggcccccccttccccccctttcccccccttttccttccttccttcctttccttggggcactgggccccatttggagggttgagggaaaccaaaattaaagagggaaagaggga

SEQ ID NO: 640563 - DNA, 194 bp, Homo sapiens
taatctaacacatttaattggggaacaagggagcaactcctttaaaagttggagagtcgcataaattattctcatatacagctaaaccctaagctgggtcacacgatctattttggagcagcaaaaaaggagggctagagaaaggctagagagtgtcttactcgtacacaggggaaccctcaaaagtcgcccgg

SEQ ID NO: 640564 - DNA, 381 bp, Homo sapiens
gccgtacaagacactagaaaaaagaatacgaatgctgaagcacatgtacagcatctggaaactagcctcacaggggcaaatctaagagttcctggccttcaagagcaggtagagagaaatcggggtagaaagtttactcagagagggataatatcaaagaattttccaaacctagaaaaagataccagcagctgagagtacaagaaggctacagaacaccaagcagatttaacccaatagagactacctcaagacatttaccaatcaaactcccaaagatcaaagatgaagaaagggttctataagcagcaatgagaaaaaatcaagaaatcacgtacaacgcagctccagtacgcctggcaacgactgctctgctggata

SEQ ID NO: 640565 - DNA, 126 bp, Homo sapiens
cgtagcccggggcggcggcagctggggcggcgggggcccttcgcggctgtcctcctccgtgtgaagccgttcatctccccgcccgggccggtctctgggggagggtccccggacagtccgcgggcc

SEQ ID NO: 640566 - DNA, 325 bp, Homo sapiens
ttcgattggcgggcaacttagtgagacctcatctctacaaaaatcaccaaaattagcagggcatggtggtgcacaccttgtagtcccagctacttgagggggctgaggtaggaaggtcactggtgcccgggagatcaaggctgcagtgagctgtgattgtgccactgaatttagcctggatgacagagtgagaccctgtctaaagaaaagaaggagaaggagaaggagaaggagaaggagaaggagaagaagaagaagaagaagaagaagaagaagaagaagaagaagagagaagcagtaaggtttaagtttgccgccaatcgaa

SEQ ID NO: 640567 - DNA, 90 bp, Homo sapiens
  misc_feature (1)..(1): n is a, c, g, or t
ntgcgtttgacgtgcggcccggcggcgtcgtgcattccttctcccataacgtgggcccgggggacaaatatacgtgtatgttcacttacg

SEQ ID NO: 640568 - DNA, 189 bp, Homo sapiens
aagttatcactgaagctcttaccatcatctttcagttagtctcgtagattaaatagggaatctatctaagtgatggtatctagcaaataagagtgattagagttgacatttatgtgatgcgtctcggtcttgttgtacgtgactatatctgggcatcaaccctcagcacttgaccttttctccattacc

SEQ ID NO: 640569 - DNA, 392 bp, Homo sapiens
cacaggtctaacagtattgacgttcatggtacaggacacctcataccggtgcataactgcgcctagtggataggagactagcaccagtgcagaggatacccaatgggagatcgacgctgccgaggcccgcacacacatggcacaatacacacgcacagggacatggcagacgatgtggcacgcgctctggaagtcgaacgagatcgtctctacacaggctaccgctgatctatctggtaagcgtctccagagcaccatctcttagatccaccagaccatgtagcagctgaccgtggcacacgcggtcctctgaggtgcatcgtagccgtacgcaccgagcacagtacactctgatggcgatgacatgtgacagtctggcctgcccgctgtgg

SEQ ID NO: 640570 - DNA, 334 bp, Homo sapiens
gttaccaaccatgtgttacaacgtatgttcatagtattgcctcttgagtgtctagtatatgatacagagtgatgggataacctaatgattgcccttctgcaccaagcgtctatcgaggttcaattcgatatcgtctgcttaggtttctcagtgttcataccactctcatctcaagctctggggcttcttgtgacaatgtcaaattctacttcctttcatgttagctgcctctggcagtccatatgatttatgggtgcatcttaacctttcacctggtagggaagacaatcacacctggtcagaagagaggtatcctagtctccataattcctat

SEQ ID NO: 640571 - DNA, 322 bp, Homo sapiens
agggattttatggaaggagtgtgtgtgtgtgtgtgtgtgtgcgagcgagtgtatgtgaatgcatgagcaggagcaatcacaagcgcatgtgcctgtaggggagtcagtgggagggcgctggtagggcccgtcgggacgctgttgctagctcagggcaactgcagggcctcagttgccaagtcgccgctcctatctgtcagctgttcgcaaactgtttacccataggggatctattacaagtgctcaaatgaacaggcagcttaggaactagcagcttcctgggagctgcaattacataagcatatatttttaatataatcac

SEQ ID NO: 640572 - DNA, 896 bp, Homo sapiens
atggcacatgcagcgcaagtaggtctactaagaggctacgttcccctatcatagaagtagcttatcaccgttgcatgatcacgccctcataatcatttcgttatctgctatccgtagtgccgtgtatgccgctttgtcctaactactcgagcaagtaagaatgtagacgtacctatgtaacatctcagacgtctcaggagatagaaagccgtctgaactatcctgcccgtcatcatcctagtcctcatgaacctcccatccctacgcgatcctttagcatagcaggacgtaggtcgaacgatccctcccttaaccatcaaatctagtggcgcaccgatggtactggagcactacgagtgacaccgacctacgggagactaatctttcagattccttagaatattccccccattgattcctagaaatctaggtgatctgagactcctgtgaggttgaccaatcgagtagtagctcccgattgaagcccctatttcgtgtgatatttacgttcaccaagtaggtcttgccactcatgagtgtgtccccacattaggtgaaaaagagatgcagtcccgggaggtctatgacaagccccacttttaaccggtacgacgaccgggggttgtcattagggtcactgctcttgaactcggggtgcgcaaaaccaaaggtttgcatgcccatcgtctaagaattattccctgaaagtctttgaaataggccgtagtttcctatgtacccattaacccttagagcaaaaggaacaaaaaaaaacgtttcggtccgcgcgcctcaaactaacactgtgtaggggggcgagcagaacaggacggtcgactggaagactggtcaaaagcggggccgtcacaggtgggcgtaacgcagcaacccggaag

SEQ ID NO: 640573 - DNA, 473 bp, Homo sapiens
caccccagaggagcgcatctagtccaagatgcagcagcacggctacgaaaatccagcatacaagggcagggagcagctcagaactagacccccgccacagcagcctctgaagtcggacagcaaacccattgcttcactaacccatcggtgtccatttatagactactgtgggaagaaacaaacccgtattatgatatactcattatcgccttggggccagctgtgctgtaacacaagtagatgcctgcaacttgaattaatccacacatcagtaatgtatactatactctctttacattttggtctctatactacattatataatgggttacgtgtactgtaacagaatacagctgtatcaaactagtgcatgaatagattctctcctgcttattaatcacatagccccttagccagttgtatattattcttgtggttagtgcaccaatacagtcctactttacatatgcttt

SEQ ID NO: 640574 - DNA, 386 bp, Homo sapiens
gcagcaatcgcggcagagtcaggactcgaagatgtaacaaacatcttctgtagcgcactcacacagcctctgcagatggctccctgcacgcctctttctgcatgaagtgattgtagtcggtgtctgtcagctagtcttcaagcacacacctggcagagtttctgggctggctttaagtactgttagaacaagcaacccagtcagctgacttcctcgtgcaatgtgttaaactgtgaactctgcccatgtgtcaggagtggctgtctctggtctcttcctttagctgacaaggacactcctgaggtctttgttctcactgtatactatatatcctggggccacagttcttgcttattcctcttgtggttcacgactgaatgtgtcaa

SEQ ID NO: 640575 - DNA, 95 bp, Homo sapiens
gaatccaacaagacaacaatgcctccaagaagccctagcctaagaaggaggcagccaagccagcgtcagcatcagcatcagcccctcaccacccc

SEQ ID NO: 640576 - DNA, 447 bp, Homo sapiens
  misc_feature (434)..(434): n is a, c, g, or t
tcagagaaaggatgagcttgctttttatttcctgaccatgttcataggtaatagtcaattttgagaagacagcagataccaaccctaaacagctaactgaacttcttttgattactaaagacaatacattggcttcagtgcaatgtttggaatgcatgagaagcatcatcaaaatagtacaagctggtaatgggaatacatgtagctgttcttcataataggtattcattctgatcttcctttcagttctctggcgaggaagaaagagtattaggcccctctctaataatgaagggggagggcatgggtgaggggtgtgtgtgaaagaaattagcctttgaaaatgtgccttaaaactcattagacttaaaaccttaatagcaaagattgtactctcaatacctggcatatagtgtagctactcaataaatgtntgaatctaaaaaa

SEQ ID NO: 640577 - DNA, 446 bp, Homo sapiens
  misc_feature (356)..(356): n is a, c, g, or t
  misc_feature (389)..(389): n is a, c, g, or t
attcggcacaggaaaacaacaaccaacaaccataaagtaataagccaggcaaggtagctcatgcctgtgatcccagcacttctggaggctgaagcgggaggattacttcagtctaggagtttgagatcagcttctgcaacatggtgaggccctgtctctacaaaaagtttaaaaaattatttgggcatggtggcgcacgctgtggtcccagctgcttgggaagctgaggtgggaggattgcttgggcctggaagctggagcctgcagtgaactatcattgtgccactgtactccagcctgggcaacaaaatgaaatcctgtctaaaaataaatacatatgtgtgtgttaaggttgncagctgggcacaatgcttttattgcgttgttantcctagccactttttgggaggcccagatggcaggatttgctattagcccattagttt

SEQ ID NO: 640578 - DNA, 183 bp, Homo sapiens
cgatctaatggagagtagcacggtgctcacgatgatcgacggaacttgtacaggaggcatgcaccgacaatgagtgaatacacgtcgaccaggctccatctaaacgaactttggaggtcagcacggttctcaagtgtcgacggaactagtacagggaggcatgcaccgcagtggtgaatacac

SEQ ID NO: 640579 - DNA, 188 bp, Homo sapiens
cagatccccataccatcctgtggtcaattctggtagcacactagtatgaatcctaacaaggtatatcacactcttcgacatgagtcatgactccttgaaaaaagtgaatattccacatccgtaggatatatggacatctgcaaacaaaaatatgccatagaaagcttacgaggattctgtagaatgct

SEQ ID NO: 640580 - DNA, 477 bp, Homo sapiens
ggcccagtgaaagccggccagactacagcaccccatatggtcacaccccaaggtgggcgcaggggaccttacctgttgtcccaagcttccagcagtctgagacacaacagtatactaccttatcctacagctgtgggagactgctccacccacagccggaacacgctgcgacgggtggagtgtgggtgcatgtgaggagccgagggcttgctgcccacacactctaccaacaccccacatacaccacatacatgataaaccatccacaccacacacccactgatcaacacaacaagacgacgcaacgaaggacagcacacatacaaccaccacacaggatcacacgcacacaacaggcccaagccgccacacattcagcagcactacatacaggagccacacgggctcgacagacgagccatagcaactagccccccccgaagaacaacgagccgcagccacaccatgagtacccat

SEQ ID NO: 640581 - DNA, 393 bp, Homo sapiens
ttctttgttgaaaaatgccctgaagcgaaaagatgcaggtttatatggaacccgcgcacccgctcccccactctcccactctgttcgttctgaatgtcttcacgagcgtgcatcaggacgcctggtcccccactcagcagtgagtcagacacgggttcggagcatgttctggctccgagagacacgggtggcagcgcccgttagcatgaccagagccactggtccctacagggtcgccgcacaacccagcaggaacggaggatgcgctcgtgatcgcgacagcctggcggcgagaggcggccatacacccaagtatgtgagttgcaaggaatcctgccagaaccacctggcccctactgaaagagcgcgtcaacctgacaacataccccacaa

SEQ ID NO: 640582 - DNA, 644 bp, Homo sapiens
agaagtcagctactctagttctgttgttttgtgtatataattttttaaaaaaaattgtgtgcttctgctcattactacactgggtgtgtccctcgtgccgttttttttttttttaagacagggtctcattctatcggccaggcgggagtgcaggggggcaatcacagctcacggcagccgttgtcgctccacaggctcagagctatcctgtgcaccgtcgagcctcccagagtagcatgggaccacaggcgatgcaccagctacgcatgactaatttttgtaaatattgtgagacggggtctcccgtggtgttacccaggcgggtctcaaactcctgggctcaagtgatcctcccatctgggcctcccagagtatggggattacagacatgagccactgcacctgccagttccccaagtcccggcattttttaagagacagtttcgctccatcgcccaggcctgggatgcacgtgatgtgatcatagctcactggtaagctcaaactcgtggggctcaagcagttctcccaccaagctccttttgatcttttggtacagatggggtctggactatgtggcccaagcgggtcttaaaactcctgggctcaagcaaacgttcttgactgggccccccaaagtgctg

SEQ ID NO: 640583 - DNA, 560 bp, Homo sapiens
ttgtcagcctgaactcctatagcgcaagcactgcctgcctcagcctcctcccgaagtgctgagattacaggtgtgagccactgagtccggccttacctttttttcttttttttgagacggagtctccctctgttgcccaggctggagtgcaatggtgcagtctcggctcactgcaacctctgcctcctggattcaagtgattctcctgcctcagcctcccacgtagctgggattataggcgtgtgccaccatgcctagctaattttcgtatttttagtagagacggggtttcatcatgttggccaggctggtcttgaattcctgacctcaggtgatccacccaccttggcctcccaaagtgttgggattacaggtgtgagccactgcgcccggccttcatgcattttaaatagttaattctgagacatggaattattggtcaatggatacaaatacccacctcccatggttgtgttcattttattgatgtacactaatgagaatataatatttattagtcttcctcattggaattctacattggaaaccaagcaacccct

SEQ ID NO: 640584 - DNA, 287 bp, Homo sapiens
taggaagagatagatctttgccatcagtcaactgagtgacagcagcattgccctcacgagtgtagagtgagcctcatccaaaccatggacggcttgaatacagctgatgggttaagaaaggtatctgctccactgtctttgagctgggacatcagtcttctgccttaagccttggcattggtctcgaactatatgcgactctcctaagtatagagcttactcagagtacaacttgggctacactgcgtgcgtgcatgcatgtgtgtgtgtgtgtgtgtgtgtgggtg

SEQ ID NO: 640585 - DNA, 950 bp, Homo sapiens
  misc_feature (1)..(1): n is a, c, g, or t
  misc_feature (347)..(347): n is a, c, g, or t
  misc_feature (350)..(350): n is a, c, g, or t
  misc_feature (412)..(412): n is a, c, g, or t
  misc_feature (432)..(432): n is a, c, g, or t
  misc_feature (435)..(435): n is a, c, g, or t
  misc_feature (441)..(441): n is a, c, g, or t
  misc_feature (447)..(447): n is a, c, g, or t
  misc_feature (453)..(453): n is a, c, g, or t
  misc_feature (467)..(467): n is a, c, g, or t
  misc_feature (505)..(505): n is a, c, g, or t
  misc_feature (529)..(529): n is a, c, g, or t
  misc_feature (566)..(566): n is a, c, g, or t
  misc_feature (587)..(587): n is a, c, g, or t
  misc_feature (609)..(609): n is a, c, g, or t
  misc_feature (612)..(612): n is a, c, g, or t
  misc_feature (630)..(630): n is a, c, g, or t
  misc_feature (636)..(639): n is a, c, g, or t
  misc_feature (650)..(650): n is a, c, g, or t
  misc_feature (657)..(657): n is a, c, g, or t
  misc_feature (673)..(673): n is a, c, g, or t
  misc_feature (841)..(841): n is a, c, g, or t
  misc_feature (883)..(883): n is a, c, g, or t
  misc_feature (932)..(932): n is a, c, g, or t
nataaatatctgaagaataagaatacagggctgggtgcagtggctcatgcctgcaatcccagcactttgggaggcggaggcaggtggaccgcttgagcccaggagttcgagaccagcctgggcaacacagtgagacccccctctttacaaaaaatacaaaaattagccaggtgtggtggtgcacctgtagtcccagctacttgagaggctgaggtgggagggtcacttgaacccaggagtcggaggttacagtgagccctgatgggccactgcactccaacctgggcaacggagcaagaccctgtctaaaaaaaaaaaaaaaaagaatacaggagtggggtggggtngtngggctggagacttgaggtgctcctcggctttggtagtcttcgcacgctgggggcgccagaangcctggggatctgacagctngtnctcttncccagngccagngccctgcccccgtnccccactggggagggtctgggaggctccgccagttctncgcctggcccgcggcttcccaggncgggggcgctgcgtcagcggaaaccccgcgaccgggnattagacgccctgagcgcccngcctagcgcccccggggctctnttngggacgagggctgggggnaaacgnnnncatttggggcnctcttancgccggacccttaggnctggaatcccaggccgggaccccgcgtgggtgccccgcagcctcaagtgatgacccatgtcctccatgcccacgcggccccagacgcccagcacgaagctctcgatgtcgcactcattgacgccgcgcacgatgcggaagtggcccctctcgccccaggctgggcccnaggagtgggcgcagtccagtatttgagcgtcttccatctggnagcgtctcctctccccatcctgtgatcttgacttgagtgggtccatgcnggcggtatctctctggct

SEQ ID NO: 640586 - DNA, 428 bp, Homo sapiens
agcggggaacaaatcatgaggtcaggtctctctctgttgcccaagctggagtgcagtgacaccatcttatctcactgaaacctctacctcctgggttttagtgattcttctgcttcacctcgcaagtagctgggattacaggcacacctgtaaattatgccaacatgcctggctaatttctgtaattttagtagagatggggtttggccatgttggccaggctggtctcgagctcctgacctcaagtgatccacccaccttggcctcccaaagtgctgggattacaggcgtgagccactgcgcccggcctgcacatatatttctaattctattgggtatatacctgagagtagaattgctgagtcatatggtcacttaatgtttaatcttttgaggaactgctacactgttttccaaagtggcagtcc

SEQ ID NO: 640587 - DNA, 288 bp, Homo sapiens
gaggaccccaagcgttacatacagactcagatttgagacaaattttggaaatttatcagatacgagaatataaaatacctgttctaggatttcaaagactctactggaggaaacagtcaacatgcaaatgctagatgtgtcttgtaagaagagtgatggaaactctaggcaacaatcaaaaggcacacatgctagacattacatcaaaattccactgccttaactaaagaatgtcttcgaataggttcatcacacagaacaggttggaggaaagaatgagtctgtatt

SEQ ID NO: 640588 - DNA, 176 bp, Homo sapiens
ccacttcagtgacacctgaatagtttgttagttgtagttgttattaattcgtcttcaaatgaggaagggccccattaaagggtgaacattgttagataaactgggacatttcagaagtacaacctcatggtactaggtgcttatactacaacacacaacaaaacagcaacagagag

SEQ ID NO: 640589 - DNA, 269 bp, Homo sapiens
tccacatgcgaatatttgcgattattgaagctgcttaatgtccatgtgaggagaaggcatacagtgaccgattactggcccaaattgattacctggcttctagaaaaaaagtgaaacttcatggagcaagtcatatgagcaagaacagttgagccacagcaacaaatgggcgatatcttccatccagagcagggtactttacatggagtaagaaaataagcaattacaggaaaatagtcttcgtctcacacagcagattgggttcttag

SEQ ID NO: 640590 - DNA, 250 bp, Homo sapiens
cgtggttcacttcccattccctgttggagtctggctcttctattgccatgtacaccacatttctctgtgcattagtatctgtatacatgcttagaggggtttctttgctcctaactagaacctgatgactacagggtgaaaatttgagagttcaattttggaaattatttgtgtcaagtacagtatttctgtgatgcattccagtgatgttcttaggtgagtaggatagtgagctcagtcgaacggactg

SEQ ID NO: 640591 - DNA, 1391 bp, Homo sapiens
gcgcttggtgctcctctccaactaattattagagctggtgggtgagtgtttgctctttatatgttcttccttgtgctcgcagtgggagataccccacactttgatggggggccaacgaccctacttcgttggatgcttccaccagatggggacaccccgtacacattttttattataaagaggaaaaaaagtgtgttgggggcacatatcttaatcttgtgcatagaagttttcccacagagagggcctgctggggagaaaagatcttttttgtcgagcacagactttctggcccagttggtgttgcgccatttggtagaacgccccgtcctgggaagtttacacaagtggttataattccccttccaccgggaattttttgggcaaccggggggggctcgtggcgtggaaagttttgtcgtgctgtgccccacacttggggtgcccacctccccacagatgtgtgtgttgggtccgccgctgtctaatcttgctcgtgggggacgccttcgtctcgtaatcccccggagtccctcgggcaacccttgtttccggggggtgtccccccggccttttttttggtggtttattcttgaaacccccaacggggctggtagccaacccccacgcccttttttcccccggaggggcactttgtttatagggttaaaccccgtagccctaagcccactgtgtgcccctgtgtggtaaaacaccccacgatttttttccctcttttgccgcttatattttgggagcacttggcccacttccccacaggccaccacacaccaaaggggaggcctcacactcccacagttggggttttataaaagtggggttgaaatcctctgggcttccggggagaattttctggcccaatagcgctgggcaccccactgtttgtccccgtgaacacacacgcactcttgggagggtttcacacgcctctgaattcttggaatctttctacacacgagagagtctcctgagaagaagagttgtagaaaaagaaagagagccacggcttgctgcttgaaaaaggccacgtgagccacacggaaggaatttccacagggtgaatggagctctcttcccgcctccctgaggttcacactgctaatcacgccctgagggttgccacagaactggttctcgaaaggtgtacacacaggtggccctttgtgcctaattcacgccattccctatctgaaagactggaggcgctcacagcctgccccggaaagaactggtttgcacgctccccactgctcacaggccacctgaaatgggtaaggaagccacccctgactggttttaagactgtttttgcataggcttttaagccagcctgggaaaatggttgatgggaaattaacaccccgtttttt

SEQ ID NO: 640592 - DNA, 218 bp, Homo sapiens
gttttcgctactgattccttccctgtgggcctacccccatgtgacctccaaggctgtacttcaagtttgggattcaccctgtgatatcttttctggtgatcattaagggatgatggagacctctctctggaccacaaattatgacctatcagtaccatttggacctgacaggggtggattctcagtctgtggtgacccaggagccatcactctcaggg

SEQ ID NO: 640593 - DNA, 630 bp, Homo sapiens
  misc_feature (24)..(24): n is a, c, g, or t
  misc_feature (616)..(616): n is a, c, g, or t
agttcgacggagactctcactaanattagtatgatgggacatatttcaaaataataagagctatctatgacaaacccacagccaatatcatactaaatgggcaaaaactggaagcattccctttgaaaactggcacaagacagggatgccctctctcaccactccttttcaacatagtgttggaagttctggccagggcaattaggcaggagaaggaaataaagggcattcaattaggaaaagaggaagtcaaattgtccctgtttgcagatgacatgattgtatatctagaaaaccccattgtctcagcccaaaatctccttaagctgataagcaacttcagcaaagtctcaggatacaaaatcaatgtacaaaaatcacaagcattcttatacaccaacaacagacagagagccaaatcatgagtgaactcccattcacaattgcttcaaagagaataaaatacctaggaatccaacttacaagggatgtgaaggacctcttcaaggagaactacaaaccactgctcaaggaaataagagaggatacaaacaaatggaagaacttccatgctcatgggtaggaagatcagtatcgtgaaatgccatactgccangtaattaagattca

SEQ ID NO: 640594 - DNA, 433 bp, Homo sapiens
  misc_feature (8)..(8): n is a, c, g, or t
  misc_feature (135)..(135): n is a, c, g, or t
  misc_feature (147)..(147): n is a, c, g, or t
  misc_feature (186)..(186): n is a, c, g, or t
  misc_feature (225)..(225): n is a, c, g, or t
  misc_feature (257)..(257): n is a, c, g, or t
  misc_feature (265)..(265): n is a, c, g, or t
  misc_feature (268)..(268): n is a, c, g, or t
  misc_feature (374)..(374): n is a, c, g, or t
  misc_feature (392)..(392): n is a, c, g, or t
aggccagnaagattgtcagatggtctccctgccggctctggggacatacctgcgtgcggcacctcgcttccttcttcgcctttcctggcagtcaggcggggcggtggaggccgctcaggtcagggccagggtgtnacgtaggggccngggcaggcaagggtttgtttgggaggcgctgtctgtccntctgtccctctgtggttccagccatctccccctgccagnccagcaccctgggaatcatggtaaagctgatncagcgttnccnagggggtgggttgggcgggggtggggccgggcccccctacgggatgcccacggccggttcatcatcttgtccctggtccccctaccacactccccctcctagaccnccgccctttaacacagtntggatttaataaattcatatgggtgtttaacttaaacccca

SEQ ID NO: 640595 - DNA, 339 bp, Homo sapiens
tgaggactcggaaaatagcgacgcatgcaatacacgattccagtcaacatgtgagcattccaggtttcctgtctggacattcaatttctcctcctgatcttatatagcaagcaggtgggaaatgcccagatggagaaaagatatttacctgtttgaaagcaaatgtggagacattttcaatcttatggccttgtgtttgtagaaattatacagaagatattcagatttgtggtatggcgcacatgatatggtcaaggtagattcctggagggtgtgtcaatacgcactggcttggagagaactttcttttttttggtcttttggccatttctggggcca

SEQ ID NO: 640596 - DNA, 91 bp, Homo sapiens
taattttatttaaaatttcatagctgtattctgaaatataaaaatcatgccagtattttaaaggcattagagtcacctacacaaagcaggc

SEQ ID NO: 640597 - DNA, 770 bp, Homo sapiens
  misc_feature (129)..(129): n is a, c, g, or t
gcaccatactgtttgattactatagcttgtaatgcaattttaaatcaagaggtgtgatgcctccaactttttctttcacagtgatctgtggctgttggggtttttgtggttccatatgagtttcaggantgtgttttcttttcttttctttgttttctttttggaggtggaagtttctcgctcgtgtcacccaagtcgggagtgtgcgaggggcttaattctcggctcacttaaaacctcgtgcctccgggatgtcaggcaattctctcgtgcctcagcctcccgggtagtgtgggaccacgggctactttgccattattgcccgggccaatttttgggatagtttaagtaaagaagacaggggttctcactatgttgggccgggtgctggtgtctccacatttcctggagccgtcatgatccgacccgttgctgtctcccaaaggtggctgggaaattacagggctgtagagccattgtgccttggccaggatggtttatcctggtctgggtgaaagactgtcctcagagaatctttggagggggatctgtgtaagatctggtatataggctaggggtaagggtgaccttttgaccaatggttaatgcttcggatccataaccatgggatgtctctcacatgggtccatggtctcactgtcttccatccaggttaatgggtttaaagtgtcacgttctctcacttcttggtaaatttatgcctaagtttggaccttggaggctgtcgaaaggaagtattctgggggcac

SEQ ID NO: 640598 - DNA, 635 bp, Homo sapiens
  misc_feature (33)..(33): n is a, c, g, or t
  misc_feature (64)..(64): n is a, c, g, or t
  misc_feature (107)..(107): n is a, c, g, or t
  misc_feature (118)..(118): n is a, c, g, or t
  misc_feature (120)..(121): n is a, c, g, or t
  misc_feature (126)..(126): n is a, c, g, or t
  misc_feature (156)..(156): n is a, c, g, or t
  misc_feature (167)..(167): n is a, c, g, or t
  misc_feature (169)..(170): n is a, c, g, or t
  misc_feature (176)..(176): n is a, c, g, or t
  misc_feature (182)..(182): n is a, c, g, or t
  misc_feature (185)..(185): n is a, c, g, or t
  misc_feature (199)..(199): n is a, c, g, or t
  misc_feature (243)..(243): n is a, c, g, or t
  misc_feature (247)..(247): n is a, c, g, or t
  misc_feature (306)..(306): n is a, c, g, or t
  misc_feature (318)..(318): n is a, c, g, or t
  misc_feature (571)..(571): n is a, c, g, or t
cctggtgtggccttgtggggaagacgtttgagntgtggccgcgctggggacctccacccgccanttgcgggagcaccagaagggccggcccaccagcaccaaccccnccgcccagcananngcagnacactggctggagcaccgggggaagctggngggaccaaccncnncggttngcccangcnggagaaggtggcgnggagacggtggagagtggagccatgaccaaggacctggcgggcngcantcacggcctcagcaatgtgaagctgaacgagcacttcctgaacaccacggacttccccnacaccatcaagngcaacctggacagagccctgggcaggcagtagggggaggcgccacccatggctgcagtggaggggccagggctgagccggcgggtcctcctgagcgcggcagagggtgagcctcacagcccctttctggaggcctttctaggggatgtttttttataagccagatgtttttaaaagcatatgtgtgtttcccctcatggtgacgtgaggcaggagcagtgcgttttccctcagccagtcagtatgttttgcanactgtaatttatattgcccttggaacacatggggccatatttagctattaaaaagtttttccca

SEQ ID NO: 640599 - DNA, 2989 bp, Homo sapiens
  misc_feature (20)..(20): n is a, c, g, or t
  misc_feature (30)..(30): n is a, c, g, or t
aaagcaggctggtactgccntggggtgcantggccggctccagctggggccggagaggctgagtggttggtacgctgctcgctggcctcccagtcttcccagcaaccggtgacactgcccgcgccagactgaccactagccgacgcgggcgagagggacaggagcgtgacctccccatcccgaggggccggacgctcgggcgcctccccgctccccccactcggaggccgcgcgcgccgttagccccttcctcgctcccccgccccagtcccgcagtccgggaggcgggggtcggcagccggctgagtgggaaccgcgcggtgtctgaggaggcagtcggcgaccggtttccacttcaagcgtgacccttttgcctgtgggatgagctccagcatggggtgaggtacagaagagagacttgaagagcgtgccttgggactcaagcgccaaacctgtaccctagcgagtgtcctactccgcatccgtaatggaaggaaatgcacatcttactccagaggcacaagaggaggacatcccatgcggctactcctgcccagcgtggtggggcagcagaagctccagagcccagacttgcaggctcacggtgcagggtgaacctggccacagctcaccctggaacagccacaatgtctgccccttagagaagaaccctgaaatcagaccagtttttgcggcctccccctttcctctctgttacagtgccctttccaggccttaagagaagtaaaacttagctgcagcgtcaggaggtggaccccagagtgtgagtggcacgcttccctgtgaacccgtcctcaccatgtttgccacatctggggcagtggcagcggggaagccttactcgtgcagcgaatgtggcaagagcttctgctacagctcagtgctgctgcgacatgaacgagctcacggcggtgacggccgcttccgttgcctagaatgcggtgagcgctgtgcacgggctgctgacctccgagcgcacaggcgcacgcatgctggccagaccctctacatctgcagtgagtgcggacaaagcttccgccacagcggccgtcttgacctacacttgggcgcacaccggcagcgatgccgcacttgcccctgccgcacatgcggccggcgcttcccgcacctcccggcgctgctgctacaccggcgccgccagcatctgccagagcggccccgccgctgcccgctgtgcgcccgcaccttccggcagagcgcgctgctcttccaccaggcgcgggcgcaccccttggggacaacctctgaccctgctgccccaccccaccgctgcgcgcagtgcccgcgagccttccgaagcggcgccgggctgcggagtcacgcgcgcatccacgtgtcccggagccccacgcgaccccgtgtctcagacgcccaccagtgtggcgtgtgcggcaagtgctttggcaagagctctacgctgacgcgacacctgcagacgcactcgggggagaaacccttcaagtgcccggagtgcggcaagggcttcctggagagcgccacgctggtgcgccaccagcgcacacacacgggcgagaagccgtacgcatgtggcgactgtggacgctgcttcagcgagagttccacgctgctgcgccatcggcgcagccatcagggcgagcggccacatgcgtgcgccacttgcggcaagggtttcgggcagcgctccgacctggtggtgcaccagcgcatccacacgggcgagaagcccttcgcgtgccccgagtgcggccgccgcttcagcgaccgctcggacctcaccaagcaccggcgcacgcacacgggcgagaagccctaccgctgcgaactgtgcggcaagcggttcacgtgcgtgtccaatctcaacgtgcatcggcgcaaccatgccggccacaagccacacaaatgccccgagtgcagcaaggccttcagcgtcgcctccaagcttgcactgcaccgcaagacgcacctgggcgaacggccagcggagtgcgcagagtgcggcaagtgcttcagccacagccgctcgctgtcacagcatcagcgggcccacacgcgcgcccgcaccgctgccgccgttgccatccagtccgcagtgggcactgccctcgtctttgaggggccggctgaacaggaaaagccagggttctctgtgtcctagttgagggaggcttgctgaggcttctctaaaggtggttgggcaagcacctatatagtatcacggggacagttgaggcaactcgtagatggagatttgggaaaagacgatgtggcctcctacctttccagtttctgttggcagcccttcacgtagcctcctgcctcgcctctacacctactaccctgtcggcccttttgccatgctgtcctcgtataactcggattctctcctcaggtgtaggtgcagggagtcagggaacccttagactcccctgtgtgcaagagcccaggtgttggtgtgtccctttaatgctactgtgctctctggtgtttctgattttcctgcctttattctgtcttctcttgtcctatctcattccagcccacatcttctcctttcctgattacttttgttgtcctgcctcttcaggtaatggtcacagatttggctgtaggcacgttaccagccctgtggcttcttgactcttggttccctggcagaggtggccagtcacgtgaaggtgggcagggcccttagcatggccacacatgtccccagggcagatcaaggggcctctcagaaccatgttccccagccaggtgaggaccattttcactgggacccaggccaaaaccatgtgggtgcacaaagccaggcactgccaagtggaacatgaggttatttccaaatcatgggagccaccagcagggagagggcaggatggaaaatcccctggagccggtcaactttttgctcatggctagtgaaataaagttgtttgagtactagatgccaagtgccgcctttatc

SEQ ID NO: 640600 - DNA, 107 bp, Homo sapiens
  misc_feature (10)..(10): n is a, c, g, or t
tgattgaatncagtaccagagtctgaagaacaggattccacccaggcaaccacacaacaagcccagctggctggcagcagtctgaaattgatgaatgaaccagtcat

SEQ ID NO: 640601 - DNA, 2341 bp, Homo sapiens
  misc_feature (20)..(20): n is a, c, g, or t
  misc_feature (30)..(30): n is a, c, g, or t
aaagcaggctggtactgccntggggtgcantggccggctccagctggggccggagaggctgagtggttggtacgctgctcgctggcctcccagtcttcccagcaaccggtgacactgcccgcgccagactgaccactagccgacgcgggcgagagggacaggagcgtgacctccccatcccgaggggccggacgctcgggcgcctccccgctccccccactcggaggccgcgcgcgccgttagccccttcctcgctcccccgccccagtcccgcagtccgggaggcgggggtcggcagccggctgagtgggaaccgcgcggtgtctgaggaggcagtcggcgaccggtttccacttcaagcgtgacccttttgcctgtgggatgagctccagcatggggtgaggtacagaagagagacttgaagagcgtgccttgggactcaagcgccaaacctgtaccctagcgagtgtcctactccgcatccgtaatggaaggaaatgcacatcttactccagaggcacaagaggaggacatcccatgcggctactcctgcccaccccaccccaccgctgcgcgcagtgcccgcgagccttccgaagcggcgccgggctgcggagtcacgcgcgcatccacgtgtcccggagccccacgcgaccccgtgtctcagacgcccaccagtgtggcgtgtgcggcaagtgctttggcaagagctctacgctgacgcgacacctgcagacgcactcgggggagaaacccttcaagtgcccggagtgcggcaagggcttcctggagagcgccacgctggtgcgccaccagcgcacacacacgggcgagaagccgtacgcatgtggcgactgtggacgctgcttcagcgagagttccacgctgctgcgccatcggcgcagccatcagggcgagcggccacatgcgtgcgccacttgcggcaagggtttcgggcagcgctccgacctggtggtgcaccagcgcatccacacgggcgagaagcccttcgcgtgccccgagtgcggccgccgcttcagcgaccgctcggacctcaccaagcaccggcgcacgcacacgggcgagaagccctaccgctgcgaactgtgcggcaagcggttcacgtgcgtgtccaatctcaacgtgcatcggcgcaaccatgccggccacaagccacacaaatgccccgagtgcagcaaggccttcagcgtcgcctccaagcttgcactgcaccgcaagacgcacctgggcgaacggccagcggagtgcgcagagtgcggcaagtgcttcagccacagccgctcgctgtcacagcatcagcgggcccacacgcgcgcccgcaccgctgccgccgttgccatccagtccgcagtgggcactgccctcgtctttgaggggccggctgaacaggaaaagccagggttctctgtgtcctagttgagggaggcttgctgaggcttctctaaaggtggttgggcaagcacctatatagtatcacggggacagttgaggcaactcgtagatggagatttgggaaaagacgatgtggcctcctacctttccagtttctgttggcagcccttcacgtagcctcctgcctcgcctctacacctactaccctgtcggcccttttgccatgctgtcctcgtataactcggattctctcctcaggtgtaggtgcagggagtcagggaacccttagactcccctgtgtgcaagagcccaggtgttggtgtgtccctttaatgctactgtgctctctggtgtttctgattttcctgcctttattctgtcttctcttgtcctatctcattccagcccacatcttctcctttcctgattacttttgttgtcctgcctcttcaggtaatggtcacagatttggctgtaggcacgttaccagccctgtggcttcttgactcttggttccctgttaactctgtttctgagaaatgtgggtatggaggtgggtgggaaagctcacttccatgaaggatgtctccatgctaggagctgcctgcaccctggcagaggtggccagtcacgtgaaggtgggcagggcccttagcatggccacacatgtccccagggcagatcaaggggcctctcagaaccatgttccccagccaggtgaggaccattttcactgggacccaggccaaaaccatgtgggtgcacaaagccaggcactgccaagtggaacatgaggttatttccaaatcatgggagccaccagcagggagagggcaggatggaaaatcccctggagccggtcaactttttgctcatggctagtgaaataaagttgtttgagtactagatgccaagtgccgcctttatc

SEQ ID NO: 640602 - DNA, 1999 bp, Homo sapiens
  misc_feature (20)..(20): n is a, c, g, or t
  misc_feature (30)..(30): n is a, c, g, or t
aaagcaggctggtactgccntggggtgcantggccggctccagctggggccggagaggctgagtggttggtacgctgctcgctggcctcccagtcttcccagcaaccggtgacactgcccgcgccagactgaccactagccgacgcgggcgagagggacaggagcgtgacctccccatcccgaggggccggacgctcgggcgcctccccgctccccccaccccaccgctgcgcgcagtgcccgcgagccttccgaagcggcgccgggctgcggagtcacgcgcgcatccacgtgtcccggagccccacgcgaccccgtgtctcagacgcccaccagtgtggcgtgtgcggcaagtgctttggcaagagctctacgctgacgcgacacctgcagacgcactcgggggagaaacccttcaagtgcccggagtgcggcaagggcttcctggagagcgccacgctggtgcgccaccagcgcacacacacgggcgagaagccgtacgcatgtggcgactgtggacgctgcttcagcgagagttccacgctgctgcgccatcggcgcagccatcagggcgagcggccacatgcgtgcgccacttgcggcaagggtttcgggcagcgctccgacctggtggtgcaccagcgcatccacacgggcgagaagcccttcgcgtgccccgagtgcggccgccgcttcagcgaccgctcggacctcaccaagcaccggcgcacgcacacgggcgagaagccctaccgctgcgaactgtgcggcaagcggttcacgtgcgtgtccaatctcaacgtgcatcggcgcaaccatgccggccacaagccacacaaatgccccgagtgcagcaaggccttcagcgtcgcctccaagcttgcactgcaccgcaagacgcacctgggcgaacggccagcggagtgcgcagagtgcggcaagtgcttcagccacagccgctcgctgtcacagcatcagcgggcccacacgcgcgcccgcaccgctgccgccgttgccatccagtccgcagtgggcactgccctcgtctttgaggggccggctgaacaggaaaagccagggttctctgtgtcctagttgagggaggcttgctgaggcttctctaaaggtggttgggcaagcacctatatagtatcacggggacagttgaggcaactcgtagatggagatttgggaaaagacgatgtggcctcctacctttccagtttctgttggcagcccttcacgtagcctcctgcctcgcctctacacctactaccctgtcggcccttttgccatgctgtcctcgtataactcggattctctcctcaggtgtaggtgcagggagtcagggaacccttagactcccctgtgtgcaagagcccaggtgttggtgtgtccctttaatgctactgtgctctctggtgtttctgattttcctgcctttattctgtcttctcttgtcctatctcattccagcccacatcttctcctttcctgattacttttgttgtcctgcctcttcaggtaatggtcacagatttggctgtaggcacgttaccagccctgtggcttcttgactcttggttccctgttaactctgtttctgagaaatgtgggtatggaggtgggtgggaaagctcacttccatgaaggatgtctccatgctaggagctgcctgcaccctggcagaggtggccagtcacgtgaaggtgggcagggcccttagcatggccacacatgtccccagggcagatcaaggggcctctcagaaccatgttccccagccaggtgaggaccattttcactgggacccaggccaaaaccatgtgggtgcacaaagccaggcactgccaagtggaacatgaggttatttccaaatcatgggagccaccagcagggagagggcaggatggaaaatcccctggagccggtcaactttttgctcatggctagtgaaataaagttgtttgagtactagatgccaagtgccgcctttatc

SEQ ID NO: 640603 - DNA, 1914 bp, Homo sapiens
  misc_feature (20)..(20): n is a, c, g, or t
  misc_feature (30)..(30): n is a, c, g, or t
aaagcaggctggtactgccntggggtgcantggccggctccagctggggccggagaggctgagtggttggtacgctgctcgctggcctcccagtcttcccagcaaccggtgacactgcccgcgccagactgaccactagccgacgcgggcgagagggacaggagcgtgacctccccatcccgaggggccggacgctcgggcgcctccccgctccccccactcggaggccgcgcgcgccgttagccccttcctcgctcccccgccccagtcccgcagtccgggaggcgggggtcggcagccggctgagtgggaaccgcgcggtgtctgaggaggcagtcggcgaccggtttccacttcaagcgtgacccttttgcctgtgggatgagctccagcatggggtgaggtacagaagagagacttgaagagcgtgccttgggactcaagcgccaaacctgtaccctagcgagtgtcctactccgcatccgtaatggaaggaaatgcacatcttactccagaggcacaagaggaggacatcccatgcggctactcctgcccagcgtggtggggcagcagaagctccagagcccagacttgcaggctcacggtgcagggtgaacctggccacagctcaccctggaacagccacaatgtctgccccttagagaagaaccctgaaatcagaccagtttttgcggcctccccctttcctctctgttacagtgccctttccaggccttaagagaagtaaaacttagctgcagcgtcaggaggtggaccccagagtgtgagtggcacgcttccctgtgaacccgtcctcaccatgtttgccacatctggggcagtggcagcggggaagccttactcgtgcagcgaatgtggcaagagcttctgctacagctcagtgctgctgcgacatgaacgagctcacggcggtgacggccgcttccgttgcctagaatgcggtgagcgctgtgcacgggctgctgacctccgagcgcacaggcgcacgcatgctggccagaccctctacatctgcagtgagtgcggacaaagcttccgccacagcggccgtcttgacctacacttgggcgcacaccggcagcgatgccgcacttgcccctgccgcacatgcggccggcgcttcccgcacctcccggcgctgctgctacaccggcgccgccagcatctgccagagcggccccttttgccatgctgtcctcgtataactcggattctctcctcaggtgtaggtgcagggagtcagggaacccttagactcccctgtgtgcaagagcccaggtgttggtgtgtccctttaatgctactgtgctctctggtgtttctgattttcctgcctttattctgtcttctcttgtcctatctcattccagcccacatcttctcctttcctgattacttttgttgtcctgcctcttcaggtaatggtcacagatttggctgtaggcacgttaccagccctgtggcttcttgactcttggttccctgttaactctgtttctgagaaatgtgggtatggaggtgggtgggaaagctcacttccatgaaggatgtctccatgctaggagctgcctgcaccctggcagaggtggccagtcacgtgaaggtgggcagggcccttagcatggccacacatgtccccagggcagatcaaggggcctctcagaaccatgttccccagccaggtgaggaccattttcactgggacccaggccaaaaccatgtgggtgcacaaagccaggcactgccaagtggaacatgaggttatttccaaatcatgggagccaccagcagggagagggcaggatggaaaatcccctggagccggtcaactttttgctcatggctagtgaaataaagttgtttgagtactagatgccaagtgccgcctttatc

SEQ ID NO: 640604 - DNA, 486 bp, Homo sapiens
  misc_feature (335)..(335): n is a, c, g, or t
  misc_feature (382)..(382): n is a, c, g, or t
tggtaaagtatgcatgcagtcttgtactggacctaagaacaaaactgtaactgcattagaaaccatgaaaaaattagatattgttttgtgacttttagccagtggtaaatatagaaccataattctggtcacttccatttctctccacatgaaggatcaaaaaatgtttttcaatgtgttctttgttccactgaaacttagagtcatgagttatcactgatttggtcaccttcctccgcctttgttcccgtgagttctgatgtcttagtgacttagttttagaagctcacccttagtttgacagattctcccgtggtccccaaacctgtgcatanccataagaattgagccagggtgtttacgtgcatgagatcagttgcancagcaagcaaaggagagaggacaccgttaatcagtgtgtttgataacttcagaactgtgaacagcctaatttgtccaacatgtcagaaaggacatttaaaatta

SEQ ID NO: 640605 - DNA, 104 bp, Homo sapiens
ttaatggcattctcatgagaaaacttctgagtgcagcattgcctgtggtgaccatgttgggcttcagcaaggtgcttccaggtagacgtggtggtcactcagag

SEQ ID NO: 640606 - DNA, 1733 bp, Homo sapiens
  misc_feature (20)..(20): n is a, c, g, or t
  misc_feature (30)..(30): n is a, c, g, or t
  misc_feature (1652)..(1652): n is a, c, g, or t
  misc_feature (1654)..(1654): n is a, c, g, or t
  misc_feature (1658)..(1658): n is a, c, g, or t
aaagcaggctggtactgccntggggtgcantggccggctccagctggggccggagaggctgagtggttggtacgctgctcgctggcctcccagtcttcccagcaaccggtgacactgcccgcgccagactgaccactagccgacgcgggcgagagggacaggagcgtgacctccccatcccgaggggccggacgctcgggcgcctccccgctccccccactcggaggccgcgcgcgccgttagccccttcctcgctcccccgccccagtcccgcagtccgggaggcgggggtcggcagccggctgagtgggaaccgcgcggtgtctgaggaggcagtcggcgaccggtttccacttcaagcgtgacccttttgcctgtgggatgagctccagcatggggtgaggtacagaagagagacttgaagagcgtgccttgggactcaagcgccaaacctgtaccctagcgagtgtcctactccgcatccgtaatggaaggaaatgcacatcttactccagaggcacaagaggaggacatcccatgcggctactcctgcccagcgtggtggggcagcagaagctccagagcccagacttgcaggctcacggtgcagggtgaacctggccacagctcaccctggaacagccacaatgtctgccccttagagaagaaccctgaaatcagaccagtttttgcggcctccccctttcctctctgttacagtgccctttccaggccttaagagaagtaaaacttagctgcagcgtcaggaggtggaccccagagtgtgagtggcacgcttccctgtgaacccgtcctcaccatgtttgccacatctggggcagtggcagcggggaagccttactcgtgcagcgaatgtggcaagagcttctgctacagctcagtgctgctgcgacatgaacgagctcacggcggtgacggccgcttccgttgcctagaatgcggtgagcgctgtgcacgggctgctgacctccgagcgcacaggcgcacgcatgctggccagaccctctacatctgcagtgagtgcgcccgcaccttccggcagagcgcgctgctcttccaccaggcgcgggcgcaccccttggggacaacctctgaccctgctgccccaccccaccgctgcgcgcagtgcccgcgagccttccgaagcggcgccgggctgcggagtcacgcgcgcatccacgtgtcccggagccccacgcgaccccgtgtctcagacgcccaccagtgtggcgtgtgcggcaagtgctttggcaagagctctacgctgacgcgacacctgcagacgcactcgggggagaaacccttcaagtgcccggagtgcggcaagggcttcctggagagcgccacgctggtgcgccaccagcgcacacacacgggcgagaagccgtacgcatgtggcgactgtggacgctgcttcagcgagagttccacgctgctgcgccatcggcgcagccatcagggcgagcggccacatgcgtgcgccacttgcggcaagggtttcgggcagcgctccgacctggtggtgcaccagcgcatccacacgggcgagaagccttggtgcccgagtggggcgccgttcaggacgtcggactcacaagaccgggccgcccggggaaaacctcgtggatggngnaggnccgggtgccacacagtacggacaaggggcaagccaacgcgggagcgccggccaattgctcaactcggggacaggt

SEQ ID NO: 640607 - DNA, 577 bp, Homo sapiens
  misc_feature (34)..(34): n is a, c, g, or t
  misc_feature (61)..(61): n is a, c, g, or t
  misc_feature (69)..(69): n is a, c, g, or t
  misc_feature (179)..(179): n is a, c, g, or t
  misc_feature (193)..(194): n is a, c, g, or t
  misc_feature (212)..(212): n is a, c, g, or t
  misc_feature (214)..(214): n is a, c, g, or t
  misc_feature (239)..(239): n is a, c, g, or t
  misc_feature (249)..(249): n is a, c, g, or t
  misc_feature (255)..(255): n is a, c, g, or t
  misc_feature (276)..(276): n is a, c, g, or t
  misc_feature (283)..(283): n is a, c, g, or t
  misc_feature (287)..(287): n is a, c, g, or t
  misc_feature (293)..(293): n is a, c, g, or t
  misc_feature (305)..(305): n is a, c, g, or t
  misc_feature (315)..(315): n is a, c, g, or t
  misc_feature (320)..(320): n is a, c, g, or t
  misc_feature (327)..(327): n is a, c, g, or t
  misc_feature (349)..(349): n is a, c, g, or t
  misc_feature (351)..(351): n is a, c, g, or t
tctgtcataatataatagagacagtatatctacntgctctgtcataatataatagagacantagatctngctggtctgtcataatataatagagacagtagatctagctggtctgtcataatataatagagacagtagatctagctggtctgtcataatataatagagacattagatcnagctggtctgtcannatataatagagacagtananctagctggtctgtcataatataatngagacagtanatctanctggtctgtcataatataatngagacantagntctagntggtctgtcatnatataatagngacantagatcnagctggtctgtcataatataananagacagtagatctagctggtctgtcataatataatagagacagtatatctagatggcctgtagtgaaagagaggactattagagaggccatctggcctgtaggtgaaagagaggactattagagaggtcatctggtctgtaaggaaagagaggactattagagaaatcatctggtctgtagtgaaagagaggactataggtcatcctggtctggaatgaaagagag

SEQ ID NO: 640608 - DNA, 1342 bp, Homo sapiens
  misc_feature (20)..(20): n is a, c, g, or t
  misc_feature (30)..(30): n is a, c, g, or t
aaagcaggctggtactgccntggggtgcantggccggctccagctggggccggagaggctgagtggttggtacgctgctcgctggcctcccagtcttcccagcaaccggtgacactgcccgcgccagactgaccactagccgacgcgggcgagagggacaggagcgtgacctccccatcccgaggggccggacgctcgggcgcctccccgctccccccactcggaggccgcgcgcgccgttagccccttcctcgctcccccgccccagtcccgcagtccgggaggcgggggtcggcagccggctgagtgggaaccgcgcggtgtctgaggaggcagtcggcgaccggtttccacttcaagcgtgacccttttgcctgtgggatgagctccagcatggggtgaggtacagaagagagacttgaagagcgtgccttgggactcaagcgccaaacctgtaccctagcgagtgtcctactccgcatccgtaatggaaggaaatgcacatcttactccagaggcacaagaggaggacatcccatgcggctactcctgcccagcgtggtggggcagcagaagctccagagcccagacttgcaggctcacggtgcagggtgaacctggccacagctcaccctggaacagccacaatgtctgccccttagagaagaaccctgaaatcagaccagtttttgcggcctccccctttcctctctgttacagtgccctttccaggccttaagagaagtaaaacttagctgcagcgtcaggaggtggaccccagagtgtgagtggcacgcttccctgtgaacccgtcctcaccatgtttgccacatctggggcagtggcagcggggaagccttactcgtgcagcgaatgtggcaagagcttctgctacagctcagtgctgctgcgacatgaacgagctcacggcggtgacggccgcttccgttgcctagaatgcggtgagcgctgtgcacgggctgctgacctccgagcgcacaggcgcacgcatgctggccagaccctctacatctgcagtgagtgcggacaaagcttccgccacagcggccgtcttgacctacacttgggcgcacaccggcagcgatgccgcacttgcccctgccgcacatgcggccggcgcttcccgcacctcccggcgctgctgctacaccggcgccgccagcatctgccagagcggccccgccgctgcccgctgtgcgcccgcaccttccggcagagcgcgctgctcttccaccaggcgcgggcgcaccccttggggacaacctctgaccctgctgcccgccaccgtggcgcgtgccggagcttcgagggggcgggtgga

SEQ ID NO: 640609 - DNA, 402 bp, Homo sapiens
  misc_feature (147)..(147): n is a, c, g, or t
  misc_feature (165)..(165): n is a, c, g, or t
  misc_feature (173)..(173): n is a, c, g, or t
  misc_feature (183)..(183): n is a, c, g, or t
  misc_feature (192)..(192): n is a, c, g, or t
  misc_feature (226)..(226): n is a, c, g, or t
  misc_feature (236)..(236): n is a, c, g, or t
ggcgactgcgacaggaagaggtccaggattcacacgagctgaccgagggacagagaggtgcccgtcacagggactggcctttctccaagtgacaaggacaaatggatccagcgggacacgcctgtggaacatttggaaaacatcctngggtggtcgtgggctaanatgatcanagtgaaacangaaagccanggaaggattctgtgctaattccacatttctacanatttctacancttgaaatttaagaacaccaaagcagtttgtattcctccagacagaacctacatatccaaccccatcacaccctcagaccacacttcccactcacgttccacctttctccacctccttggtgactccaagtactcacacagtcatcacctgtcgggctagtcgggg

SEQ ID NO: 640610 - DNA, 572 bp, Homo sapiens
ggcggggcgcggtggctcacgcctgtaatcccagctctcagggaggctaagaggcgggaggatagcttgagcccaggagttcgagacctgcctgggcaatataggcgagaccccgtttctccagaaaaggggaacaaaaaaaaaaccaaaaggaccaaaaaacaaaaaaaaaaaaaacaacaaaacaaccggtgtgtgggcgggcgactggggccccttggagaaaaaagcgtttgaagagagcacacatgggcgggaggggcgcgcgcgcgggggccccaaagtgaggataaagtggagaccacgtggggcgccaataaagcgcggggccccaaaagaggagagaagaacccggggggaaaaaaggaagaacaacagcgggcgcaggggggtttctccacaccaaatcaaaaaaagagcgcccacgggggcgggcaaccacggggagagcttctctggggacacaaaactcccagaagaggggagactcccagaggcggcaccacaggcggggagctcatatccccagggggggcgccaagggcggaccccaggaatctacccaaaaattg

SEQ ID NO: 640611 - DNA, 679 bp, Homo sapiens
  misc_feature (20)..(20): n is a, c, g, or t
  misc_feature (30)..(30): n is a, c, g, or t
  misc_feature (660)..(660): n is a, c, g, or t
aaagcaggctggtactgccntggggtgcantggccggctccagctggggccggagaggctgagtggttggtacgctgctcgctggcctcccagtcttcccagcaaccggtgacactgcccgcgccagactgaccactagccgacgcgggcgagagggacaggagcgtgacctccccatcccgaggggccggacgctcgggcgcctccccgctccccccactcggaggccgcgcgcgccgttagccccttcctcgctcccccgccccagtcccgcagtccgggaggcgggggtcggcagccggctgagtgggaaccgcgcggtgtctgaggaggcagtcggcgaccggtttccacttcaagcgtgacccttttgcctgtgggatgagctccagcatggggtgaggtacagaagagagacttgaagagcgtgccttgggactcaagcgccaaacctgtaccctagcgagtgtcctactccgcatccgtaatggaaggaaatgcacatcttactccagaggcacaagaggaggacatcccatgcggctactcctgcccagcgtggtggggcagcagaagctccagagcccagacttgcaggctcacggtgcagggtgaacctggccacagctcaccctggaacagccacaatgtctgcccagnagataagcgctagtaaagt

SEQ ID NO: 640612 - DNA, 197 bp, Homo sapiens
  misc_feature (7)..(7): n is a, c, g, or t
  misc_feature (19)..(19): n is a, c, g, or t
  misc_feature (45)..(45): n is a, c, g, or t
  misc_feature (71)..(71): n is a, c, g, or t
cccacgntctttccatagnaataccgcagcatcataaagatatcncttctctcattaatgggtgcagcacncccaacatggcacacgtatacatatgtaacaaaccactgacgttgtgcacatgtaccctaaaacttaaagtataataataataaaattaaaaaaaaaagaagtagaattactggataatatggtat

SEQ ID NO: 640613 - DNA, 690 bp, Homo sapiens
  misc_feature (17)..(17): n is a, c, g, or t
  misc_feature (172)..(172): n is a, c, g, or t
aacaatacagtgaacanttttaatctcatatatgtatatacatatctcactgtacttcagaatatacttttgtttttcaaatgcacatggaacaaaattgatggtaaagctgggccataaaacaaagctaaaaatttttccaaaaaaattgaaaacgaggaatgtttctcantcaaagaaaatatgatagatatcaataacaaaagtacagctagaacggggcacagtggctcatgcctgtaatcccagcacttagggaggctgaggtgggcagatcacttgagctcagtagttcaagaccaactttggcaacatagctaaaccctctgtctacaaaaaatacaaaaatttgacaggtgcagtggcatgtgcctatagtcccagctactcaggaggctgaggtgggaggatcgcatgagcccaggagttcgaggttgcagtgagccgagatcgtgccattgcaccccagcctgggtgataggagtgaaaccttgtctcaaaaatgaaaaaaacaaaagctacagctagaaagtttctacatgtttgaaaattaattagtatatttctaaataatccacagattgaaaaagaataaagtgatgaaaatacagaatgtctacatttgtgagatatggctaaaactgtgcttagaggggaattttttagtccccaaaagcctatatttagaaa

SEQ ID NO: 640614 - DNA, 835 bp, Homo sapiens
ggactgtatatttgaggaaatgacaaacaaagaaacaaaattaaaatggaataggcgtgccgaacgctgcacagctgaccctctctctcacccagtaaatgcagaaagctcttaagtgacagacagcaaacacctgccatggtgtgcttgattccctccctcccagggctggcggaggctccagccatcgcctctctcctcaggcatacttgaacaccgatggcaacgaatgtagcaatgtcaacctctgcagcagatatcagttgggaatgggctgggggagggggcgcccagctgcctttcctccctcacaggagccaccaccagccacctctcacggagacagccagagtgcccctggcccaccgactcggacgtgacacacatagacgacacttcctccatacggaactgctcctttactacacttgccgctgtactactgtattactatacttctagtatactattgttcacctacgtgcatatacctgcacccgactactcgtatactataatctctcaccttatctaacatcttctagcccgggccaatattgagttaaacgcattgtaacgacgcttgcctacactttcccattgctcatcaataacacattgaggacctgctaagcacgcgaaacggtacacccttgtgctgcaatagtccatattatgcttaagaaccaatcacgccgtcgacatcatgtaacaagcataaaagagcagacttacggaccatacagacccatattacaacaggctcccccctgaaaaatccccacatacttgattttagcatggtgagcagtaaaacgcattattagctgtgcac

SEQ ID NO: 640615 - DNA, 324 bp, Homo sapiens
  misc_feature (7)..(7): n is a, c, g, or t
  misc_feature (16)..(16): n is a, c, g, or t
  misc_feature (34)..(34): n is a, c, g, or t
  misc_feature (195)..(195): n is a, c, g, or t
  misc_feature (319)..(319): n is a, c, g, or t
ccagaantgtacctcntcccagggcaggaacccngggagtcacctgactacttccctcaagaaccctgttcccaggccaggtgcggcagctcacccctgtaatcccagcactttgggagaccgaggcgggcggatcacctgaggtcaggaattcaagaccattctggacaacatggcaaaaccctgtctctactnaaaaatacaaaaattagccgggcatagtggggcacacctgtagtcccagctactcaggaggctgaggcaggagaatcatttgaatctgggaggcgagggttgcagtgaaccgagatcgtgccancctgg

SEQ ID NO: 640616 - DNA, 287 bp, Homo sapiens
  misc_feature (285)..(286): n is a, c, g, or t
acactataatctgtacagcattcacaatggcacatgtgaacaggcgcaccgtacttagacatgctcaatgctcagatccaatgtcactcatctcatgctcatgttcatcctggtaaataacttcactttaggtgtaaaacctcattagagtggaattgtgagcaaacttttgtactgtttatatttctcttcgtggtcaagtatgcatagttaaatgcaagtatgttgtgattgtatattatccttctattctgctttctgtatttctaatatctctcggaccannt

SEQ ID NO: 640617 - DNA, 897 bp, Homo sapiens
gggaggctgagagcagcggctcacccctgtaatcccagcactgtgggaggctgagagcaggggctcacccctgtaatcccagcactgtgggaggctgagagcagcggctcacccctgtaatccctagcactgtgggaggctgaggcaggtgggtcacccctgtaatcccagcactgtgggaggctgagagcagtggtcaccccttgtaatcccagacaactgtgggaggctgacgaggcagggagtcacccctgtaatcccaagaactgaagggaggctgagaggacgtgggatacacccctgtatgtccacagacactgatgggaggctgagagcggggagtcacacactgtaaatcacaaggcacgtgatgacaggctgagagcagacggagacaacacccatggggaaccaccagacacagggaaggcagggcatgcagaaacgcagggggatcaagccacagggggaaatcccaaagaagaagagaacgggaaggaaggaacgaaagacgaagggggtacgacccacaatggagaagatacgcaaggagaaaagagaggagaaagagccatgacgggagaacaggaggacaaaaaacacaaacacatgggataaacaccccatgaagagagagggcggagcgcggaagagccaggcgaagcagcgagcaagagacgggacaagacaaagccccacggtgggaggggagcaacgcccagggagagcgataggaagacagaccagggcgcggcgagaacagcaacggggacgagataacaaacgaccaacgaagggagaagagcacacaacaggcaaggagagggaaggggagagcagggcggggaagaaggacccgggggcgaagaggaaccaagagaagaagagaagcaagca

SEQ ID NO: 640618 - DNA, 465 bp, Homo sapiens
  misc_feature (14)..(14): n is a, c, g, or t
  misc_feature (45)..(45): n is a, c, g, or t
aataatggattccnctgaacccggatttaggggaaaaccccaccnggtaaaaccggacttttcttaagctttccaaagggattatttttggcatcttaatccccagagtcaccaggattcccacattaactgggaagataatacagaaaaactggaagatgcagagagcagtaacccaaatctacagtcccttctttcaacagatgcattaccgtcagcgtcaaagggatggtccacgtcagaaaactcactcaatgttatgttagaatcccacatggactgcatgtgaccacgtgccatcccattagtacagattaagctattaaaaacagaactatttccctgaagttccgtaagtacatagtcaacgtgaaatgtgaagaatttgtttaaaaacatcctgtagaaagtttataagaaaaaccagtatttgagcaaattgtggattataaatacaactatttt

SEQ ID NO: 640619 - DNA, 246 bp, Homo sapiens
aagcaccttggcgcgttaagtacggctatacatgcatgcaggcgattggccagtcaactgcgtactacatcactgccgtgccgtgggcagcgtggtgccagtaactgctactaccagtctagctcttaaccatattactctgtgatacctggaccagccagttcatcggatccttcattgggtatccgtgaaatcagagcatgttcctggtagaaagactttaacgttaggcttcctatgcaccta

SEQ ID NO: 640620 - DNA, 1343 bp, Homo sapiens
  misc_feature (76)..(76): n is a, c, g, or t
  misc_feature (117)..(117): n is a, c, g, or t
  misc_feature (127)..(127): n is a, c, g, or t
  misc_feature (129)..(129): n is a, c, g, or t
  misc_feature (139)..(140): n is a, c, g, or t
  misc_feature (154)..(154): n is a, c, g, or t
  misc_feature (201)..(201): n is a, c, g, or t
  misc_feature (241)..(241): n is a, c, g, or t
  misc_feature (271)..(272): n is a, c, g, or t
  misc_feature (279)..(279): n is a, c, g, or t
  misc_feature (281)..(281): n is a, c, g, or t
  misc_feature (295)..(295): n is a, c, g, or t
  misc_feature (299)..(299): n is a, c, g, or t
  misc_feature (303)..(303): n is a, c, g, or t
  misc_feature (305)..(305): n is a, c, g, or t
  misc_feature (309)..(309): n is a, c, g, or t
  misc_feature (335)..(335): n is a, c, g, or t
  misc_feature (349)..(349): n is a, c, g, or t
  misc_feature (355)..(355): n is a, c, g, or t
  misc_feature (357)..(357): n is a, c, g, or t
  misc_feature (359)..(360): n is a, c, g, or t
  misc_feature (369)..(369): n is a, c, g, or t
  misc_feature (387)..(387): n is a, c, g, or t
  misc_feature (395)..(396): n is a, c, g, or t
  misc_feature (405)..(406): n is a, c, g, or t
  misc_feature (539)..(539): n is a, c, g, or t
  misc_feature (754)..(755): n is a, c, g, or t
  misc_feature (759)..(759): n is a, c, g, or t
  misc_feature (770)..(771): n is a, c, g, or t
  misc_feature (776)..(777): n is a, c, g, or t
  misc_feature (791)..(791): n is a, c, g, or t
gtggggctttgtcagtccctcctgtagccgccgccgccgcgcctgccgcccctctgccagcagctccggcgccacntcgggccggcgtctccggcgggcgggagccaggcgctgagnggcgcggggngngcggccgagnngctcctgcggctgngactcaggctccggcgtctgcgcttccccatggggctggcctgcggngcctgggcgctctgagattgtcactgctgttccaagggcncacgcagagggatttggaattcctggaganntgccttntntgagaagctggaanatanttcntntcanttccatctcttagttttccataggancatcaagaaatcangaacancntnnggtaatganagagttatgactgccacnttcctcgnntgaaggttnnactgccaaggacattctggaccagaaaattaatgaagttcttcttctgatgataaggatgccttctatgtggcagacctgggagacattctaaagaaacatctgaggtggttaaaagctctccctcgtgtcanccccttttatgcagtcaaatgtaatgatagcaaagccatcgtgaagacccttgctgctaccgggacaggatttgactgtgctagcaagactgaaatacagttggtgcagagtctgggggtgcctccagagaggattatctatgcaaatccttgtaaacaagtatctcaaattaagtatgctgctaataatggagtccagatgatgacttttgatnngtgnaagtgagttgnntgaanngttgcagagcaatnccaaagcaacagttggttttgcggcattgcccactgcatgattccaaagccagtctgtcgtctccagtgtgcaacattccggtgccacgctccagaaccagcaggctcctttaggaaacgggcgcaacagcagctcaactcatcgatgtggttggatgtcagcttccatgataggacgcggctgtaccgatcctgagaccttcgtgcaggcaatctctgaatgcccgactgtgttttctagacatgggggctgaggtaggaatacagacatgtctctgcttgatatcggacgacgcgcattcccctggactctgcaggaatgttgaaaactacaacatctggcacaagactacacccgggatccaccacacccaagcgtagaacaaaatcaacaagacgaaacgaacatgcgcgtgcagcaacaaaagaaggagccccgggcgataccacgattgacaaacgcataaccacgacaacacacacaaaggccagacaaggaataacagaaaagaggacccgaaaacacacaatccaaccaaaacaaccactaaa

SEQ ID NO: 640621 - DNA, 289 bp, Homo sapiens
  misc_feature (5)..(5): n is a, c, g, or t
  misc_feature (26)..(26): n is a, c, g, or t
ccccnttttttccccccacaaaaggntttataagggaggaagaatttttaatgttccccccccccccgggggaaaacgcgcttttttgggggaaaaaaggcgccccccttttttccttttaaaaaaagcccggggcaaaaacccaatttttttccaaccgggggtttttttggggaggggggccgggaaaccccccccattttttttttttttttaaaaaaccgccccccccaagcccgggggggggggttttttttttgttttaaaaacccccctttggcgggtttta

SEQ ID NO: 640622 - DNA, 198 bp, Homo sapiens
gcgccgccctccgctctgtgttcaccccgcctgcatcaagcgctcccggttccctagtcgttggtgggtggcgctcgcgtgggccgagcgttgcgtgacgctctctctgaagcggcttaccttagccttgaggggacgcgagctgccacgcggcagtcagacgaggcagcgagatgtcttgcgtgttcggatccttcc

SEQ ID NO: 640623 - DNA, 427 bp, Homo sapiens
  misc_feature (20)..(20): n is a, c, g, or t
  misc_feature (121)..(122): n is a, c, g, or t
  misc_feature (354)..(354): n is a, c, g, or t
  misc_feature (369)..(369): n is a, c, g, or t
  misc_feature (380)..(380): n is a, c, g, or t
  misc_feature (416)..(416): n is a, c, g, or t
ttgccactgacagccgcggngcatcccatctgagtaagagccagcccgtccgcggcctctccagccccgggttcgcgctctcgactctcctgcctgcccagctgcgcgacaggacggaacnngagcgggcacatgcgacgtccccggcagcccccgaccactccctcggcgctgcgtgtaggccgcgccgtcaggcccagtccgcggtgccccggcgggtgaatgccaaatacagccatgaaagaaaaaaggtgcttgctgatgggggaaagaagcgggtcggggaagaaccaagcaatgaaggtcgataatcttcgccaaattaccatttgctcgcgaacaccccggcggccntggggggccaaccanttgaacgttgnaacacttcccacgttccgattccttagggaaacctnggttgcttgaa

SEQ ID NO: 640624 - DNA, 290 bp, Homo sapiens
tgccttatatgctgtctcatttagatcgaggctgtagatgggaggtaccacagctggaagtctaagtcacaccaggtggtcagagacactggtggcagatctgtgcttgcaactgcatacccagtgtgtctgttttgttcccaatgtgtctcccacaataataccccagtgaggttctccgcattaaattgtcctcagacatgacaagcctggacagcaaatcactccgtatccacttccatgagatgtcttgatgctccaggtcaattagtaccactttctcaagaggc

SEQ ID NO: 640625 - DNA, 1052 bp, Homo sapiens
taaggaactccaatccctgacctgcctgaacgtgaaacgtgtgaacggacgacgcagacagcacattagctcggttatgtatcaaagaacaacttgggaacacggcattccaaccactgtgacctccagagattgagagacgtcaaaccgcaatcaacgagaacttctagctcggcgttatacaaacgaacaacatgggcaagggacctcctttagctgtcactcccgagatggagcgacgtcgaacacacatcacagaaaactattagctcggttatagtacaaagaaaatgtggggaaagccaccgcaacccctgtcactcctgagatgcagagagtccaacgcaatcaagacacacattagctcggtatcgtaccaaagagaacatgagcaccagcaactccgacacctgttactccagagatggcgagagctaagcgcacccaagaacacattagctcggtcttaattctgatagtctccggaaaacaaaatacaaggcaaaagctgcctaatgtcatggaataccccccgacaattgccacgggtgacgggagacccaacggcccaatctccaacggtgccactctcctgcagactttgacgacccacaagggctgcttcacaaccatgtgtgcacagcatccgtaatcaatggaacgacagctccagccacgacattgccaagaactttcaatgacccttcaactcacccgacagcatcacagaggaaagctgcgacaacatggatcaacacaacggcacggacccacactctgcgccaaattcccgctcacgacgtatgagacaccaaatcacgacacacggcatgagcacagtacgtccaagcacacgacacatttagtcaccagagctcacaagtccacaggccacgacatctgcccactcccgtaacgacccgcacctgacgcggaaaatgactacacgatgagccgcacaacacgcactaaagaacacaactaaaacatcccagacacacacaagctgtctacaataccagacccagcctacctactatacaactactacc

SEQ ID NO: 640626 - DNA, 356 bp, Homo sapiens
  misc_feature (68)..(68): n is a, c, g, or t
  misc_feature (71)..(71): n is a, c, g, or t
  misc_feature (310)..(310): n is a, c, g, or t
  misc_feature (347)..(347): n is a, c, g, or t
gaattccccccctagctgtacctagacattgaaagatggcctaggaccgtgtgcatgcaaaagtggtnaantgcattgccttacagggagacaggcagagacaccttaaaaaaaaaaaaaaaaaaaagcaaagtcagccgggtgcggtaggctctcccctgtaatcccagcactttgggaggtggaggcgggcggatcccttgtgcccaggagttcgaggccatcctgcttaacatagtgaaaccccgtttctactaaaaatacaaaaattagccgggcatggtggtgtatgcctgttgttccagctacncgcgaggctgagatacgaggattgctcgagccccggnaagttgagg

SEQ ID NO: 640627 - DNA, 428 bp, Homo sapiens
  misc_feature (16)..(16): n is a, c, g, or t
  misc_feature (64)..(64): n is a, c, g, or t
  misc_feature (97)..(97): n is a, c, g, or t
gaaggttgtattgttntggcatttgtaaaaatgggttacttgtttaaacaatcttttatgtctngtcatacaaattccaaagggtctgcattccttnatctgtaattacagtctcagaatccaagttctgaaaacaaggtatctattctgatctgacactggatctgcttatcccatttagtgtgaatattcattgatttatgtgtttgattattgggatgtgctccacaggctctcttgaaggttgatgtagtgtggcgtatgcactgaattacctttctaaaatctgaacagttctcattctgaaacatctagacttaagggtttcagataaaagactgcggttctctgccttatgttaaataacttagaagatgttattttgtttgaaaaaatgtgaaatgcttttatattctagtttttcactt

SEQ ID NO: 640628 - DNA, 187 bp, Homo sapiens
  misc_feature (17)..(17): n is a, c, g, or t
gcacgggaagcaggtgnacctcagtcacatccatggtggctatgtgtatccacagggcgtgatggagcctactaccagctgtttgtacgagacggccagctccatgccagtcctagaggcagaagtcctgtcgcaggcatgaacttggctagcgtgggctcctgtatatgtgcccgagtgtgagcat

SEQ ID NO: 640629 - DNA, 770 bp, Homo sapiens
  misc_feature (431)..(431): n is a, c, g, or t
  misc_feature (736)..(736): n is a, c, g, or t
agcgggggtacggtggcgactcccacggcggatggctgggtcgagagcacatctttattttctctctagatcattcttcttcctattttgatttgagaaagggaacgtgagaattaggtcaaccagagtgttttcccaggtagttgaaaggctcagggtgctcgcccacatcagtgagggaggtgcagctgatgaaggaagtgctgggtgcagaaggggatgctctgaaataggtggcttctagtttagcagtttcaacagctacaggcctagagtaaaattccagctagacaaatctcacctgcttatatctccctatgagtaatataactcatagacgatagcgtaaagcacgagaaagtacgcttacagatagacacgttcgacagcgctattcactaattaccgcaaagggtatcttagctagccgngcggcacgtaagcaatagctagaggagcacagctatgggaaccagtaacaaccctagactacgtgcatagaacgtcacaggcacaccataggactgtaggctgagcagatcgaagtgctgatgcgacaacctacagacgaataggatgctgcagatctacgacagtgagacgctagcacgagccgcagtcggctatccgtacatagggcaaacgcatgtattcgcactatgcggacatccacgttagtcaccagctacaatgaaaagcagctaggactaatatctcgcggaacagctccttgagnagcgtgccaagccatagaaaagccagtgcgacga

SEQ ID NO: 640630 - DNA, 362 bp, Homo sapiens
cccaatatgacactttaggctcaccagcatataatctttaatatctttacttctatgatcccatatcaaagaactctattctattatgagtaatcaattgcctgcaaatagatctttctttgtaacaatctggtctgcacaaggctgactctcacttttcctttcttttgcttacttctgtctttgcttctattctggctggagaaatcacttagactctgtgtgcctcttctaaattgcattctgctctgctatggtacctgctaggctggcttctttggactccctatatgaatgatgatgtgcctattacttgcagcatatgattacctctttgatggtctcattagcctgccttcttg

SEQ ID NO: 640631 - DNA, 287 bp, Homo sapiens
aagaattgactactgtggaaaatgaagactgataaatcgaatagccgggaaggggaagggcctgtggttggactttacgattaattgctgtaacactgtccttcgggcggctgagggagtttcatatattctttacacatcattaggcgccgaagctcttgcaggacaactttgatgctatatgaattctgccattttgctagcactgatatggctcttgggtccaccactccattagaactatttactccattcatattaatttttgttacaaatcttacaaaggg

SEQ ID NO: 640632 - DNA, 209 bp, Homo sapiens
aagggacccggggtccaaaaatacccctttttattcccccacccccgcggtggggaaaaaaaaacccccgggcttggggggggggggttgggccaaattttttccccttaggggtaaaaggggttaatttgtttaaaattttccccaatttattttcccccttggcccctttttgaaaccaaaaaaatccttggggtttgggcccctta

SEQ ID NO: 640633 - DNA, 741 bp, Homo sapiens
tcaggtgatccacccccttcggcctcccaaaatgctgggattacaggcgtgagccaccgcgcctggccagctttagcataactcttaaaggtcctagaattttcagaatggcaaatgagcactgacttcaacttaaagccaccagctgcattagctcctaataagagagccagcctgttctttaaagtttgaagccaggcactgacttctcctctctagctatgagggtcctacatggcctcttcatccaagagaaagctgttgttttatctacattgaaaatctgtgtttagcgcagccgccttcgtcagtgatcttagccagatcttctggataacttgctgcagcttctacatcagcacttgctggcttcaccttgcacttttatgttatagagctggcttctttccttcaatctgatgaaccagcctctgttagcttccaagttttcttctatagataacctcacctctctcagcctccacagaattgaagagttatggccttggtctgggattaggcttttggctaaagggaatgttgtggctggttgatcttctatccagatactcaaactttccccgtatcagcaataaggatgtttgctttcttatcattgtatgttccctgggagtgaccactttcaacatccttcaacagttttccccggcatacaacaatgattactggacaagaggatactttggcgaaccaatttgaaaagcttctcacaaagtaacg

SEQ ID NO: 640634 - DNA, 115 bp, Homo sapiens
tccggggatctgttcctcgcactatcgaccgcgaacgccgaagccgtgagccaacacgagggtatggtgagcgccagcttcgtcggcgaagcggcgatgagccgcttctacgagg

SEQ ID NO: 640635 - DNA, 162 bp, Homo sapiens
ctcgggttagcgatgccatgtatgcaagtcttggcaacgggtatttcgaacgtgtgagactcacgtttcacaaaataggtcatggtcaccgtgctgcggaggaaactggtctacatttgagcctacctcgtacgtgcctgggttgttcaggcatgcctaaaa

SEQ ID NO: 640636 - DNA, 195 bp, Homo sapiens
  misc_feature (177)..(177): n is a, c, g, or t
ggtataacccgtatatcctaacagcatttgtctccgtggtattggttaaagcattttaattgggatgaggtgataccacattgtagtttgattttcatttctctgatggtctatgatgttgagcaccttttcatatgcatgtttgtcatttgtatgctcttcttttgacggaatgtnctactcagatctttagcc

SEQ ID NO: 640637 - DNA, 770 bp, Homo sapiens
gggaagggcaggctcgtgtggcggctccgctgtcaagagttgcgccctctctgtgccttgcgccgggacacggcatctgcgcgctgggcgggttctggagcggggtccgcacggagcgagcccggggcctccaggccgaggaggctgcgatgccttaaaggcaggcagatacaagggctcgtgggtgctgcggcggtggaggggagctctccacagagccgcagaggccactggagtttcctgctcccgggtgccgcactgcccactgccctcgcggtcgcgtgaggggagcacgtgggggacgccgcgccccgagggccgtgggctggagtggcagggtgaggggatgctggagtgggctgaggcctcccccgcagctgcgcgccctgccctgttgtggagactggcgctggctctgcgccggtcgccttgtgttgcctcggccccgtgagtgcgcgagctccgtggagaccaggacagcgcccagacctccctcggcgggtgggccccgacctccgggctccagggccggtattccaaccacaggtcagcgcgctggggctgaaacatacttctgttaatgcttttcctaaatttatgacttgatttttacttgggtgggaaaagaaacttaaaatgaattaccatgtggttgcgcctgtataaaaacaaacgggctgtatttttgcagcatattattttacttaatttattattctgagaccgagtctcgctctgtctcccggggctggagtgcagtggcgcgatca

SEQ ID NO: 640638 - DNA, 145 bp, Homo sapiens
cacgaggggaaacctaactttcctgcttaaagagtggatacgagaaatcagtgaaagcacgaatcttccacatcctgtgaatggaaatgttgtcagaaaaatttttacacttggatcttacagatcacgagtgcatacacttggt

SEQ ID NO: 640639 - DNA, 509 bp, Homo sapiens
  misc_feature (124)..(124): n is a, c, g, or t
  misc_feature (165)..(166): n is a, c, g, or t
gctgtgatcttcaagtatggggtctgctggcttgtcgcggctgcatgggcttttcgcggtctataagcccccgtgggctaacaattggaatggcacctgctggtgatacatgtgtgagctacanacttctgacagggtctcaatgccaggaagcctccctgctcnnctaaaacagctgtgtttcgctttccgtatggcatggtggtgtctcacccaaagtgggggaaaggggcatgccgacacgacgacagggacgcgtagacccgtcgacaagcgcacccaagcgggtaccccagtcgtttgtccgaattccgaaaacccaagattcgccagaaccgtttcggggggtgtttaagtttggagcttgggggggaaaaagccgcccgaaaggggcccgaaagtttttccccggttcggcgccgaaagattcctgttccgagaaggggggttcctggcggccggattggggaggaacccaagttccagacgtactctgggggaattgacgc

SEQ ID NO: 640640 - DNA, 339 bp, Homo sapiens
ttctgtgtttgcctgggtgtgcgtgattgcctgaggtctcggagttcgaccgcagtctggtctacatggtgaacccccatctctcctaggactcccatatacttagccggacatgttggtctgcgcctgtaagtcccagctatttgggaggttacggaagaggaactgcttgaaccagggaggtagatggttgcaatgagtggagatcacaccagtgcactccagtctggacgacagagcgaagactccgtctcaaaaaaaagaaaatcagatatatagagtattataatggggtaactggaaattattttatcctccccaccatccctgggtttgctt

SEQ ID NO: 640641 - DNA, 466 bp, Homo sapiens
agagaaccctgactaatacagttgcctttgagttcgtcaaacagagatttttcccagtgagcctggccccatcacgcaagccctttccaggcgcagtttttactgacttgtggccaaagggccattcagagggctgtgaagcatgagaagccctgtcatcgctagcttcggagatggaggggccttgaagtgaggaatgtaggagctctttgagctgagagtggcccctggctgacagctgaccaggaaatgggcacctcagtcctacagccacagggaactgaattctaccaacagcccaaatgagcttggaagaggatcccttccaaagcctccagataagatccagccctgggatgccttgattgcagccttgggagaccctgagcagtgcaggcatccacgccaggctggagttcttaagtacagaactgtgagctaataaatagatgtggttgtaagccga

SEQ ID NO: 640642 - DNA, 383 bp, Homo sapiens
aaaccaggaatattagccctactgccaacggagctacagactgcattcactagcagagctcacttggccactcatgatgaactaattgccaagtcataccaaggaagtcaaggacgagcatacctctttaactcagtagttaatgtgggctgtgggcctgcagaagagcgagtgtagctaacaggactgcatgcagtcgcagccatttactgtgaaaactgccaaaccactctgggctggaaatccgaacatgcttttgaacgcagccagaaatcatcaagaaggcacctacatcattgaactcagcacacatgatccaggacaatggctgggactgattggccagcatctacccaacccagtgtccacgtgcactcctgaaa

SEQ ID NO: 640643 - DNA, 476 bp, Homo sapiens
  misc_feature (250)..(250): n is a, c, g, or t
  misc_feature (284)..(284): n is a, c, g, or t
tccagcacccgttcaaagggagtacagcagcaccccccaccccacaccagcgccaccgagcccttcctagtggatgggccgaccctgggggcccagcacctggaggcaggcggctccctcacccggcatgtgacccaggagtttgtgagccggacactgaccaccagcggaacccttagcacccacatggaccaacagtttttccaaatttgaccgcaccctgccccacccccgccatgtcccaataggngtcctcccgactcctctcccggagcctcctcagntactccatccttgcccccctgggggcccagcccccccgcatgcccaaagcaggggctaggtgtctcctgggaggcatgaagggggcaaggtccgtcctctgtgggccccaccctatttgtaaccaaaaagctgggaccagcccaaggcccccccctttgttctgcccttaataaatggttttgctcctccta

SEQ ID NO: 640644 - DNA, 364 bp, Homo sapiens
tctagagcggccgcctactactactaaattcgcggccgcgtcgacatttttcaaggtctgtttttctaactgaaaagctaagggcttgattcctagccccgttctgtggggcactgggtgatactcagtttcttgttcctggccgtggagaggggcctggggcactggttccggctgtgtctggtggcccggctgcagggaaggggcatgaaggcggtcaggccttcactgcatcactgagcctcaaatccgctctggaacatgaggctggattcatgtggtggtgatgccccccctgctctattcccttggtagccagtcctttgcgcttccaccttcacctttcttgatgatgacttttctt

SEQ ID NO: 640645 - DNA, 152 bp, Homo sapiens
cagcgagtgtgcggggtgactagaggacccggcttcatttttgtaagtaataaattacggtaaaggtgaagtgcagtagagtcccatatggcccagtttcccctattaacatcttacattagtatggaacatgctacagataacatgaaata

SEQ ID NO: 640646 - DNA, 123 bp, Homo sapiens
gagctcggtaccgacgctctctctgtggggcaggctgaagggcaggtagtgagtgtatctggggctcccgtggtgaagaacctgtcctggaagagctcgtctatgatgctggactgcgcggct

SEQ ID NO: 640647 - DNA, 604 bp, Homo sapiens
aggctgggtaaagtcaaatgataatggcatctaagttaacaagagcttctgcacagcaaaagaaactaccatcagagtgaacaggcaacctacagaataggagaaaatttttgcaatctactcatctgacaaagggctaatatccagaatctacaatgaactcaaacaaatttacaagaaaaaaacagccccatcaaaaagtgggcgaaggatatgaattgacacttctcaaaagaagacatttatgcagccaacagacacatgaaaaaatgctcatcatcactggccatcagagaaatgcaaatcaaaaccacaatgagataccatcttacaccagttagaatggcgatcattaaaaagtcaggaaacaacaggtgctggagagatgtggagaaataggaacagttttacactgttggtgggactgtaaactagttcaaccattgtggaagacagtatggcaattcctcaaggatctagaactaaaaataccatttgacccagccatcccattactgggtatatacccaaaggattataaatcatgctgctataaagacacatgcacacgtatgtgcatatgtgcacatacatatagtgcata

SEQ ID NO: 640648 - DNA, 267 bp, Homo sapiens
ttttatttgaatgcagtgtcattgcaccaacagcagtcagggtatccagtgactctgttgcagtaatcgaagcccataaaccacagagaaaattacaaccttgtggattgtggaacagatcaatagctctagttcactggtgtgaattaatcgatggcctgctagttatgtagactagaaatagataagaagggttatctactgcaatttccgtattgacgtatgggaggtagtgatttgagccatactgtaacagccatttaggta

SEQ ID NO: 640649 - DNA, 101 bp, Homo sapiens
tctagctcggtcccctccgatagatgctagtttgttagggtctgtcaggtgcacttgaaatttgactatttcatcggctggcttgaagaaggtggatttag

SEQ ID NO: 640650 - DNA, 607 bp, Homo sapiens
tcacttgcagatggggcggcagctgtgcagaggcactcctcacatcccagacagtgggcagctgggcagaggcgctccacacttcccagatggttgggcagtcgggcagaggcgctcctcacatcccagatgtgggtggcagctgggcagaggtgctcctcacttcccagatggggcagcagccgggcagaggcactcctcatgcaaggacactttaaaaaagattgtcctatgagaaacaatgctgccccctcgcccatgtccactatgccgaggcaatcactggacagcacactgccccagaggacaaaggttctctgggccagaagcccccaaccagatgatccaacaacaggactgagggtgcctggggcaagcaccagctcattgatggccaggaaattgacttcctcctggacactggcatggctttctcattgttatctcctgtcctggacagctgtcctcaaggtctgttaccatctgaggaatcctggaacagcctgtaatcaggtatttcttccaactcctcagttgtcactgggagacttcgctacagatagtaagtatgcttatctaatcccacattgccatactgcaatatggc

SEQ ID NO: 640651 - DNA, 322 bp, Homo sapiens
acggtcactccaggaaaatgtatgaggcatagcaaaagtccttttccagatcagaaagttactaatttgcaggataagatggtgcaaatgccttattaaaacccatttacaaagtttatggtcatacaaacaactttatacacccgtatcatgtggttatccaaccaaatatgaaaaaacttttacagtacaaaaaagaaaacacagggaaacagaaacaggggtgatacgctacccagaaaacaaagcatacatgttaacgcttggataaaatgactcattcggaattagttaacccaagaaaaaagaaattataaatgca

SEQ ID NO: 640652 - DNA, 645 bp, Homo sapiens
  misc_feature (136)..(136): n is a, c, g, or t
agaactatgataagatcagatcaaggatggcgtgggctgaagatgtctgttgaaagagtatataacagatcccataagggaaagtgctggatgagtagcatgttagctgcatcgttgtgatgcataagaagccaantaagcattcggacacggggtgggaagatggaagcagctgcttgaatgtggtcactatactgcgcagtgcgtgtgagctcagaagtagagaatcagtatgaacatggatgttgggggcgaaagatatggcatttccaaagtgcacagaacacggattggtaggaaattgtggacagtgggagaagaaaaggtaaaattgagattcctgaaaaccgattatgaaacacgaccaacagtcgacgcgaggttccccaagaaacccgtttaggcagccaaggagaaacaggacacttgccagaaggcatttcgtttgcaaagcgagcacgggaactggaagaaccaaacaagcgccccaaaattcaaaagaagacaacaaacaaacacaccgaaacaaaaaaaacaacaaggtggtgtggggccggcacttcgcgccccggcggagaaaaagctttcagagaaacccaattagggtggggaaggagggggcccaccgtgacggttagcgggcac

SEQ ID NO: 640653 - DNA, 215 bp, Homo sapiens
ggggaaagcggtacatcgggggacacgcggataacgagcgagttcggctggagtgcgcgaaaacgaaacaacagagcaggcagtcgagggacaacagaacggggtttccacgagcccgctaccgcgcccggaccaccaactacaacagcacccgctctcgattctacagtggttttaacagcaggccccggggctcgcgccggtcgccgtacgca

SEQ ID NO: 640654 - DNA, 140 bp, Homo sapiens
ggcgctacaagttgtgcaaagtgagaaagatctttgtgggacaaaaggatccctcatctggtgactcatgatgccgcacatccgctacccgatcctcatcagtgatgatacatcagatgattgagactgcagatactgat

SEQ ID NO: 640655 - DNA, 777 bp, Homo sapiens
tcagaagtcagacctgtcctcagaatgctacaaggtacagcccatttgagctcctgtatagacgttcctttttattggtcccagtctcattccagacaccagaccaacttagactgtgccccaaaaaacttgtcatccctactatcttctgtctagtcatactcctattcaccattctcaactactcatgcattccctgctcttgtttacactgctggtttacactatttctccaagccatcacagctgatatctcctggtgctatccccaaactgccactcttaactcttgaagtaaataaataatctttgctggcaaggctatgctgaatctccttaggtactctaattagatgtcctaggtcctcccaattcttagacctttaatacctgtttttctccttctcttattccgtttagtttttcaattcatacaaaaccgtatccaggccatcaccaataattctaaatgacaaatgtttcttctaatagtcccacagtatcaccccttaccacaaaatcttccttcagcttaatctctcccactctaggttcccacgccgccctaaatcccgtcgaagcagcctgagaaaaatcacccattattcttccgagcaacccaaaaatttcacgtcccaacactttaccactatttcatttattttcttattaatataagaagacagaatggtaggcccctgaggcgagttaggcaataatccactggactggggtcaccatccaggggcggtctgcctaagtggtccccaagatgga

SEQ ID NO: 640656 - DNA, 878 bp, Homo sapiens
  misc_feature (274)..(274): n is a, c, g, or t
gggcccagggggggggcgctctccccccctcttcaataccacggccatggtcttttctccgggaggccccctccccccccgccaattttttgtgggaattttggtgggccgggggcccaagcccctcacaacccgggggcccctggggccccggggccgggggggctggtgggcctgaggggcccggggatccgggccccggtgggcccgggtttgtgggggcccccgggtgaccatctcctcaccccaaggttaaccttcctttcctggaaanaggctttcacaaggttttatataggcaagtggatgggtttggagtaattatgtttcattaggaattatgtcctgggaaatgacagtgctgcatataaataaatgaataataatgctgaattgcctgaatatctgccatatagcagttccctttaaattaattgaaaaaaaatttaatgtaaaagtgaaatatctggagtgacaaggcactgcacagtgtgattttcatcaaattgctttattcctctttcttctgaagcatttgtcagttcaagttgatctaagggcattactgaatttgaattcaaatgtactccaagtcccaaggtttaaaaatgaattcctggggttctgaactcatgatatgcttttgtatctgaagatgatcatccaaaacatattgagtagcactacgacaggatttttcatttgatgtcaaagcaacttcacattgatagtgtttgatatagtcactaaaatccaaataaagctattgtctctaggaagaagaaattgtttctttagctaaatatggccatactttggtgcatctgacactgacaatgaatatggatataactttatcctaaaagggtttatatata

SEQ ID NO: 640657 - DNA, 980 bp, Homo sapiens
tctcagtgttccatctgctattctactactcctcagggattattcaggccccctcccttccctacacatcaagctcgaggatttgcccccacccaggactggcaaattagctttactcaacatgcccgagtcaggaaactaaaatacctcttagtctaaatagacactttacaactgaataagtaaagacctttcctacagggtctgagaaggccacgcagtcatttcttcccatctgtcagacataattcctcagtttagccttcccacctctatacagtctgataacagaccagcctttatgagtcaaatcagccaagcagtatttcaggctcttagtattcagttgaaccctttatatcccttacagtcctccatcttcaagaacacgtagaacggactaaaggtcttcgacaaacacacctcagcaaagctcaagcaccaacttacacaaggacctggacaattgcttttatcactttcgcttctcagcaatacaggcctgtcctcagcaatgtacacaaggttacagtccatttaagctacctgtataagacgctccatttctcattaggccccagtctcattcggagaccaagaccaacgttacgactgtgcgcccaaaatctggtatccctaacgatctttgctgactagtcatacccctaatcaccatgctcagctactcatacaaccctggctctggttacactgccggtacacacggtactccagccatccaagtgatgctcctgggaggcatatcgcccaaaggccaacataaggctcttacgctaatacgtcactttgcggccgacatcatgtgaaatccataggacatataataagaggtctatggccccaagtataaactatacgtatcccctctatcatatagatcgtacaaggcacgaccacatcctgcgggtctatacaatcaactcacgacttatgttccttttccccatcagaaatacatc

SEQ ID NO: 640658 - DNA, 408 bp, Homo sapiens
tccaaggttgtgtttttggaaaacctggcttcccaggtgggcctacgccctcaggaccccattaattgcatcccggacctgttgggttaggggactataaccggggtgttttccgcccgggggaggtttttttttcttaaccccaaagggagtggcccccgtggccaattttatccgacaggggggccgggtgtccattgccgaggttgcccaagccagcaattccctttttgcctgggggcgggggtcccctgcccaagccccagcctgaccccagtccttcccttttgggttcagggttgggggggccccccggggtaaacatttttttccctccccccccttttggggaagggatgggggggccaggcaggttttaatatttaaaggcctgtggaggtttgttga

SEQ ID NO: 640659 - DNA, 245 bp, Homo sapiens
ggtgcccgtcctgcttcaggcgcttccaatgccagtggagggagacacgacctgagtgctacagtgagaggctcgtgcatgcggcgtcatatgctcactcaggtggagagacacgcagcgtgcagacttgggcaggtgcatgaggaatttaagcagaacatcgagaacgtcagtcgtggagatagctactcaggaagtttgcagagagtaagggcacaggccgggagaagcctggacctctggac

SEQ ID NO: 640660 - DNA, 231 bp, Homo sapiens
gatccccttattttgcaatctacgcaatcatttcatagctcaattttaaagatcatatacaaatctcctataatgtgttaaaatgtacactatattattacgctaacgggtatatatcagaagattatcaggtcagttctggaccaaaataattgcattaaaatacaataggtgatagggaagaatttatcagatttgcagtgactgcttttggtgctcagctacaacaag

SEQ ID NO: 640661 - DNA, 484 bp, Homo sapiens
  misc_feature (219)..(219): n is a, c, g, or t
  misc_feature (468)..(468): n is a, c, g, or t
tggcatcaaaaagctttatttccatttggtccaaggcttgtttaggatagttaaaaaagctgcctatggggtggagggagaggtgttagggaaaagccctattatttgtgcacaggggcccttacaaaagtcgctgggctcagaaaggcgtcttaagttcgcgcttgagagtgagcccttatcagaagagatactcgcgccgaggcctcatgcctcggnggctcacccagccgggtgtggaggttgggtctggggtgtcacccatcttcgttgataagcttcgactatcctcatctaggaagtgattctccaggaagtcacagagcatgggggtccgtgggggtggaaccccagggctatgcaagcatccaaaagggcgctgggtagcaagctatttcctccgaggggcgcgcagggcgagcgttatcaagggcggtcgaggggttttcaaccccacatcatctttcnagactgggcttgcttg

SEQ ID NO: 640662 - DNA, 924 bp, Homo sapiens
attctgagccgagcccggtgccaatgcgcagtagctcagaggcggcagggggcctgagtttcagggcagccagtccctccggggttcgcttccctcgggtcagataaaagcttaagtcccgtgaggtccgtgaggaaaaaacagccgtgtcgggaccacagtctgggacatctcccggagcaaaaaccctgtgtggacgacccggatgagccgtgttatacaacagtgaacgagtgcttactccagggctcaaggaagcttgggtggcccagaatcccccaagaacaaagaaagggtgacggccaacgtattgggaattcctgcaaggcaggtgttcatcgactactattttgaccttgcagaatcggcccgtggagctcggtatttcgccaattattgggtcagggctggatttagcccagaaaagacccggggggcaagaaaaccgaggggcgtaccaagaggaccgccggtaggaacccaaccccacaaacacgggattatcacgcaacttccggtggtcccatgggcaagggtttcatgaaattcaccccttttctgaggttaagtggtcaacatttgaacaggccaaacgcactggtggtggctgaacataacgcccggtgttccagtagatttccattataatcgtgtggcacaaacaaaacaacacaccaaccagaatttcagcggactcctttacagagctgcatgagcactatatttttacaaacccagtatcccccaggggagcaccacgtagaagtggcccctttttaccaagggataacacacatggggggacacactaaaaaagtgacttccccagggggtcctctaacctgggacgggaattcggattatgaacaactttaagagcccaatgacggagagcggtttaataatcccccggggaggcaactt

SEQ ID NO: 640663 - DNA, 1746 bp, Homo sapiens
ccgtcgcttcctcgcggctcttcgtcttgtctcttgatgatgctactgatagataggtgtgattaagaacatatcgaacatagatggtggttaactacccaatgtatggtgagcgacgttacgtgatatgataactaaccaccgtgcttttctcttgtgggtaggcagccgacatgaattatcaattcagcatggaaggttgtgggtttgaacttacaagctacgcgcctagttagtctgccgtagtttatggctagcaaatagtacacacacccggtggttttgactccccgggatttgttcattagcggacgatcatcgggcggttaatattattgattaagagacagagggggtacttaagagtgtcgcgcgtcatttgttgttgtaagaccaactgctgtgtggcagttctacaccaagacgcggggggtttacaacagggggttatagcaacttattatgttgggccgagtcaagaactcaacgtatttcagcattgtgggggtgatagaatccacagcatagcatacaataccgtcggggcaccgaccactgagaaacaatggggggtgaactatatatactccagtggagtatagtgaggttttgtatccacactgtcctccccactgaagggggggtaattctttattacaaccctgtgttgtttacagggccgtaaatttataagaggtgggcacgcggcttgtagagagaagattgtggcttgtgagcccatctggcgccgaccgaggaagtaataagaacgctgggttggttgcccacacatttgttggtgaaagtgctttacaccccacaccgttggtgaacatgtttctgtgcgtgagtcaccgcaatattgtgcgatggaaagacttggggggggaaattatatatgatctacaacagcggttggtgggaatcacctttttgatagaggtgtgcgcacacccctgtcgtctcgtgatattccacatcgggggatgcccccaccacacacatatttggtgttggcgccacagcttgagggcgacatttatcagagatggttttcggtccccagctcggggggggtggccacaaaaaagagattcctctcgtcacagcgagacttgacacagatattctcccttctctactgggagttatatacacattgggcacacatacacgtcggggatatatggagatgagaaccctttcttgtagtggagaagaacacacacagtgtggagccacgcgtggtaccccgcgtgtcccccgggggaaatatatacacgcgcgcttgttctgtggtgtgtacacagacccacattcccacgcggttggctcgaggggtttgtaacaacacacggtctaaataatgggggaaaccttggggataccccctcgaagagggaggagccacttccaaagggagattccacgcacgagttcttgggacacaggtgaaatatatgagccacattttccccgagaacacgcgccttttaatatatgggggggacacccttgtaagaaagactttggccaaaagactggataaactggctgtaagagccattcgatcgtgaggggttctttgtcctcttgtactgtgttttttccttgccccgtaacaccccaaaaggttctatattttttgtgtagggtgctacaagagaccttgtattgaagaaaatattttttttggaccaatatttaaggtttcccaaaaaaaagtgaccacccctccagggaata

SEQ ID NO: 640664 - DNA, 109 bp, Homo sapiens
gccggtctcagtctttaatcgtggcaggggatgaattgtttcaggggaaaatgcccacattttaacttttaaacttctgaataaactgtgttaaaaccaaaaaaaaaaa

SEQ ID NO: 640665 - DNA, 804 bp, Homo sapiens
taggtggtttgattttaaatcactataactaaaggggttgggacttccagattcccaaaggatccttttaaaccaaagtcaaacgtgatttaatcgttttactatttacacattttgtgtgcaccacattcacacttacaaacttttctttctaccttgacaactaaatccaaggtggtaccttggtatctgtctatcacaataagttacctaacacatgtgggacaacagagacacatgtttatgacacgaacattaacgataccaactcttgactacttagttggctgaacttacagttgtgtaacccgtctcattgtacacttgaacgttcctttctctacagtaacaggcctcacttatccttctataagtgtgcaacacagagtttttccatagtagacctaatctttgtggtcaaccagtgtatctgacggttgcatacaatgtagacggctacactttcattgatgccaaatccacaatgacataccagtagacaccattgactacacaaactgtttgtggacaacaactggcttactagtacacacttaacttcatgtacgacgccacagactggcttgatggctccacctatgtacatagctttcagaacaattgcataagatggtgactatatagggaacaccacagcgaatttcagacgacagcactatctattactttacccaggaccatgccctcattagggcccttgggaataacacgtgccatgttgccacatgccactgcattgcctatattccatggcccgcatatctaacggcattacgcctttgc

SEQ ID NO: 640666 - DNA, 363 bp, Homo sapiens
  misc_feature (78)..(78): n is a, c, g, or t
  misc_feature (104)..(104): n is a, c, g, or t
  misc_feature (151)..(151): n is a, c, g, or t
  misc_feature (157)..(157): n is a, c, g, or t
  misc_feature (174)..(174): n is a, c, g, or t
  misc_feature (254)..(254): n is a, c, g, or t
  misc_feature (263)..(263): n is a, c, g, or t
  misc_feature (277)..(277): n is a, c, g, or t
  misc_feature (298)..(298): n is a, c, g, or t
  misc_feature (327)..(327): n is a, c, g, or t
  misc_feature (329)..(329): n is a, c, g, or t
tcgacccacgcgtccgctgtctcaaaaaaaaaaaaggcaccatccaccactcttctctttgtctttatccttctctgntaagtctgtcctttattaatttaaangatgggctgagtcccttgaattatcctttctctcctgtggtctagangtgggntccttgctgtgctcggntatgtgtccagaacagtggggcagagaaaaaaaatatagtaaaacaccagctctggtatctactgttaagaagctctgangtgctgtangccattgcagctangtgagacttgcagttgggganctgagggactggataagattccagtgganantgttgggggtcctggcccaatcccattctccaga

SEQ ID NO: 640667 - DNA, 354 bp, Homo sapiens
gcacgagaaattccttatatttttagtaaacaccaaataaatatttatcaaataagtgaagaacttgagagctaacataagagaaggtattgacgcttactatcaaatttggcccttaaaaaaccttatgaggaaggcagggctcagagagctaaatggtttgcctgaggtcacacaacagaaagcagcaaaaccatgatctcatccaccgtgagcatggtgagctgatgaagacttactgctagaatttatcaaagacattgttaaaggaaaataacttacattggtttacttcttaaatggaaataggacatattgaaatattgaatatacaaataaagcaaaaggtagaaa

SEQ ID NO: 640668 - DNA, 379 bp, Homo sapiens
tcctatagatcagtaaagaaaaaaaaacaggaagagctgggacttttctgagatacattcataaagtcttcttcctccctgctgcttctgctgcgtttttttctgttgaacaagaccccttccttcccagaaacatcgaggttgacgggaagtgcccagcagaattaagtctgcgtgttccacttaaacaattggactgagaaaaggcaaccctttagccaatccacagaaaaagctcactgtaagccaaaagccaagagcacaggaaaatggtcttcaaaacaaacacaaaacgaaacaaaaacctgtgctaaaaagcggaggttcagaaaagatcacgaaaaaatgacagaagacactgatttataggaagttggtg

SEQ ID NO: 640669 - DNA, 436 bp, Homo sapiens
tctggatgcaaagtgtctcgatgttgcagtcacgccattcagagtggtttggtcatagctagctatgaatggactaatgaccctcctctagtgctcaaagaggctgcctcagggacatgcgacacgaccatgtgtctaacagtacccctgcctcctgcccaggaacccaggacttgtgccacaattaaggccctctcagggacatgtcggccagcaacacagtaagctgagtcattggaatattcacttgccacaagcccagaaacttacaatacaaagtgctctttaaactgaaggacctgacatgcccttgctggcttatggcagtgtgaaatcataagaggaaagctcagcccacactccccgaatcaagggccactctcagagccacctgctcaaggggccactgcaggccccagcctcctacagatgggga

SEQ ID NO: 640670 - DNA, 387 bp, Homo sapiens
tcaggttttgaaaatcagatgattttttttccttttccaaaccccacacgttgaaagcctttataaatccaagtctgaaactttgcgcttttgtacttcttttaaggtacccaacttggttcttagttcatataatctcggggtacacccccccccccacctttttttacccccacctacgtttacccccacctacctttttttaaatttacctgattcccgatttttttcataaatattctgcctactgtaaatatgggttcctttgagttgtttttgaaaattagcgcaatgttttaaaatcaagtttttggaaatttcattgttttacctacaataacttttattttggaattgaactttttttaaattgtatcttatcctgga

SEQ ID NO: 640671 - DNA, 535 bp, Homo sapiens
  misc_feature (123)..(123): n is a, c, g, or t
cagtaggccccagcgcaacgtacattgccctgaaacacgtggccccttatggtctggcctgtgccggcctctccagcctcatgggtccccagcacggctcctccaccccacacacgagaactncaggctccactcacaccagggaatacgcgaggtggcgagtcacagggttgctgctttcaaatcagaaccactgagttattggccatgggaggagcagagatctttatgaaaccctagaacaggtgtagtcttgcaaagaatgatttattattgtacccttattagggctactatctctgatttccacgtttaaagaggcttccagcttgctggaagtgaaagcgtaagaaagcgcaggaagaggcagagtcagattttggaaattaaaatcccaaggctgtgacaattgcaattctaggtatatgccctagagaaattaatgaatatgtgcagagagacacatgcaagaagttcattacagttttgtttctaagagtgaaaaaaattgaaaataaaatgactatcaacggaa

SEQ ID NO: 640672 - DNA, 759 bp, Homo sapiens
cattgttcgcctccaggcagggaattctctaaaaaatatgaagctacatctcgttggctcctggccaccaatatcccagtggagtgggggcacacttgggttcagttccaagctcacctctggccctgggtgtgttacataatcttgagtctcagtttccttttctccataaaccctccgtgcaaatgtgttttgaagattagacccaatatttatttagagtgcctggcacacagtagatccttaattgcagcacttttgacgattttaggagcatataattcacgccatagaatgttccagcagtaaggatctatgagatcacctagtccacctccaatttttctgatggagtccacaggtggtaggtgttttccccaagatcaccaggctggtttggcagatccagaattcgagtgtgggctcaccctctcacttcctgtgttcttgtctttctaccaatcaggaccaagataccttgcagtgatagtgggtatatgctttagcctatatatcatttgccactttggtcggctctgaggtatgaatcttagctggaatggctttgtgtaatcctctccactgcccttacatatgccactagtcctgcccctgctctgagcagctgaccatgcctatctggtggcacttttctagtccttccggagaccgagggacagagagaggcttcgcgagcgatatatgagagagagagagagagagagagagagagagagagagagagagagagagagagag

SEQ ID NO: 640673 - DNA, 331 bp, Homo sapiens
gggggccccccccccccccttttttgagccggtttttttttttaacccggttttaaggggggctttttttaaaaaaccccccccccccccccgggggggccaatttttcaggggggtttttttttcccttggggtttttttccttgggtaaaaggggggggggtttttgggggggggggaatgcccccccgggaattaacccggggccggggtttttaaattttggggggaaagggggccaaattgccccccggaccccctttttttcttttttttttaacccagggtccccccccccccttttttctttggttggggggttttttttcca

SEQ ID NO: 640674 - DNA, 432 bp, Homo sapiens
aggttatcctgactttgaaatcacgcttaactcttaagtgatattttttgagacttcctgcatcacaggtacctgggccttgtcctagacctgttgaattataatttcaagagtaggggaccaggagcctacatttttaatatggtccctaattgtgcaacacacaattactgccttcaaagattatgtgtctaggagaaagaaggagtagaattgagttttgtgtattgctccatatttatcttaaaatattaaaagcattgctatgtgtatgtcatttattttttacctccaaagttggtttgcaaatatttagatttctcagataaaggccattgctagtcatatggtgcacctttgtacaaaattattaaaaggcagtgccctgggaattatttagcaagcaaacttcattaccctagtgtacactag

SEQ ID NO: 640675 - DNA, 999 bp, Homo sapiens
cacgcgtccggaggtgggatatccctatgctggctaggctgagcttgaactcctggttgctcaagctagttctacccacctcaggctcctgtgtagctgggattatagattggagccagcatgcccagctcaaagggttgtcctcctagactgagcctgatgcagtctctggatgggtggggacgtcctgtcatcttgggtcagctcacctgcctcagatcctcgagaaggacctccttgatccgatgactcatggtgtcttctaatcctaccctgaaacttgtcctatccagtgagatgccatcttgtgtgggctacggctgttgaggcagagaggaggtagcttgatttctctagtcaacattagggggatgatgttgtgtactgtggagagggatgaggtgctgggagggatacagggcgtggtgttgcttggtcaccccgagcgttgtgtggttaccatcatcatggtgtctaggccgcaaaggaaaggactgtcgcagggtggcgtgacgctggaggggacatgctggtgagagatggtggagagagtgtaatttgggatggagctgggcattaatgagtaagagagtatgtgtgagagcagattgtacttgcgtcgtactggcgctttggtggttgaatcagggtagcgtgagtacaagtcctcgtttgacgatcgctgaccccacgggtatgagagggggggctgtgtattccacttggtggtgcacgggtgtgtgacgtgtggtcccgattgtccgtagagggtcgtcttcctctgcttgtgttcataccgacgtgcctgtcgccctgcctctggagcctctggcggacttgttgaggtctctttcattccctggtatcgccttctgcattggtctcgttcttcttcaccccattgtgaccggttgttttgcctaaaccggggctcttggggggcctcgtcaccccacaccatggccccggttcggcgggggccatctcgggggaaccgcg

SEQ ID NO: 640676 - DNA, 392 bp, Homo sapiens
  misc_feature (71)..(71): n is a, c, g, or t
  misc_feature (73)..(73): n is a, c, g, or t
  misc_feature (87)..(87): n is a, c, g, or t
  misc_feature (92)..(92): n is a, c, g, or t
  misc_feature (94)..(94): n is a, c, g, or t
  misc_feature (96)..(96): n is a, c, g, or t
  misc_feature (120)..(120): n is a, c, g, or t
  misc_feature (143)..(143): n is a, c, g, or t
  misc_feature (157)..(157): n is a, c, g, or t
gccacaacagctcccaccacacccacgacgtcattattcgccgtctcgtcacatcactgggtacatgaacntngaagctctatgacncactngntngaatatgacagacaccgaaaatcncgactcagccccctccagcaccnctacctgttgcccnccgatcacagccggaatgcagctgaaagattccctggggcctggttccaaccgcccactgtggactctgaggcctctgcatttgcgggtggtctgcctgtgatattttggtcatgggctgttttggtcggtttcccatttgtctggccagtctctatgtgtttttttttccttgccttcattaaaaccaaaactacagaaaaaaacaaaacaaacaaatggtctcattggcctca

SEQ ID NO: 640677 - DNA, 1044 bp, Homo sapiens
cctgaaaatgctggactccaatgcctctggaatagggagtggctgtggatctctctctatcagccctatgctgaaggtctttcattattaccatgctctgtaagccagaaacgcggacccctaatattgtcttcccaagcggtatgccccacaagaagacattcactaaagttcaaccatctgtccactacgtgggagagtcctccttccttcatgcgacactgaacccatggagcacaatgaactgagcacgattccaagatggcttcacttgacctaaaattgtaatacatccaccaacaagacgaagtgtttaccgccacatcttaacgaacgtagccaagggacacctataacaccggatatccttattacccaagaagaaacttcagatgaaccactcacactgtacggtggcccatgattagttcacctcctgattgccaactgacagccagtagccataatacatcatacaccccacacgacagaaaaccactagaactgattacccgtttgaaacagatttcattgctggaaacaaattgcatcataccaatggcatagggctacatgggtgcaaccatggggggaagcccattccggacaaatatgttaacactaacaataactgggccattgcttgaacaaagttgacccccctattcaatggcacacagtatttagcatcactggacacgcaagccgtacattcaagagacagagcacagaaaaaggagattgacaacatagagatagacaggcaaaaaaaccccgcaacgagacgccaaagagaggcacagtgaagcaaaattagcaggcggcaaaggaggaaacaggataacgagatacaccagaaacacgaaccaagggccaatacaagcaccaagatacaagtggccccacaaggacaacaccaaaacacgacacgaaaaaagaggggaggacaacaaaagaaaagcaaagggacacaccaacgaaagagcggcacaaaaggggagacagaaagctgaacacagaccagaaaagacataacgaacagag

SEQ ID NO: 640678 - DNA, 658 bp, Homo sapiens
aaaccccctcttcaagaggcaggctccaagaaaggtagagaatcagttcctactaaacctaccccaggagagagacgttatatatgtgctgaatgtggcaaagcctttagctaatagctcaaatctcaccaaacacaggagaacacacactggggagaaaccttacgtgtgcaccaagtgtgggaaagctttcagccacagctcaaacctcaccctccactacagaacacacttggctggaccggccctatgactgctaacgtgtcgaaaacgcttttggcgcacgcacgctcagcacccttcttaaacactcacgcacgcaactgcacacacgcaagcagcgcgccactactcagctgcacaagacttgctggcacacggccattctcacggcggcgcaaacggcacgccctcactccgctcacctatcgagatccacaactgggcgagaagccttactcagctgtaacgaactgctgggaagagctctcagctcacgcatgcgggcctcagctcccaccagagactccacaccggagagaagccactataacgctgctcaggagctggtggcgacagccttcaaccacagctccaacttcaataagacaccacagaatccacaccggggcaacaagccctactggctgtcactcac

SEQ ID NO: 640679 - DNA, 997 bp, Homo sapiens
gaaaattccgaaatgggtggggaggaacattttccgggaatttctcaatgagggccggcgccttttttgagaaaatttggaatgtccgtgttcttcttcgccaaaccattttcccagaatctcttggaaacaatggaggtttttacacgacctcctgtctcttagaccagagtaaccccgcgagcccagatgggtttgtgaagagagtgtcccctgtgccgaccttgtcccggctccccgcggcatgatggcacacaacctggagggaaagaaaaattttgtttccacaaacgaggatggcctcggccatttcttccaccacacttgggggtttcatataagcccgggggggaggggacctgggatttttattatggggccccccatttttttagagggagtacacccaagggccgccttgtgttgttatccaacaacgtttgtgataatcctctgccacaggtgtgcccccctttatattttttagggtgtgaccaccgcccaccaattgagccgttgttagttagaggaagtttgtgttcgcccccgccgacacacacgtgtgatatctgtctggtctcgctgtgtggtatagtgaaaaccccactcctctctgtggaggcctcccggcgggttcactttttgatcacttccctgttgcttggagcgcaagcatgaatggatagtccgaccccaaccactcgcacggtgttattattgaataggatgtggaagacacacctgttgttatagagtgaaaattccaggaataggggtggactatttaatgtgagcgctaccacgaagtcacacccaaactgttggttagttctcatatagaggtgacagtcaccaataagagtaacgggtgtttttttttttccagatggatgtgggggttaaataaaagagaaataataaagagaagattctgtttctaatgaaccgcttttttaaaaaaattttttaaccctaaaaaaaggggaataaaaaaaaa

SEQ ID NO: 640680 - DNA, 384 bp, Homo sapiens
  misc_feature (63)..(63): n is a, c, g, or t
  misc_feature (65)..(65): n is a, c, g, or t
  misc_feature (79)..(79): n is a, c, g, or t
  misc_feature (84)..(84): n is a, c, g, or t
  misc_feature (86)..(86): n is a, c, g, or t
  misc_feature (88)..(88): n is a, c, g, or t
  misc_feature (112)..(112): n is a, c, g, or t
  misc_feature (135)..(135): n is a, c, g, or t
  misc_feature (149)..(149): n is a, c, g, or t
aacatcaataccacctctaaaagccacaccatatcccacccttgatataaacgggagagaacntngaagctctatgacncactngntngaatatgacagacaccgaaaatcncgactcagccccctccagcaccnctacctgttgcccnccgatcacagccggaatgcagctgaaagattccctggggcctggttccaaccgcccactgtggactctgaggcctctgcatttgcgggtggtctgcctgtgatattttggtcatgggctgttttggtcggtttcccatttgtctggccagtctctatgtgtttttttttccttgccttcattaaaaccaaaactacagaaaaaaacaaaacaaacaaatggtctcattggcctca

SEQ ID NO: 640681 - DNA, 391 bp, Homo sapiens
ttcatgtttcttcatttgacgttactatattccttctcactgagtgtctgttctgcattctgggtaacttatttagatctatcttcaagttcaataattctctttttatttttgcccactctgctgcttagttcatctaagagtttagcattttaattattatacacaccatctctaatcttgtctgaaccactgacactcaattacttgataactcttcagtcatttgcgtctcctagctaactgcttccctaaatccttgcaccctctacccaaaagctacccctcactctgagcaaggacctcaccatccccttgacatccaggaaaaccaaggacattaacatgggacttctctccacagtgttccacaggacttgcactcctggtc

SEQ ID NO: 640682 - DNA, 289 bp, Homo sapiens
tcgctgtttgctgtaggtcgtctctacaggataccccaccttcgatcgcggagaatttgcccgtcgattgggggggggtccttcagagacccacaggccggttgtcttggcgctggtgtgccctggtttacagctgctgcttgtggatcgtgttcttcttgcaggtagctcttcctccacatcacgactggggtctcgaacagcacgggggtaggaaatcctccaggatcttaggacatttcactccggttttcctgctcgatggtctctttggtcggacagggttccc

SEQ ID NO: 640683 - DNA, 1028 bp, Homo sapiens
  misc_feature (844)..(844): n is a, c, g, or t
ggggcactgcggcctcgaaggcgattcctggagcatattcagtggagcgagtagggactcttgtagcttagaagtcaggaacactgtttgcatgcttgtgtctggagtgtttgcgcataaaggaatggtggacttgcacgaatatctttttaagaatcaagaccagcagggatctcaagcttaatctcctctgctctcgaagtcttagccacttttgcgttgttccttcccaagtgcagagatcagtggacacaaatatagaaaaacatactgaaagaatatagtgcgccgaaggcgcctaattcaggagtttgtgggccaagatgatcagcgtctgtgagagaaggcatttccatttgtttcaccacggcattgggacatggcgcaacacagcgggattgaagcatacattccgcttgtagatccacatatgttgggacgaacacggtgaccaacgggacaaacgcaatttgctgcgacatcagccacaggagcactcgacacttgatgagaactcaaggacgccctcacgtctcaataagaacctgggtcacctttgctacagggcgcactggtgcaatataacccgctaataactttctttaggatcgcgcgaacaacctccagcgttaccatttgccatattcgcggttaaccgacttagctgtcgtgacacataccaagcccgtattaggaggcaaaaacgagggcccaatggctaatgggctctatatttcagacggaataagctgggccatacgactggcactgttcggcactcagggggcctggagtggcgagtcgcgggctcatataacggcagagtgccattccttgacgacanttccgaagcaatcgggcacgataatgaactcggaggacactgcgcatatgagcatcagcagtagggtgaaacagctaattacagcataggaaaaacaaagtcgccgttctgtgtctgtaggtgctctcttgtcatctgagtctcatatctgccgcgacaagcataacaaacaaagagccactaa

SEQ ID NO: 640684 - DNA, 175 bp, Homo sapiens
ccagcaggctcattgagaagtcggatgaccaggcacagctggtgggacgaaatgctgcgcattttccatgccctcaaggaggcgctcaatcatcatcggtgacatcagcaccagcactgtgtccacgcctgtacccccgcctgtcgatgacacctggcttcagagcgccagcaga

SEQ ID NO: 640685 - DNA, 266 bp, Homo sapiens
gctaccctgggcttttttttatgcgtcccaaatgtgtcatgtgtctcatgtcaattcccatctatgagtgagacatgcggtgttgggttttttggtccttgcaatagttggctgagaatgattattttcaatttcatccctgtccctacaaaggatatgaactcatcattttttatggctgcttagtatcccatgatgtatatgtgccacattttcttaatccagtctatcattgttggacattggggaacgcattaaaaaaaaag

SEQ ID NO: 640686 - DNA, 275 bp, Homo sapiens
  misc_feature (18)..(18): n is a, c, g, or t
cgcaatagtagagtgcantgcgctccagcctggtcagaagagcgaaactccatctcaaaaaaaaaaagaaaaaaaaaaatttacaacaaaataaaaccatccaatatttatcacaatttttttctctcctgggtaccatattttggtctgcttgctcagggagcatgtccggggatgaagcgggccggttttattacaaactccaacactagaatgagtgggccgggggacaggagtgtggggtgagtgggtgattggagtacccaacacccgag

SEQ ID NO: 640687 - DNA, 161 bp, Homo sapiens
tctgcattcttagtggtcacaagatgttagggttgcaggaacagattaataacgttcactagaacaaacccaggacgttaacagacccaggaaacagttttgatgtcgctcgtatcttgttagtccaaactgcaccatttttctttctttctgtttttttg

SEQ ID NO: 640688 - DNA, 556 bp, Homo sapiens
cagcctggtgctgaacttctgcttacaggtgtgggtcatctccacattgtagctggtctgagcccgcaggtcaggattgccgagacagtaggtgttggcgtctatccagatgcgaaaagggatgagctgccggtagccgggacggtcgatgcggcggctgagcgacaaggccagctcgtgcttttccgacagcttcttctggatgcccgcgctgggaaacagctggaaatagttgcgggtgaagccctggctcgggtcctgcgaccggccctcggcgttggtctgctctacccgcaggcccccggaaagcgtcaggtcgggccgggggcgggtcagcgtcaggtaggccgcgttgatgttctcgtcgtaccggaagcggttgctctggttggggtcgggccgcgtgatgccttccacggtgttagtgaactgcacgtcgttgtccgaggttaccaggctggttttcaggccggcctccagcgtcattttgccccgcaggggcattacatagtccagctttgccgcctgaatggtgagccggcctttctgcacgttg

SEQ ID NO: 640689 - DNA, 513 bp, Homo sapiens
tacattcagggttctccttaggactatgacagtagaattgtgtggaacagggaatcacggatgcacatagaaggaaagaaatatcgatactaatgtactacagaagatctggcagggataagcaggacatcgactggaacgtatgctaaatgaaagcagactaatttctattttcttacctgagcaaatatattattgaaactgcttatgtatgtcacaggagcccacaactatcagctacacaactttttgtattgcaagaactcatacttatagtagctataatttacacatttaatttaaagtgacttttagcactaaaatgcctagaagattttactccagacctataaggaaatgttaagtttatatgaacaatgacaagtcgatagataaaacttctcatgtctttggtgctttggacctaatagcactggacaacaccacgaccacatggaaacatatatatggaagcaacaatttactttatataacgtatgctaatggagagct

SEQ ID NO: 640690 - DNA, 826 bp, Homo sapiens
  misc_feature (810)..(810): n is a, c, g, or t
gcaggttattaagttgggccgcactgaagacttaagggcagtgaacacatcggatgtcccacagcacaacagccctgcatgggtttgttttgttctttctactgctcactcccaaccttttgtaatgccagggttccgtaaaccttactttctgagatgtagtctcagctctaaactttgtgtaatactaaaatcacgagaacacctaaacgcacaaccggagaaatctattgtggtatgcacttgattaacgttataaaatgttagaggaaactttcacatgaataatgtagtgtcaaattttatcatggtataatttgtaaaaataaaaagaagttggacaagaagagaattatggatttgtcaatgtaagtatttgtcatatctgaggtcctaaaccacaatgaaagtgctctgaagatttaatgtgtcttattcaaactgtggtctcttctgtgtcaaatgttaaatgagaatataaacattttttagttctttaaaatattcccgtaggtcaaaattcttcctcactataattggtatttactttgtaccggaatttcttgtgtacatgtaagtgtgactggcttttgaggctctcccaagggtctgagtgacgtgttggcagagagaagcatccatggtccagccaccaggctccgtgtgtccctctcccatgggaaggtcgtccgatgtgcctctcattccaagggcaggaagactgtgactctagccatgacacgctcggttctggtgggatgcacagtcactccacatccaccaactgaaggaagggaaacaggcagaaantaccacgagatctaga

SEQ ID NO: 640691 - DNA, 194 bp, Homo sapiens
  misc_feature (83)..(83): n is a, c, g, or t
  misc_feature (132)..(132): n is a, c, g, or t
ggattttattgaacttttcatattacacaatttacccaaaacatttaaagtaacagtaagacaaacttaaaataaataatgtnatacttgtcaaaacatctctaggtgaggcaatatgtaaatttcattgtnaaataatgattttgttactttgttatacaaattggtaccatatcaatgatactaaatgactt

SEQ ID NO: 640692 - DNA, 323 bp, Homo sapiens
gtcgctctgcggatctgaaagaagagaagaaggaggtactgatcatagttacgaagcgtggagcacaaagacggattcatccttcctgaagtttcccacaagggctccaggagagaggtcttgggcacaagaagaaatgagtttggcagagagaaagtgactatgggaggagagggctcccagggcaagaggaccacacggggcacaagagaggaagtcccaggggcccaatgaacaggggacatgggtgggctgaaagcaaggggtggtaaaaagggcaaacagcctaaggttgataacgaacaggcccgtgaccttaggtc

SEQ ID NO: 640693 - DNA, 230 bp, Homo sapiens
gaattacaccatcttgagaggtcagcacggtgctcacgtgtcgacggaacttgtacagggaggcatgcaccgcagtggtgaatacacgtcgaccaggctgcatgtttacgttcttgggtcgtgaacacggtagctcatgtattgacggaacttgtctccggaggcgtgcaccgccgtggtgatatacccgtcgagctggtggcatgccttgcatgctccgggtcctgcac

SEQ ID NO: 640694 - DNA, 464 bp, Homo sapiens
gtggaggtcaatagagtcagggcaagattagatggggggcggttatagatggagggtgagatgagagacgagtgagctgaagaaggactgggggtagcaaaaaggaagcatgacttcaagatttggaagatgctgtctatccagtacggcaaaaaataagaagagcgtgcactggagagacaccaagagtgtggctggctcatcatttgttaaagagattctgggtatgatgcacggatccaatcaaccatctcaacagaagccaggaacagagatgaggttatccaggaaggtctatggagggcaccctcgtctgacggcctgcaaccctgtggactgcatggagggcagggtttctgagtattatataccagcagaaacactgccagctggaactgaaaggaaaagagatgggatgaaataaaagaaggctaggacttctgggattctacaaactggccgat

SEQ ID NO: 640695 - DNA, 116 bp, Homo sapiens
aggaccccgcatttcgtcccatcagcaatatctcgcattcctcaggatagtacagcatgtaacctataaaccactttcaaccagatctcaattctccctgatgggagcaagactgg

SEQ ID NO: 640696 - DNA, 434 bp, Homo sapiens
aaacatacagtttaggctgcttgtgaatgcctcatcagctgctgaagccatatggcagcatcttcaactgatacagaagtgggtcgcagaggtgcaatatcaacccatgtgccagagctgatggcttcttctactgatgcttccacttgatccagaagtccttgcacaacacaagctgctttcaaaaacaagagtagtgtagtcttatatcttttctttatgtagcttacagcatctgggattccaagtttggaccaagcatcacattctagatagacatactgactgaaaaaggatccacccaagtactctgtgtcctggagtagatgtcagggacaaacacagctatatcctgtctcccaccaaccacagtgcctcgaaagcgtccgttattaccacgttcctcaagcactgcgtatagaagctgctcctga

SEQ ID NO: 640697 - DNA, 313 bp, Homo sapiens
caggatcccctactgtctggttgtctctatataggtttggtcctagccttttctattagcgtctttttatgattacatcgtgcgagagcttccccgtttcgagtgagttcaccctctgaatcaccacgattcaggatggtgactagcatcaagcatgctacactgcatctcaaaatgcttagcctagccacacccccacgggaaacagcagtgattaatcctttaacaagtaaacgagagttgaacaaagttatactaaccccaggattggtcaaatatcgtgccagccaccgcggtcgcacaattaacccga

SEQ ID NO: 640698 - DNA, 818 bp, Homo sapiens
  misc_feature (6)..(6): n is a, c, g, or t
  misc_feature (83)..(83): n is a, c, g, or t
  misc_feature (95)..(95): n is a, c, g, or t
  misc_feature (168)..(168): n is a, c, g, or t
  misc_feature (187)..(187): n is a, c, g, or t
  misc_feature (192)..(192): n is a, c, g, or t
  misc_feature (225)..(225): n is a, c, g, or t
  misc_feature (273)..(273): n is a, c, g, or t
  misc_feature (282)..(282): n is a, c, g, or t
  misc_feature (288)..(289): n is a, c, g, or t
  misc_feature (435)..(435): n is a, c, g, or t
  misc_feature (477)..(477): n is a, c, g, or t
  misc_feature (685)..(685): n is a, c, g, or t
  misc_feature (816)..(816): n is a, c, g, or t
gggggngggggggaagggggcgctagggggaggggaaaggagggtgtggggagcgagatggctccgggggtttagacactgcngggttgggggcnggcgggcacctgcctctgactccagctgcgagcagcttcacttggggccctgggcctccgactcctcctcgtngtcttggtacatgtggggntcttngtggggggtggcgtcctggtactgctggtactnggacaccaggtcgttcatgttgctctcggcctcggtgaactccatctngtccatgcnctcgcnngtgtaccagtgcaggaaggctttgcgcgggaacatggcggtgaactgctcggagatgcgcttgaacagctcctggatggcggtgctgttcccgatgaaggtggaggacatcttgaggcggcggggcgggatgtcacacacggccancttcacgttgttggggatccacttcacgaagtaggtgctgtngttggtctggatggggagcatctgctggtgcacctgcttgatggacatgcggccccggaacacggtggccaccgtcaggtagccggccgtggcgcgggtcgcaggcggccatcatgttcttggcatcgaacatctgctgggtgagctcgggcacggtcagggcccggtactgctggctgccccgggctgtgaggggggcgacggcgcnatgaagaagtgcaggcgcgggaagggcacatgttgacggcagcttgcgcaggtcagcgttgactggcccgggaagcgcaaggaggtggtgactcgctatggtggcgatacaggtggtgaggtcccgtagtngg

SEQ ID NO: 640699 - DNA, 441 bp, Homo sapiens
  misc_feature (80)..(80): n is a, c, g, or t
  misc_feature (216)..(216): n is a, c, g, or t
tggaggctttcatctcttctaccatctgccagagtcagcagagctttccggaagtctccagacgtctcagagctaatgtnatccccgaggctcttcttatacactgtataataggcctgcgagatttccttcatctgcctgcttgacctggttgttaggatttcaatcagggcatcttcatctgtgccagttcccttcatggatttcttcaaggtngtcgcatcaaacagggctggtgcagtaacaagagccaccatgacgtgctcgaagtggccagagagatcacccttcaagtcatctttcagctcctgttcatacgctgcttggtactgcttgacaaatcagcttgtctgcgcgttcgaccgctccgtcagaatgttgatgagggttttctcgtcagtcccaagtcctctgatcgctttccggatagcttcggcatcc

SEQ ID NO: 640700 - DNA, 263 bp, Homo sapiens
ttgtgtcaaccactcactcaaacacactcagtcactgctttagatataccagacatgctggttaataaaattttaatctctacttacctatttacactctataatataagccgtcagctcagacaacttaggcctgtggctcttctttggggaaaggcaggaaaatgatagctaattataaaaatattgggaagaaagtttatagctgctcctgaaattcttttaactgtgacactagatgctaatttctgcaactgcaaacc

SEQ ID NO: 640701 - DNA, 359 bp, Homo sapiens
  misc_feature (9)..(9): n is a, c, g, or t
  misc_feature (312)..(312): n is a, c, g, or t
ttgcgtgancccccgatttcaacaccgcagtccacaacaccacgccaacaaagaatatagacgccgtccggcgtgcaccacacagattcaataccgcgagtaccgcaattcctacagccgcgacgccaagagaggccatcgataagtcattagtgtagaacaatgcgatgataatgatggccccaagatcgtcgataatagccagagccatcaaaaagatcttcagcgctaacggaacacgacttcccaacagtgtcagtacaccaagtgcaaaagcaatgtcagtagccgtcgggatcgtccacccttcgngggtaatcggatcgggcatagttaaaagccagatagagtaatgccgg

SEQ ID NO: 640702 - DNA, 476 bp, Homo sapiens
agcaaaaaaagcgggcaaagaatcccaaagtttgggccatgcgatgttcgcagagaaaaacagacattccgaaaagtgtctgaaatgtttgccttactcccagccttatctaaagatatcctctcccactgtgatggttaatactgattgtcaacttgattggattgaaggatgcaaattattgatcctggttgtgtctgtgagggtgttgccaaaggagattaacatttgagtcaatgtgctgggaaaggcagacccacccttaacctgggtgggctccatctaatcagctgccagcatggctagaatataaagcaggaaaaaaatgtgaaaaggctagactggcttaacctcctggcctacatctttcttttctgctggatgcttcctgcccttgaacatcaaactccaagttcttcagtgttgggactcggactggctctccttgctcctcagcttgtagacagcctactgtg

SEQ ID NO: 640703 - DNA, 402 bp, Homo sapiens
  misc_feature (40)..(40): n is a, c, g, or t
acacacacaaacacacatatatattcttttttttctttgnttgtagaaacaggggggcgctattttggccaagctggtctcaacctcctgacctcaggtgatctgcccacctcagcctgccaaagtgctgagattacaggtgtgagccactgcgcccagcctataagacatagctcttggcttagaggcactgatacaaataagctccctggactgaggagcaccttggaggtgaacacaagggcctctgacagcgagcatggaatatctcagtcggactgcatgacctgggcttgcgttgcataaaacttctggaaaccccgtaaaaataggccaacatgattttgactttaaaagagagctaactctaaaataactattctatatcgaaatccagagtct

SEQ ID NO: 640704 - DNA, 265 bp, Homo sapiens
tgtggcagacggggtctcagaactagaataaataagcttagaatatccaagaagtgccaggggcggtagttcacgccggtaatcccagcacttggggaggccgaggcaggcggatcacctgaagtcaggaggagaccagccgggccaacagggagaaggcccgtctctactaaaaatacaaaaaatagacgggcgtggtggcgcatgcctgtaatcccagctacccgggaggctgaggcaggagaatcgctggacccgggaaggg

SEQ ID NO: 640705 - DNA, 139 bp, Homo sapiens
cttgatgataaggataggaagatatgtcaagattatttctatgttaccagtatgggaaccagtgtgaatggttggtggcatgcactgaggataagatgcctatggttagtactgtaggttaacacaaatcttattaaga

SEQ ID NO: 640706 - DNA, 412 bp, Homo sapiens
  misc_feature (394)..(394): n is a, c, g, or t
tagagacagtctcactcttgttacccaggctggactgcaatagcatgatcacagctccccgaaaccttatgctcctgggctcaagcgatccgcccaccccagcctcctgagcagctagagctacaggtgtgtgccacattgcccagctaattggtgttgttttttttgttttgttttgttttgtttttttgtagagatggggtctcactatgttgcccaagctggtatctaactactggcctcaaatgatctttccatctctgtcttccaaagcactaagattacaggtatgagccactgtacccagccagctattgctaacattaatacaagtaattttaattaaacatttattacatagcaggtagtatgttaagcacgtcgacgcggccgnaatttagtagtagtagta

SEQ ID NO: 640707 - DNA, 1079 bp, Homo sapiens
aggcctagtacgaggcgggtgttaatcggacgaggatgttacaggagcagggtccccacagtttcaagaggtggtccaggaccctatgatatttctcttctttcgttcttttttttttttttttggagacaaagtctcgttttggtcgcccaagtgggagcgcaagggtgtgatctgggctcacggcaaatccgcctcccgggttacaggtgatctccggcctcagtacttgggaggtgaggtgggagaatggttgagcccgggaggggaggttggtgagccaagatcagtgtcacgtgccactacagccggggtgacagaaccagacccgtggtcttaaaacgggcagtggggtggggagaggtcctagcaatgtcagtgtagcaaccagttaagggacggggactcagggaatccagctccccacagtttcccgtggtgttgaccctaggcattgaatttagcctttctgagcctcagggtttttggtttctgaagataaacggattgggactagggtaaatctccaagtatccatagggaacccgagggagcaacgaactgagcaaacggtacccaggacgtgaacactcagggggaaaggcgtgcaatccgtgagaggctcccgaggcatgaatttgaagggccaggagcctctataacctacagccggtcccccctcagaagcggggtttcgcaaaaccttggtgcctaggcccccttcaaagcggggaaacacacagactatataccaagctaaggttcaagggactctaaatcgcattataaagcgacgcccacaagcataggcctgcagcgagggaacccccgtagacaaaaggaaatccaaagggaaggcctgcgctatggagcaagactggcccctgcgggccgggacgatcgaacgaccgcgtgacggggcgaaaccctggcagacggtctgtgtcgccacacacactgcagtgcagcgcaggacaccgctaaacctcgggctgcagccaggaagcagacagacggcataacacgcgaatgacgccggaccaacaggcaagaccaacccccaacagtcgctggcggcc

SEQ ID NO: 640708 - DNA, 836 bp, Homo sapiens
ccactgtcagcacctcttctgtgtggatgagtggaccgcttacccctactaggtgaagatgtcagcccaggagagctgtctcagcctcatcaagtacttcctcttcgttttcaacctcttctatcttcgtcctcggcagcctgatcttctgcttcggcatctggatcctcatcgacaagaccagacttcgatgtccttatgtgggcttggccattcgtgccatctgcagatactggtccaaagatccgtggcacatctcaggaatcttcacacatgggcatcgccctcctgggattgatgtggagggccctcaaggagctcacgatgaacatcctgggcctgtattatcggagatgctgctgctcctgtatgccacacagatcaccctgggaatcctcatctccactcagacgggcccagctggagcgaagcttgcgggacgtaccgtagagaaaacacatccaaaagtacggaacacaacacccgcaggagaccgagggaccgaggagagcagggacaatgtgcagataccagactagcgcatgatagcgaggaggacaatacccgaaggacatggaaccaaagatacataatccatgaagaggtaacagggatcgaaagacacaaccgacgatgacacagatcaaatgaatcacaaagctttgggtccgggagaaacagaggaccatccagaagctcctagaatgaaaggtggacatagccccaccagcatacagccaggactgggacacacatggggagcgaacccagacacacagtgagaacaatcatggcgccaggacccagacaagagaagccacatcgtaccgaaagag

SEQ ID NO: 640709 - DNA, 337 bp, Homo sapiens
catgatatctgatcacatcatacatagacttctactcaataggcgtcctggtgaccatcgcttcttatacgtgtccccctgcagaaatgggtgctccttgcccgtcttcgttctgtcaatgatgcgtatgtccattgtcatgacggtccaagtacttaagacttgtgtgtgtataagtatggcagatcctttataactcatcgtcagtgataccacccagcctaagagcgagacacacagtgctcacctacaacatctcctcacatcgtcatagtctgtcatgtcagtgtcaaataccagttctttttcctgagcctggaaagctcccagcttcact

SEQ ID NO: 640710 - DNA, 301 bp, Homo sapiens
gaggattaagcaattttccctgtctccttgtctctgcattgctggagcctcatcgccctgtgctccttcttagccaggcgcaggggctagcttgtcttgcgtaccatcctttcatgtccagatttgcagggtgtcctactggctgatgctcatcttcactgtgctggagctcttatcagctgcatacagttatgtcttatgattgaaaccgctctacttcatcctacgctggagtcagtgtgctgacatgtcggcctgatacctgctgtgtttcaggtccagcctacactggtccaacctc

SEQ ID NO: 640711 - DNA, 158 bp, Homo sapiens
cgcgcgattgctaccataactctcttcttccgtcgaccacttgttggaccaaacgacccgtgcagataccccttcggccataatcccgacctttggttcccccttcccccaagaccatagcggtttgggcacagatttgggatagataaccctatctc

SEQ ID NO: 640712 - DNA, 237 bp, Homo sapiens
  misc_feature (143)..(143): n is a, c, g, or t
attacagatctagcggcggtggagtccgtgtgatctttgtgttgtgtcgggctcgtgtgctcatgcctcctgtgtgccgtcgtgtgttgggaacagttggttcccaccaagccatgctgtgagttccaaaaaaaagggggggnttttttgggggggaaaaaaaggggggttttttgtgaaaaagggggggtttttttaaaagggggggttttgggggattttataaggggggggaat

SEQ ID NO: 640713 - DNA, 372 bp, Homo sapiens
ataaataagaaagatcatcaatgtgctgcggcataacattgatatctggatatcaacatgccttcatcctaaaaccccacaatatttggtcattatgaacctaagaatacatcacaatacgaaacaaacgataaaaacacttcaaaacaaatcttaaaatgttactgaggatctacaaaaaaaacttctaaaaataatgagttcaggaagaattcaagatcaacactcaaatatcaatcgcttctcttttctttctagagacacagggtctcactctgttgcccaggctggagtgcaatggtgcaatcatacctcactgtaaccttgaactcctgggctcaacggatcctcctgccctccacctgccaagta

SEQ ID NO: 640714 - DNA, 1642 bp, Homo sapiens
cttcctccgcatcagcgctatatgtgtgcagccactattgctttctgtccccaagcacaagttaacccttgcagtctttgtaccatggctgttttgtgcatcgtatcagccagctcatgtgcaacaccagcctttcacctgcatgcagtttggccagctcacccattggcagccgaggggccatgcaattgtgctccagtgcacaccagctgtgcacggagcaagatgcagtgcacagcacacatggcagcatcaggcaagcacaggccacacagcagccagctcttcagcaaaccaggaaggccagtcggggcaagcatgagcccagtgacacatgccccccacagtagcagaaccaccccaccacagcaagcatccaacaggcccagcacctagacctccaacacaaggcttctaataaccttacagatcttcgtgaacactcctcattggcacaacaggcttgaccataaccattacactttgaccagccttgcatgaggaacacactcacttcaacacctccacactcctccgcatccctcacacacctcggacacccattgcggcatttgcgggcaccaactcgcaacacacctcctggggcagcaactttatcacttcatcgcaatgcaagcgacatgcacatcctggcaggcccttcaccggcagcacagccaatggttgcagcccatggttaggccgagcaccatccaaggcacaagcacaggcaaacgccaggaccaacgaggttgctagccccattcgcaagcaagacacattggcactcgtaaatgacttccaatatcaacacaaacacaaacttgagtacagaccacccttttgaggcggaagaccagatgaaacacgccagttgggttatacttggtccacccaaccacttgatcacatcaaacacccactcccaaccgatggtcacacaccccaaacaagagagttgtacgcacccagataattgtcgtcactattggacccgactaggacactaccagtggaaggcgacaccacaccaactccacaaacggacagcctaacgtgtccacacacacgggaacgtcagcttgggaaaggagcgcacactcaaccgaccccgcgaaacagaacaagagccgacgatacgaagacgtctaccccccagaccaccgagcagggcgacgcgacgaaccagtcgcacgacaagatagtcgtcgcgtgcgacaacgccagtcacaagacaagaggacccacaacacctgatgccacgccacaccgccaccgaccaccggagctccccagcaacacacaactcgagacgacaaagctgcggagacagaccgcacacaccagccgcacgggacacacaacaaacactgaaagagacaccagagaccaaacgacgagccgcacaccaggtcacggcgcgagcgagcgacaaacagcgaacgaccgcaaccagacgagccgacaagagcccagacgagaatacagaccagcgagagcgacgagacacacgagagacaactgacacggagacgtaacgaggacacacaacacagcgcgacagaacaaggacacgccaccgcagacgcacaagtgacgagcaccagcgagacaggcaggaccagacaagaaggagcaagac

SEQ ID NO: 640715 - DNA, 748 bp, Homo sapiens
tcacccaggcgggagtgaagtgtcacttcttggcccaggctcaagttgcaggtgtcgcagtctcggttcacgtgcagcccccgccctcggggtttcaggcgattctccgtgtgttcagcctctccgagtgtggcgtgggataatacccgccttgcgggtataactcgggctaatttaaatatttctagtagagagtggggtttgggccagtgtgggccaggcgtggtctcaaacctccgtgacctcagggcgagtccgcccaccttcagtttcccaaaggtgcggggattataagctggagccaccagtgccgtggccgtttttgtctcttatactgttttactttctctctaaagttttttataaattttcttggagacaagagtttcgctctattatggcccaggcgtggagttgcaggtggcgtggatctcggcctcactgggggcctcggcctccggggtctcggggcgatctctctggcctcaagcctccctagtggtgctggggattgcacggctatgtgccaaccgcgcctgggcttacatctgggtcattctacagtaccaacatggggggttcctcccatgttgggtcagggctgggtttcgaaagtccccggaactcagctcgaggtgatcacagcccacctgtggtctcccccaagtgctgtgttttggcagggtgtgtgaccaacggtccccgggccttttatctttcttctaacggtttcctttaggggacctcc

SEQ ID NO: 640716 - DNA, 672 bp, Homo sapiens
cgcagtggtgacgcctgtaatctcagcactgtgggaggctgaggtgggcggatcacttgaggtcaggagtttgagaccagcctggccaacctggtaaatccctgtctctactacaaaaaaattacccaggcatggtggcagtcacctgtaatcccagctactaaggaggctgaggcgagataatctctggggagtaatcccagctatgaaggaggctgacgcggaggttgcagtgagccaagatttcgccatgcactccagcctgggccgacagagcaagactccatctcaaaaacaaaaaaaaaaaaaaaaaacaaaaaagaaaaaacagttgggtgggcgcggcgtggggccagagaaagaaggtttctataaaaaccatctcggtgtggtggagcgggcgcggcaccccacagtggagtgtaactggcgagaacctgggcgcaaaagtggggcaccaaagaggaagacccggcgcagaagaccaattggtccgcgggcttcccccaccaaataaaaaaacaacagcgcgggcggaagcccggggcggggttcggaacaaaactccaagaagggggttccggacggcacacacagcggggtccaacacaacgcggggcccaggaggagccagagataaaaaatacgacaggcgacgcagggggtagagcg

SEQ ID NO: 640717 - DNA, 485 bp, Homo sapiens
agagattcccaagatgttcgaagttctcctggacctgaactctgtctaagaggcttacaacgaaattgtccacctcgttgaagagtcaggccacctggattgcctggaagaagactaagtctacctctctgtagctgttgatgtggcctgctatgcggcggatttagtacaatttgaaccggttcacctctttgatggagagaaaggcgacacggtcggagttctcggctagctccaccacgtactgcaacagaaacactactactactttcagctagatcctcaaggcctggcgcgacaagccagcccggaacaggtagtggtatttgcggtactaggcgtcccccgacctgtcccctgcggccccggacccgtcaattcaagttgccgttaacagctgtatacctactctcaggcggccgtacgtgctagctacatgtgggcccttaacgcccatatgagtgacgataatcttaactcaggcc

SEQ ID NO: 640718 - DNA, 401 bp, Homo sapiens
  misc_feature (37)..(37): n is a, c, g, or t
  misc_feature (323)..(323): n is a, c, g, or t
tttggtccttcattttaaacttttaaatttccctcantcctttatgtctcccttgccccctagtttcaagtaaacaatcccctcctagcctctgtcacctgctctgacctgagtcacctttagtcaccctggtccgtaaccatctttcctgtctaaacttctcaccccaccactctggcttatacccctgctctctttaaaatagcccagtcagaattagcttagattgtgcggtccaaccctagcccataggggaacaacacagcagtagggggtacctgcatcagggataagaacccattcccctcccttgttccggtgtntctcgccattgcaccatccatgagacgcactcttgtatagaagtaaaattgccttgctgagaaaatgtaaaaaaaaaa

SEQ ID NO: 640719 - DNA, 123 bp, Homo sapiens
taagacgactgaacagctgcttgtaatgtcctccctgtgcccggtgacaggctccagggtctggcatccctgctaagggatggattaacttccttgtcctataagtcttatagatgtcattta

SEQ ID NO: 640720 - DNA, 100 bp, Homo sapiens
agtgattaacatacattaagctttcttcgcatcaaagctaattgaaaccgtatattagtaaaattaaaggcagagctgtagcagttgaacttggagagtc

SEQ ID NO: 640721 - DNA, 1735 bp, Homo sapiens
  misc_feature (421)..(421): n is a, c, g, or t
  misc_feature (463)..(463): n is a, c, g, or t
  misc_feature (498)..(498): n is a, c, g, or t
  misc_feature (502)..(502): n is a, c, g, or t
  misc_feature (568)..(568): n is a, c, g, or t
  misc_feature (582)..(582): n is a, c, g, or t
  misc_feature (845)..(845): n is a, c, g, or t
cgacgacttgacaaccaaggccctctctctcgaaaccataccactaacgtacaccctgctaggacttgttatgaagggacatagataggtccgtatcaagacgggcaaatgcaccagtagagtagtgccgtcgttcacgacgcccgtgtgtcttcaaacgaattggaatccagtgtcatcgctgcggtcttcgaagacctattgacagtccatgtgtggcgcatgcctcgaaggtgtaacggtaccaagacttgagagcttgcataggtaggtgcatccggtgcagtgacttcaatcaggaatgtgggaactatatggtactgcgggttccgcacggaatgactagctcggggacgaaccaagggcccttgcataatgttggccgtgcacatagattggcatcgactatgaggaaatccgnagctctctcagctgagtgttgtgttgagacgcaagactcccnaggctgcagccgcttctctctgctatccggtcganttcnttgctgagcacccgttgaggatggtccttaacttgtgctctcgtgtggagcggactttccgcatgntagcgcacacgganttcttcccactaacactgttaccctgaagactcacctgctatacagtactcggggtccctggagtgttgcgagtcgcgtggttcggggcaaaaactttagcaacatggtttgaaggggtagccgtggagaatttcaatagagaagacgcaccaccaccgttggctcagaggtgactacaaccaggagtacgtggccaactcccatagggctgggcgtgccctgttcgcaaatgcaggggatgccctttcctagaggcctcgtntttgttgcggttcccccccggatatccaacacaacacgcaattctcaatcggggtgagaagactgggggcgagacaccatggtgggagacccatacctatttggtggctcttacggtgtgcggcaacacaccgacacgccaccatgacatcggaaggggttgacctgcgacaggcctttgaagttggtagggcccccgcccagccctttgccattgtagggggggggatttgaatacccccgttgaaccacttggcgccagcgcttggcgttttccaaggaaaccttacgccatgcttttctaaacctttgttgtaacccacttgtgggcgcatttctgaggaatcactctttgagggtggactatgccaggctttccccggcgatttgcgggcgttgaaggccgaatctgccaaaccttgaaatatcttacccaattgagaaaaaagcgcgatgtatatggccgttggtcctgaggccctctgtgaaaagttgcacgggggcgcccggacggataggtggaggtgacactggtcctttgcgcggtgcaatccgtttgagccaccggtgggtgttgtggccacaggggttcttttggccctggttaggcaccaggttacctgcttgggttttaaaaactgctccagtttgaaacctttaccaaaattttcccaaccaaatggtgtcaacaggggcggcctgtaaatttgagaggtcccgtccgggactcaaccacgaacaagagaagcacttaaaaggggaagagaatgcacataaaagggggaaatattgcaaggacgcccacgtgtgttgtttcaccggggtggtaaaaaacatgagacggggggtacctccaaaagacacgcgaacacgtaggaattggtcagggca

SEQ ID NO: 640722 - DNA, 158 bp, Homo sapiens
taccatcactatacaaactcatgtatggcagttgccctgttgataattccagtagcatcataataaatgtccagaagcatcagtaaaggctaactcaaaggattgttggaacgtcaaagggataagatctagcttaggactaaaggtaagtgcaggca

SEQ ID NO: 640723 - DNA, 930 bp, Homo sapiens
tacttgctgaagtcgtctttgatggtaggcggtagggtatatctagggcgtcgcgctacattctcaacctccctgaatgacgagattaccgagcgcgcttgcacttgtaactatgcgcgctaatgtagggcctaattgataacatgctgccgtcgtgcctaggatgaatcagacctagagatcgcgcattgcgtattcgtcaagtcatacaacatatggccgtcgagtaggtaacagccaatgctcatccaagatgcgctctgaaggctactagccggcgcgagtccatgacctcgagtatagtcggccactggagcgtgtaacaattccctcgaatctactagttctgacctatgcaaaacctcatagagcgaaccgaagctgctagctctagccagtcggctagtcaatagttccctcttctgcaaggtgagcttctagacatcgtactcggcactaagtaagctcctttggagtcgcacttctatgacgagggcgctcagctgagccgtcagccttaaacgccccgacgtaatgtaatccctatcgtgggcagaaactcgtctgtgtcgtagttaaccccacgttctccgtgagtcaacactactcacgtcgttggcgtaccttgacatgagatctcacaacgataactatgtcacagcaccctaatagctttcccgtctacactatttaccaataaggacaaatgggggcgcactcacccagccagatttaaacagagtagtaaagacccccggtcattcacaccggaaggaaaaactaccccttccatggtttgcattacaggctaattccccgcaagttctcctcgcttagttgccttcaaggcccggaagaattcaattaccgggctttttcccttccttatgaagaaaagacctggtggacacacaagccctggaaccgggg

SEQ ID NO: 640724 - DNA, 445 bp, Homo sapiens
  misc_feature (68)..(68): n is a, c, g, or t
atgtttcctgttgattttgatgacaggttttgggccccattggtgggactcccacaaggcgactaggnagccgaaggagagaggaggaccaaacctggtttccactccaacccctgttgctttttagctgcgcgatcctcctgtgtactccccccatgacaacttgtaaaatggagctaatggtaaagatagggctaggccgggccctgtggctcgggcctgtaacccagcattttgggaggctgaggtgggaggatcacctgaggccaggaattcgagaccggcctggccaacatggtgaaactctgtctctgctgggaatgcagaaattagccaggcatgtggcatgcacctgtgatcccagctactcgggaggccgagacacgagaatagcttgagcctgggaggcaggggctgcagggctagatcccgtctcaaaaaaaaa

SEQ ID NO: 640725 - DNA, 1371 bp, Homo sapiens
  misc_feature (446)..(446): n is a, c, g, or t
  misc_feature (725)..(725): n is a, c, g, or t
  misc_feature (1092)..(1092): n is a, c, g, or t
gctagaacgagctggaggagtctgctctaccgatacagagccttcgagtcgtccggggccgccattagcaactccacctccatccggtcttggtaaatggccttcggtcccggcctatgactgggtcccagtcgggtcagtagcaggacccccgtagaagcgcccatggagctgccccatttttcgggccccggaccaagtcgctcggatcgtctgggcgcagcgccgctcgtcatactccgtcccttcaatgacggagtttcgaagaagactggagggcggcgaggatcccttaagatccatcttttatcagatgttcgatccgagcctccattcctgaggatcgaatagacggtgtaccatcggtgcgtggcgctccggtgagagggtccgcggacagagatagacgaggaatcgcctgtcgaggagctctatacaagacgcgncatatcattcgagcggacgcgttgtctggaggactccgggcggaacgccggtcatctctttgggacagggagtcctaggttcccatcgctttagctatagcgctcggtcgctttccacgactcgcagtggcctgccggcgcaagttctttctttgcttgtccccgccggtcttgccagagcggggcccaaagcgtggtccacgggagctgcctgcacggaggaagggaccccgaaaagggaagaacttggcttatacgggtggcgccgtgcgcaaggcnacgggcgggtgttcggtctgcccttggggaaggggccccaaaggagggaaacgggcgtcccgccccaaaatttagccggggtttattgctggggagcccggggcgcgtggacgggggaaccacgaaggccaacgcggtgaactttccggcgcggtagaaagggcaagagcccggggatccctcggcgggccaacaatgcgttcgcaaacacgtggatctccccacaataaagtcccccggggggacagggggcagcacgcgggtgttcgtttcgcgacgcgggatccccccaagaaacagatcccggcggtacaagagtattcagaaagaacacccccccttcttcctgtgagagcagcagatgacnacaccataaaggctgtttttgtcgccagctgcgcggaaacacccaccgggggatactacatgcacctcgcgacggggatccatcaaacgagggagcagtaatacacgaggagggcacaaacgtgaagaaggagtgcgagcacaagactcatgatcacccaccaagatgatggactgatcacgatccagatataaccacaccgtcgtaggtgtcgagatcgtatcgactcagaacagtcacacggtcatgaagaaagccacgcgacgccttcatacgtgc

SEQ ID NO: 640726 - DNA, 251 bp, Homo sapiens
ctacgacctacttcatttggaactatgattgtggacttaccatcatacactatatggccaccatgtaggcggatgtgtagtgagcagggaagggaactttcctgccttatttaaacctgggccgaggattcgtggaatcctgcttgatcacgagactctagaggccacaaaactgcatcatactatcttggacatgcttcttgaccacgttttttattcgttggttgagtttttatcagcgcctcgagtgt

SEQ ID NO: 640727 - DNA, 91 bp, Homo sapiens
taggcacgaggttttttcttctgaacgtgtgtcaccatttattgtagtttgcgttaggaattgaacagaggacattgtctgtggggggata

SEQ ID NO: 640728 - DNA, 884 bp, Homo sapiens
attctagaggccgagccgggtgcatcatgaggtcaggagttcgaggcgagcctggcccaacatggtgaaaccctgtctctactaagagtacaaaaaattagccagtcattggtggcacacgcctgtaatctcggcatagctcaggaggctgaggcaggagaatgtgcttgaacctgtgaggaagaggttgcagtgagcatgagatcgtgcaattacatgtccagctctgggcgagaagggtgagactccatcgtcaaaagaaatcgaaaatggtgaggcattggacgcgtatatgaggtgtggctaggggtggagcgccatactaggagaaatttgcctgattgataagccttgaaggatgcttgtggggacgaagtttacacctggggctctggagtacgtggggtaatagaggtcacgaaagggaagaatgggttgttttgactcgaataaatcctatattgtaaccaatgagggaccgcaagtagaggaagcgatggcgcatagtttcgatcaaaaacgcgggtggggtaaagaaagtgggcacacgggagtaaagtgggcctcgtggtattgacagagtaggaccttagatgattgtggggctcatttatatgggttagagaaaaggggagacttttttgggagagacaacactttgggaaagtagccttcaggcggattgactaggggagaatgaggtaggtgggcaaaaagaggaaaaacgcattggtggttggcaaaagaacactctttaaaaaataagagttgggccaaaaagaggtgttgtcatgttagcttggacgtgggaaaatttttgagtattattgcagaaatcgcaagggaaggttaggagatgacaatgggccattggagcctggagg

SEQ ID NO: 640729 - DNA, 237 bp, Homo sapiens
cgatgttaaccaaatgtacaaaattcagtaatcctcagttatcaacgggataggttccaagacccccagtggatgcctgaaattggctaatgctgaaccttacatattatatgttttttctgtacatatctatgataaagtttaaattttaaatgaggtacagttacaacaataacagtaaaacaacagttataacaatttactgtaataaaagtcatgtgaatgtggtgtttctca

SEQ ID NO: 640730 - DNA, 151 bp, Homo sapiens
tagtcactgtatgtcatactgtaaaacggtttccgaaaaacaatctacttcaggatgatatttggcttattttttcctcttacatcatgctatgtgtcagtctgatcatttgacaccggaaatttcagttgttattctagctacgttttga

SEQ ID NO: 640731 - DNA, 227 bp, Homo sapiens
ggacacacccccagggtggccagcggcagagccagcagacacagcatttctccttgagcgggtcttcatctctgcccccttctcttacaaacccctaatcaaggatcttagccttaagatcttcgagggacaaagccttctcatcacaggcaacacggggcacttgcaagacctctcttgcttccgggttctaggtggccctcttggacgagtacacggggctcagt

SEQ ID NO: 640732 - DNA, 733 bp, Homo sapiens
tagttcgtgacatcacagtgccaagtaggaaggggcccctaggataggaagcgaccacgtgggaaccagagcctgatattgtggttcctgtggggaaggcagggtaagcagatttggattggctggctgcaggagttgcagaggactcaggtatcggggctatctctagttgtcttgtacctggtcctgggatgatgaaggcagaggactgctgccttctggagtgtaaaaggcaggagtagaagaggtgattctcagtgtgggatctggattgttaaggtatgtatgaaacgatgtgctcctgggtgagtggtttgctgtctcttcaaggaactggctagacctgggggaggggcagtttctccaccagttcagtgaggcccagatggcagagctcagaaatatagaaccatgaatgacaaacttaccggttggggcgcggtggcttatgcctgtagtcccaggcaccttgggaggctgaaggtgagccgggtcactgaggtcaggagatcgagaccattctggcccaagactggttgaaaccccgtctctgttagatatacaatgattggtgggtgtggtggcacgcaccgtgtagtcccgggctgtcttgggaggctgaagcaggagagcgttgagccggaggcggaggttcggtgaggcagacaggatcggcatggcgtcaggctgggatacaccagatctgcgtcccagacaaaaactccatcccacc

SEQ ID NO: 640733 - DNA, 1622 bp, Homo sapiens
  misc_feature (1243)..(1243): n is a, c, g, or t
taattttaccaaaagggtaggccccgtttataaaagtcacaccaaactgactatctcagggtgactcaagaaccacaaaaaacccatttctccttcacttctggagtccgggggtaaatacctaaaccaagcaagtggtcacgtggcgtgggggtccattcacagggtttacaatgtttttcattggaggtgcaatctggggactggggtggatggttggccagggtagggtcaccactcaaagagggtcatatggaatgtgtgggcgtggtgggacgcattgggtcctcaaagagtcactcgggagaaacttatttatcggagatacttggtgttaaaccagggcctcactcaaagagaagcgcggcgccacgaggatattgtggtcagagtgtgaaacacccttgtctccgagaaagagaataacactctcctcgaggacatatttgtggaaacaagggtggatacttcgaggggggcactcgcgtggagagtggcaaggcgtgagtgtgccctctctctaaatgtgagtgcgtgtgccagaggtttccactgtgtgagagagagtctcccaaatctcacccctccgtgggtgggggggggctataaagagcaacgagggtatcatcatcaaggggggatatccgagaggtgttccaaaacctgcgcggaaagagtgcagatatactacacgaggtgtgttgccgaaatagaacataaacggcgcagattaatataatttcaccaagctgtgggtaccgagagacagaggggcggttcggaaaacatcctaattaacaaatcatcccccccaagggagggttcaccctacctccacaggagggaaatcttcaccccaaaatatacaacagacagggtgggcgtagaaaaacggaataaagggaaccatatggaggagaataggaccaaccaaatagaggcgagcgaacgccgctaatctgcggaggagaaacactgttgtggtgttggttccctccacccacggtcttggaagggtggtgctgaggccacataggacggaggactcagtgaggagagggggacccctcctcaagcagaagaagagacgaaaacacaaaactcccacatggtggacgactccacgaggcacaagaagaagagtgtggtctcccatagaacgaaagaagtgtcatcattgggagcccccaccgagatcaagatacgtgataaaaccacaagccccccacgaggaaaatggaangcgctccccttcggcggcgacgacaaacaacctctataaacaagagggagcaaggatgacaacacaacacgaaaatatctccgtactaggcaaggaaaaaatgtctcccagtgaggccaacaacacgggccccaattaaacacacttacgagagacaccaaacgagagtgaggcgggggcagctaggaaaaaaaagcgaacacaggaggggaaggacgccccacacagtgagatgggatgtgggtcggcggcagagcagaggtatccctcaaaagagggaggctcccgacgaaaagctgagtaagagagacccaccgtgcgagtgagctctcccgaagagagcacacaaaggaggacgcgaagcagcacagagtgatgg

SEQ ID NO: 640734 - DNA, 118 bp, Homo sapiens
agtcaactgcaaaaggtcaggttggaagctgtagggaacatcgccaataagcccacctactttgacatctatatggcagtgagctggtgtggttgacattggtgtggaggtggaagat

SEQ ID NO: 640735 - DNA, 227 bp, Homo sapiens
  misc_feature (5)..(5): n is a, c, g, or t
ggtangatgaagacaagtaggttacagagtacaaacatatagttagatataattgaaattcaatgtttgatagcagagtagggtgactacagttaacaaaatcatagctgggtgatggacactctaaatactctgacttgatcacgatacattatatacatgcaacaaaattttacatgcaacctatcaatatgtacaaatttttctaaaaagctcagcaaactgga

SEQ ID NO: 640736 - DNA, 128 bp, Homo sapiens
gcaaaaattagcttggcatgattgttggtaccttaattccagctacggtaggcttaggcaagagaatcacttaaccccggaggcagagcttttagtgagcccagagtttcgccacttaactccagcct

SEQ ID NO: 640737 - DNA, 107 bp, Homo sapiens
  misc_feature (77)..(77): n is a, c, g, or t
  misc_feature (107)..(107): n is a, c, g, or t
gatcaccatggcggctgggacctgtacacgtatcctgaaactggagggccttcaagacgtctacatcgctgctcagntacagcgggggctcaggtaccggggctctn

SEQ ID NO: 640738 - DNA, 140 bp, Homo sapiens
tgctcatagaggatcccatcgccaacaccagcctcctttctgcctgccttctacctgatcccaccttcagcgactgtctacctgcccatgctggagaagtagctaggtatcccacctacagtgccagtgctatacccagg

SEQ ID NO: 640739 - DNA, 863 bp, Homo sapiens
  misc_feature (506)..(506): n is a, c, g, or t
  misc_feature (594)..(594): n is a, c, g, or t
cacggtgggtcacgcctgtaatcccagcacttgggaggccgaggcgggcggatcacctggggtgaggagttcgagaccaccctgaccggcatggtgaaatccatctctgctaaaaatacaaaaaaaaatgtggccgagcctggtggcgcacgcctgtgatctcagcctcccgagtggctgggattataggcatgagccaccatgccagctaattttgtatttttagtagagacggagtttcaccatgatggccaggctgggtaatgatctgtgggatgtggcatgtctgtttctggtagcatttttctattattatgtgtgctgtccatgtgtttgagatgttattgaatgcttgattatagctacatacattggttgagtcgcatttatgtggtcttctaaggggtgttgggaatacatgccaagcgtctataaagatgcattgattggatgtgtgtgtagaaactctttaggcattcatttcaaatggtctgagactacatatnattagtcccttgatttttctggcagttgttcaaaaaagaatatattttcatcaagtacatgtggagtgtgtctggtaatcggtgattnaggtatgagttggcattgttggatatctatgtattcgaggctcaggaatttttacggtggctttagtacgagtggtaggaacagaagtagtagtagtagtagttgttgtatctgttatatcccttttatattctaaaatatcttaggctgcgtgcattgcctcacacctataatcccagcacttcggaaggtcaaggcgggaggatgacttgagaccagcaacatagggagaccccatcactacaaaaaaagtcgacgcggccgcgaat

SEQ ID NO: 640740 - DNA, 546 bp, Homo sapiens
  misc_feature (358)..(358): n is a, c, g, or t
  misc_feature (492)..(492): n is a, c, g, or t
  misc_feature (520)..(520): n is a, c, g, or t
cacgaggcgccaggctggagtgaagtggtacaatcttggctcactgcaacctccacctcccgggttcaagcaattctcctggctcagcctcctgagtgctgggactacaggcgcgtaccttctttagtagagactgggtttcaccatgttggccaggatggtctctatctcctgaccttgtgatctgcctgcctcagcttcccaaagtgctgagatgacaggtgtgagccatcagacccagcatttttttttttaatttaaatttaaattttttttcatttttttgagaggttttttttgttttgttttgttgttgttgttgttgttgtttttgagacagtcttgctctgtcacccangctgggagtgcagtggcatgatctctgcaacctctacctcccaggttcaagcaattcttgtgcctcagcctcccaagtaactgggactacaggtgcacgctaccacacctggctgattttttttgttttagtanagacagggtttcaaccatgttgcccaangttggtctcaaactcctgagctcagg

SEQ ID NO: 640741 - DNA, 128 bp, Homo sapiens
acatgcagcagcagtagtatggcagcggcagaagatattaacttaggaaacaaagctatagcaggagaggagagccagagcaagtgacagggcaagctacaggttacaacagatattgtcgaactaca

SEQ ID NO: 640742 - DNA, 339 bp, Homo sapiens
atgagctgaaattgtaacttatgtttaaaagggaagcagagcatataagttaaaaaaaaattgcagcttggccatgtggtagaaaagaaaaacccattttatggggagaaattcaagctcgctgcagaaatcttcttaagtaatgaggagctaaatattggcaagacaatggggatgacttcaggccatttcagagatcttcaaggaagcctcttccatcacaagcctggatatctaggaggaatggttttgtgggccaggctcagagccccactggtctgtgcagcctcgacagggtgacctgtattggtgttgcttcagctccacccatgggtcctt

SEQ ID NO: 640743 - DNA, 1055 bp, Homo sapiens
  misc_feature (240)..(240): n is a, c, g, or t
  misc_feature (271)..(271): n is a, c, g, or t
  misc_feature (335)..(335): n is a, c, g, or t
  misc_feature (337)..(337): n is a, c, g, or t
  misc_feature (351)..(351): n is a, c, g, or t
  misc_feature (373)..(374): n is a, c, g, or t
  misc_feature (396)..(396): n is a, c, g, or t
  misc_feature (422)..(422): n is a, c, g, or t
  misc_feature (432)..(432): n is a, c, g, or t
  misc_feature (491)..(491): n is a, c, g, or t
  misc_feature (512)..(512): n is a, c, g, or t
  misc_feature (514)..(514): n is a, c, g, or t
  misc_feature (549)..(549): n is a, c, g, or t
  misc_feature (580)..(580): n is a, c, g, or t
  misc_feature (622)..(622): n is a, c, g, or t
gcttccctgcgccaaagtgagccagtcagcccaaccatgctcagggatgggcagtccatcattcacaaacaccgcagggcgatgaagaagcagaggaagaacaagaagagcaaccttgaagccaagtggcagactatcacaatcttcaggaagcagcatagtttgatttttttggttgatgcctccaaggctatgtttgaatctcagagtgaagatgagttgacaccttttgacatgagncatccagtgtatccaaagtgtgtacatcagntaagatcataagcagtgatcgagatctcttggctgtggtgttctatggtaccgagaaagacaananattcagctgaattntaaaaatatttacgtcttacanngagctggataatccaggtgcanaacgaattctagagcttgaccagttnaaggggcagnagggacaaaaacgtttccaagacatgatgggccacggatctgactactcactcagtgangtgctgtgggtctgtgccaancntctttagtgatgtccaattcaagatgagtcataangaggatcatgctgttcaccaatgaagacaanccccatggcaatgacagtgccaaagccagccgggccaggaanaaagccggtgatctccgagatacaggcatcttccttgacttgatgcacctgaagaaactgggggctttgacatatccttgttctacagagatattcagacacgcatagcaagacggcatgaagagaccccaagggatcaacagagagagaaatacaagcacaggctagaagaccctgtgcgcagaaggaccagaccacaggagaacccaaggaacaagcgaacaccataacgcacagggtacaacggctgaaacgcctcaaacgaccgcatacagcagaaaccacgagggacaattaatacaccgtggcccaacaaagggaccaaagacatcataccagataacgcactactcaggaaaacacactgacacagcggcacaccaataccggaccttatagacagtacagacggctgcacaacaaacagcaacag

SEQ ID NO: 640744 - DNA, 595 bp, Homo sapiens
acattagttctgagatagcgaaaaaagacgcaggattcccacagaagagaacctgggaagatggtatgggccttggccagtggagtaggatttaagcagagaacgggggtgaccggacaggagagaaggtgacccagtgcatatgggaaaggctggatcgcagctccggacaccaggtcggtctcttggttctccaggctaattcctcatggcaaagcaccctattgtggaggaggcaatattaagggaaatccagacggtaatgggtggagagagacataaagatggatgatatacaaaatttaagggtgagggaaactttcatttatgagagcatgcggtaccagccggtcgggtcctgggtcaggcgcaaagccttagaagatgatgtaatcgagggcaacccagtgaaaagggggacaaacataatcctgaatatgggagggatgcacagactcgagttttcccccaaacccattgaatttactctggacaatatggcaaagtatgtcccttaataggtacttccagccattgggctatgggcccgggggctgtgcagagaagtacatcggcatggtgatgatgaaagcat

SEQ ID NO: 640745 - DNA, 893 bp, Homo sapiens
gggagaggcgccggggctgccgcccggtgctcggcgcgctctcgggagccgcccgcccgctggtcccgcagccttccgggaggaagcggtgccggcagcgtccagggcgcgctctcgggcaccctcacctgccggcgcccggccgcttacccggcagggcgtgcgcagggtagggtgcgggaccggggggacctggaggcagaggggagaaccggccgtccgcgccgcagcacagccgctgggagcgcctcagaccccgcgcggggcgccggctccatggcgaccgggctcggggagccggtctatggactttccgaagacgagcccgggagtccatgatgcatgtcacgtctgggtcgcgcggctggagacccgggactgcggagaagccggatcgtttccccctggaactttctctctcatgattgtgtggatcagcaggcgctcagaagcctgtgcgtgcttatcccggcgggaatgggggacacgctgcgtgtgtccctcccctcgttttgcaaagtctacggccaggattgtggatttcggagcctcggtgggggaggtgttcaaggctggtggcaggtgctcctggaaacttggggaggaagcttgcagccctgccattttttcctcccgaggattcaaagcccggcacctccggggtgggtggggagaggaaagcttaattgatctcttttattaataaagcgactgaataagtccacgcctcccaggcggtcggtttcactggacaagggcttttgtctttaccttcacctctcttctttccgtgtcttccattccccccttttgaaacagtccttgctaaattaactgcctagtcctctctcgaccgagccacgctcgggtcctatgggattgttggtctgcca

SEQ ID NO: 640746 - DNA, 720 bp, Homo sapiens
gggagaggcgccggggctgccgcccggtgctcggcgcgctctcgggagccgcccgcccgctggtcccgcagccttccgggaggaagcggtgccggcagcgtccagggcgcgctctcgggcaccctcacctgccggcgcccggccgcttacccggcagggcgtgcgcagggtagggtgcgggaccggggggacctggaggcagaggggagaaccggccgtccgcgccgcagcacagccgctgggagcgcctcagaccccgcgcggggcgccggctccatggcgaccgggctcggggagccggtctatggactttccgaagacgagcccgggagtccatgatgcatgtcacgtctgggtcgcgcggctggagacccgggactgcggagaagccggatcgtttccccctggaactttctctctcatgattgtgtggatcagcaggcgctcagaagcctgtgcgtgcttatcccggcgggaatgggggacacgctgcgtgtgtccctcccctcgttttgcaaagtctacggccaggattgtggatttcggagcctcggtgggggaggtgttcaaggctggtggcaggtgctcctggaaacttggggaggaagcttgcagccctgccattttttcctcccgaggattcaaagcccggcacctccggggtgggtggggagaggaaagcttaattgatctcttttattaataaagcgactgaataag

SEQ ID NO: 640747 - DNA, 275 bp, Homo sapiens
cagtggctcatgcctgtaatcccagcattttggtaggccaaggcaggaggattgcttgagcccaggaattcaagatcagcctgggcaatatagggaaacctcatctttacaaaaaattgaaaaagtagctgagtgtggtggcgtgcatctgtagtcccccctactttggaggccaaggtgggaaaatcatttgcgcccagcgggtgggggttacaatgagccaagatcatgcccctgccctccagcctgggtgacaaagtgacactcctgtctca

SEQ ID NO: 640748 - DNA, 828 bp, Homo sapiens
ggcgctgccgtaaatcaggcggtctgctcgccgcatcacgcaagatggcgcgccgcggcggtgaacggggcggcaggcttctcgaagctccgggcccgcggcaacctcgggcgctgtcctgcagagccgcgaccggccatgtcaccgacgccaactcaaggcgcgagtgggacaccgtcaaaaaagccccaatctttaggccacgctcgcggcgccacacagctgcgcgtccgactcaagcgaagtgtcttcctggaagctcaacttcccttgcccaacacacaggggacccaagcctgacccaaaccagcagcataaatttcctggccccgcttgcacacatacctgggacgactcgtggggcccccaaattcggacgacagtaccttaacgacaaggacaaccattcccccgcgataccttgtaccgaaggccggcctaccactggcggcccccaggctatccaaacagttgcataacactaaccttctctcgcacttacaacccacaacggggaagaccaagaccatccccccccgcgccaaggttttccgagcggcccctgcagttaagttgccgaagcgcaaagcgctattccgtttctggcgaggcccccgttcaacaaccgcaaattccacgatccgatcatcccctcgtggtccgattggcttacccgcacctacgataaaaaccaccggagagaactggccccatggtaatgactgtatcgcacccaagccagcgcaacccttgggagcaatcgaccgcgcgcgctgtctggtgccctcttgggggccccccaaaagggagggggtaagcacaagtata

SEQ ID NO: 640749 - DNA, 1286 bp, Homo sapiens
gagagcgcgcgaggttcggggagctccgccaggctgctggtacctgcgtccgcccggcgagcaggacaggctgctttggtttgtgacctccacggccaggacggccatcctcatccagcaatgcaagcatcttactctgccagctgactgcctggcctgaccctctctgggctgctggagccgagcccagcctcgcatgactgatgcatatcatccctgacttgaacaaccacgcacagcacgcaactcctgctacatgccctgcaacgccgacccacatctgacctcccgcacccacgcgaccaacctacctcgcgctgcccctgctgctacctgccctcagctgccctgcgccactcggcgcacatcctcgctgcaccaactcccgcgcccacagccccctgcgcccaagcaaccctgcctctccccacagggacacatgccgcaccaatcccccagcccacgggcacgaactccaccaactcgcatcagacgctcgctgccgcctcacaccaactagagcgccacctccaccgcacatggcacttgccgccaacgcacgccgtacaccctctgccgaccaccccaccactcacaagctcgccgtcggcccgcgactgcgcccgcgcgcccctagcccacgaagcagccaaaaaaccaccccagcgctcaaatcaaccaccattggaccacttgacgagcgcatagacaccggagcggacactcgagcacatgaacccacagcaaccgccccagtctgtccttgctacccggcagacacccaacatggacactggcgcggagacatacaccagggcgaacacccaccctatcaaccgcaagagccacccagacacacccccgatgggcacagaccacctaccagcgaacctcgccccgaacaaagcgcccatccacgccgcgccacacccgccaccaccgcgcccccccacggccccccccctcccaccatcggcggcctccaccccaacacgcgcacgcaccaaccgggcaccctgcgccccacccacagcgcaccgtcacccgacaagacggcgctgacacctggaaacacaaagagcaagacccccacctcgcacgaacacccacacggcgcaaccataggaacaccagaatcaacacgcatggacaacaacactaaacaacacaaagaacaccaaaacgccctcacaccgagcaccagcaaatgccaagacgagacacaatggaacgcacacacagaatgacaacagatacacaccacaagcacacccctcaccacccaa

SEQ ID NO: 640750 - DNA, 458 bp, Homo sapiens
agaggatccccctcctggacttaagagagaactgctgctatgaggactgtgctttgctgtgtgggacggtgatctgggcggccaggcgacatctcatcggcagcactttgtcctgcttcatcgcccctccccctgggtggagcgcctacccgagagatcatccgtgcacacgacatggacttcactgacatcatcaagtttttcaatgaacgtgctgagcttcacgatgcccaggagatcctgcggattgcccgggacctcgtccactacgtgcagatgctcattgagaacaagtgagctggggccagtgatgccgcagtcgtgctgcagcctgggctccggcagggagaggtgcatgggagtcaccgcccagacctccccagtctgcatccgagcccacctctgttcctaacaaagcggttgttagccttgatcctttagctcctgcgggtcccgcg

SEQ ID NO: 640751 - DNA, 1010 bp, Homo sapiens
agttgtcgggatcccgcaagatgagtgctgcagagagttcacccgcatagtgggagggtgtgagcttacccataatgatcatgtgatgataatggcggaattgctgagagtttgagggctaattgatgcctagagtatgccgcgaagggtggcgggcaggctgccacaccagacgtaggctcagaatgcgggagagccgcaggtaggggccaataaaaacgaatgggacatgcctgcgccgttcagcgcgacagagacgcgctgacaaggcctgcaacaggagaacccagcgaagaaaccagagaactgagttagaaatgccgtccttgtaagtcttgtaatggtgagacggttcgacgagtgccaccagcttgatcaccgggatatcctgtatatgcactggccgattggaggccccgcactatcttgcatactctcgaccgtttggtacatcaggtttatcacaagggcatcgcacgtccttcccgcttttgggtgctcccatgttagctggtgacaatcggtgcctaagttccgcggaagtatagtacggatagaactctgcctggtatgagtgttctaaagtgtttccggtgacaattgtttaacctgttcgctgacggtttgatacggatacagtatgacatggataattataacaaggttgaatatgaaaggtaacgtgagaatggcctagcggtggtacatcgagcaacagagttgtgcctatcctcgtgccacgggtgtaatttggtactgtgctctcgtgctaggcctccgacgagagacctagcccctttgatgtggatattattcgtcggagttttacatgaagtcccattatggcggttcattagtgacaccacctataggttaatagcaaggttatcgtatgtgccgggtccggccgagcggttgaactcaggaattatttataaggccggattgcgacctacggtgtgagtggactagatggtgtatagtatttcgtgtgtatgagaggatacctg

SEQ ID NO: 640752 - DNA, 646 bp, Homo sapiens
ggcagtgaccgagcttatacccatcgctatgccgatggcagcgacggtcggcagcgtcgacgacaacgggtggatcgcctcggcgacgacgagaacggctatgtgacccgctacggctacgacgtgatgggccgcattgcgagcatcgcctatcccgacggcgacagcagggcctggaacgccaccacgcagagcttccagcaggtcgcaggtaccgaatacgggctgggcgccgggcattggcggcagaccgtggccaccggcaacgcgcgcaaggagacgtatttcgacgccttctggcagccgatcgtgacgcgcgagtacgaccttgccgcggtgggtgcgacccagcggttccagcgcttcgcctacgaccatgcgggacgccaggtgttcgcctcctacgcaggtgccaacgacgcgctcagtaccggcgtatggaccggctacgacgcactgggccggactacgtcggtctcgcaggacagcgagctggggctgctgacgaccctgaccgactatctggcgggcaaccggacccgcgtgaccggcccgcggggccaacagacgctgaccagctaccaggccttcgaccaacccgtctatgacgcgccggtggcgatccagcatccggagggcgcattcc

SEQ ID NO: 640753 - DNA, 1043 bp, Homo sapiens
  misc_feature (442)..(442): n is a, c, g, or t
  misc_feature (797)..(797): n is a, c, g, or t
agcggaggggcgggagggccgggcgccagagcagcggggccagagcagctgcaccatcccggcgttcgccgtgtgccgccgcatgtcctcctccatctcttttcctccgcctccgtccggcgcgatggcgatagccgatgactggactagcgagaagcggaaggcgagatcaggcgtgcgcggccctggacggggcataagcagatcgtggaccagaagggtgacggaacgagcgtatcaaaccgtgcactgagcgagtcttacagcatggatcataaggatccggatactgctggcacacgcctctcgtcgatcttacgttctggctgtcagcatggtcggcatcagctgggtgcggcggactcatcgcattgcttggagccccgtcgtgagaatcgcgtaacagcatccgagacaatatatcgtaacagagccgtcggancaccccagaaggcgcagtctaagttaatctgtatccactgtgagaatttcatacaggtgggaggtacagccagcagacgtgacaagaaagcaaacggaatggcgtggaaacctgtgaggtccatgtcaagaatagtggccttgacggaatgtaaatgccgccattcattaatcgaaagataagtgtgcgctctaaggacctatgcgtacgcgcaaacttctggatggtacgtaatacggaaatcaaaaggatttgcgtatgcgtctctctgtgtgggacattgggaacggccattgagcgagaagggcgtagtgtccacgccggatgattatgtccccttattgtaagcgttccnaataagctgcgtgaaccccatttagggggccccttgggaccgacgacgattaaggcaggctttcattggagaaaattgcccggccgtaaatggcaaactattgcggcggaatttacatgtgaaactccagtgcaaacggaataaggtacacaatctgggcctaggggccagccgtttcaacacgggaacgggccccggattagatccttgggacttggttggctttgcaagagtattacccctgca

SEQ ID NO: 640754 - DNA, 167 bp, Homo sapiens
  misc_feature (8)..(8): n is a, c, g, or t
gagagtantcggatgctacgcctatgacaggtgcacccattaatggaagagatgttatgttccccacctcctccccactaatgcactaaaaagctgcagtgatagggaaaaaattttagggtaggtgtgaagaaattagtaacttgacccctctatcccagccaaac

SEQ ID NO: 640755 - DNA, 209 bp, Homo sapiens
agaaaggaagaaaacccccaagatttttaaaaggattcatagcaccataatgggtccctgagtaaaggatgctgctatgggtgggttcatggccccaagttgatttcatggtttttagaattataattatggattttttttttttcatgggggggggtttttaaaaatataaaaattaggaggccttttttaagccctgtttttcccca

SEQ ID NO: 640756 - DNA, 1602 bp, Homo sapiens
  misc_feature (313)..(313): n is a, c, g, or t
  misc_feature (452)..(452): n is a, c, g, or t
  misc_feature (598)..(599): n is a, c, g, or t
  misc_feature (1163)..(1163): n is a, c, g, or t
tgggtataaaaagttttttatttcaaaatgcaaaaggggtggctcattgtgtaattaatttaattaattaattaacattaaaaagcattttactcctttccctcccttagtgtgcaaaagtggtagacgcattttagaataatttcacacaggtgttgtggaaatgtgtcagtgacaatgtgcagtgtgcgtgcacagacaccaaacacctcaatctccacaaacctccttgtgggtgtggatgtgcttgtggtggatgaggctcagttctcataaagtgtctcagggagtttctcctcgtgagagttataangtctcacaaatatacaaaacacagcgacagcggtgtgctctcctgtgcgactctctctccacaggcggagaggtctcagagggctctctctgtgtgtgcgcgcgcgcgctgcccctctctctgtgtgtctctctctccncattctcctcttatctctcgaggcgtctgtgctcttctctccacaggggcggttcccgggacctataggtcctctatagaagatctcgcgcgagagacgcggggggcgcggctctctatagagagagatatctccccctctcgagnnaggggggcccccaaagcgctatatagcgcgctggtataccccgagggctttttctcgttgtgtctacccacacagggcggtgcgctcccctatatatagcgggaggatgttgcggtaatattatataaagggcttaaagcgcgccatcttggcggcgcgtgtgcgtgtctttctacaccaaccgtggttccgtagtgagcattctgggggcagaacacaacatctggcgtctaaacgcctttgaggggcatccatttgtcggtcgagaaaggggagacacctctttaaaatcttcccttgggggggtgtgggtgcgaaccctaatcaaatatctggggcgcacccaatatataaactcctaaaacgagagaagaaattttaaaaaagaaggacttctaaaacgaggcgttgcaacaatcttctattcaacacccacatatttcttctcaccagcagggtgtggttccctcccacgttgcgtgtggttttcaacacaatcttgaagggttgttgggccatttatattagggcttatgggactaggattttgtgaacagaaacagnttttaagcggacataacaaaggcgggggaaaggtataaatggaggcacatttctcttcgttgggaacacccacatctcttcttttttacactcgcagcacgaggagttggtctgctgaatcattacattaatcaaacaaacaaggggaggcggccagagcacggctggcacacagacagccagaagacgacgtaggagagagcgagcgacagggagcagcggaggacgacggaagccagcgcaacaggagagacgcgcggacgcacggatcaagcagtcgaggcgccgaaacgcgtcgcacagagagagatagagagcgaggggagagaagcacacagaacgaagggtggagaccgacggaacggagcaccacagcacacaccagacgaacaacaactaccagcgcacgaggagagcgagactgaggcaagcaaatgaa

SEQ ID NO: 640757 - DNA, 335 bp, Homo sapiens
  misc_feature (40)..(40): n is a, c, g, or t
  misc_feature (68)..(68): n is a, c, g, or t
  misc_feature (70)..(70): n is a, c, g, or t
  misc_feature (91)..(91): n is a, c, g, or t
  misc_feature (97)..(97): n is a, c, g, or t
  misc_feature (102)..(102): n is a, c, g, or t
  misc_feature (247)..(247): n is a, c, g, or t
  misc_feature (262)..(262): n is a, c, g, or t
  misc_feature (331)..(331): n is a, c, g, or t
ctggttgcagttgaaatgtacctgaaatgtagtcctctgntccttgtaagttcagttgtacttgtccngnacatcttctttgtgtacttgntacggntactngtcagaaaaggtcatttttcaaaagccataggctttttccttgtcccttagtctgtaataatgcatctgattttgatttcctccagagctgtgtttctgtccatcacctgtgtattggccctgtgtttaccactctggcccactnctcacccccttgctnccctggtcttctggagtttgtgacattgatttgaaatggattgggttctcttgagagcaagtgagattnttag

SEQ ID NO: 640758 - DNA, 468 bp, Homo sapiens
atgggagacccagtgctagaggcagtggttcaccctgaggtcaggagttctagaccagcctgaccaatatggtgaaaccctgtctctactaaaaatacaaaaattagccaggcatggtggtgggcaattgtaatcctagctactcgggaggctgaggcaggagaatcacttgaacctgggaggcggaggttgtggtgagccgagatcacgccactgtactccagcctgggcaacaagagtgaaactctgtctcaaaaaaaaaaaaaaaaaaaaaaaaaaggaaggggggggtccaacaaggggccgggggcccccaggggggatccaggggggacggaagaagggaaaacacccgtgggggggacgcggctttgggatttccagagattaaggtcccaaaaattatgaggtatcttttttgggagagaagtggctttttctcgtgtaaacatttccagtcttccaaag

SEQ ID NO: 640759 - DNA, 306 bp, Homo sapiens
tcaggtctgataagtaaacttttaacaaactcttctataatggccttgaaaaatataggactaagtcccagcgcgctggctcacgcctgtaatcccagcactttgggtttctgaggttggaggattgcttgagcccaggagttcaaggccagcctgggcaacatagtgagccccatctctacaaaaaattaattacctggctgtggtggagtgtgcctgtagtcctagctacttgggaggctaaggtcagaggattgttggagtccaggagttcaaggctgcagtgagctatgatctcaccactat

SEQ ID NO: 640760 - DNA, 124 bp, Homo sapiens
ccaccggcaggttgtactcatggactcactgagccagcaattcaactcataggtgtatatccacggaattgaaaacaggtattcaaacaaatgactaggtacccgacatgtcccaggcaacatc

SEQ ID NO: 640761 - DNA, 214 bp, Homo sapiens
agtactgtgtatctattctgagagacaggaggcttctactttgcagacaaaaaaccctacctaaaagtctggctggtcttgagccttgttagacgggatctgaggagtaacataaagccagatcacgagatggctcatactgggattatcaggtttgtcttaaaagttctttatattgggccaggcatggtggctcatgcctgtaatcccagca

SEQ ID NO: 640762 - DNA, 310 bp, Homo sapiens
attggcctgtgtcccagttgtgttatttttcagggaaaatcttccctttggattgagaaagcttacccagtgcctgtgccatcactgtaacttgaaagaaaagaattgtcttttacattcagggactcataggcagaagagattgcagccttgtcttggatgagacttgaacttactacatttgagttactgctggaatgagttaagacttttggaaacttttgaaaaggcatgtttgtatttttctgtgtgagaaggacatgagatgtgggggagggatcagcccccaaagaaatgggggtgcatgctg

SEQ ID NO: 640763 - DNA, 155 bp, Homo sapiens
ctttttaaggaacggggcctcaaactgtaatgggggaaaaacccgttttcgggaaaagggccctaacgaaacccttgccttaaaagagttttggggccaaagcgccccaataataaacccaaccttaagggtgccccgatattcagcttaacggg

SEQ ID NO: 640764 - DNA, 157 bp, Homo sapiens
gcccaaaaaggttatgggggggaaagtttccccaatagggttttttttttggggtccttggggccgggttcccctttttaaaattttcaggcgggtttgggggggggggattttttgggggtgggggggtcaaaaaagggtttaaaattgcctttta

SEQ ID NO: 640765 - DNA, 202 bp, Homo sapiens
cagtttacaacagctcaaggaatagtatgctctaacaaaaaacttcaactgtggcattggcctgaggatcaggcagcaaggaaactgatgttagatgctagaaacatgacgatgcagagaacaatattattatataaaacttaacgtgcagtaacttggaaggcaagtaatatatttaatgcatttgaagctttgtaactgg

SEQ ID NO: 640766 - DNA, 235 bp, Homo sapiens
tggcctccgagcagcagcgcttacctgggtacagtgtgcccggaaggcccatgctttccaagtagttgtggcagcgctctttatgttcctctaaagagcttcgctgtttatagcttcggccacaatatccacatttgtgaggtttaccaactgcagaaaacacaattgagttcaagaccccaattaaatgccagccttctgtgtaaggggaatgcatgcaatacaattattacca

SEQ ID NO: 640767 - DNA, 132 bp, Homo sapiens
cgggggtgcctccccctggcacccggacaccagggattcgaaccagtactctgacggacggccagagactgaccgcggcccgggcggcggggggcgcctgtgaacccgggctgcggttcatgacgcggccgc

SEQ ID NO: 640768 - DNA, 394 bp, Homo sapiens
cggcatgggaaagtgccttgaaaagaatggtaatatatgatgtgggtatgcctccgtattgattaagaaggggacagacttaccttccactgtgatgagttacctgaagctcggcatccgttatggtctgcggcgcttccgaggcgattgggcagcgtcagtcttcagccactaagctaagaagatctgggaaggaatcagagagccttgggccaagagttccaggggctctggaaattggtaccaggtgagttgaaaccagtccctgattttcaggtggggtcccgcacagacgtggacacagcttaaggagggaatcctggggctgtcggcatttcctttgtggcttggggggccagaattttttgggaccttggtatgccaagctccctgg

SEQ ID NO: 640769 - DNA, 325 bp, Homo sapiens
agacatgatacaatcgagctcggtaccgtgcgatcttccgccagacacaggatgggctggttcccgggacgtttgcccgaatggagatctccgcagcgggtggggaacggctcgtctgtgcccacgcaagcgatcctacggcgtggcgaattgaccgcagtctatgtcgaaaccgccaacggttggcgcttgcgccaggttcgcctgggggatcgcgtcgatcaggagcacgttcaggttctggctgggctcgcagctggggaccgtgttgcgctcgacccggtgaaagcaggattgatcgcggcacaagcggcgcgcggcgacg

SEQ ID NO: 640770 - DNA, 207 bp, Homo sapiens
tcgactcagaggatcagctctaatttcttttgacttgcgggcagcgaaagccaccaaagcaataaatgcgatttttttcatggtaatcattaattagaaatataaaactaataaaaaagtccccaatctcaacagtgctgttgggaatggggacctattatttcagaagtacttaattacttgatttctactgatccctagagtcga

SEQ ID NO: 640771 - DNA, 506 bp, Homo sapiens
gggttgaggaaacgggtatttcgatgtctcgagggagtaggttggtgcagttacgagcttttctgttgggtatgcataagttaataattggagctgccaggcagatcgtgacaagagatggacggtcagaggaacgattggaaggacaagggttgttgacctgcctgtactggatgagacattaagaagactggacgtggtgttaggtgccagcctattcctgctgctttcattgacagtattcagcatggtgagcgtaccagcgctacatggccttggtcccatgctgctctgtgacccatcagcttgaggatatacaagggtgtgatccgagctatccagaaatcagatgaaggccacccattcagggcatatctggaatctgaagtcggtatatctgaggagctggttcagaagtacagtcatcctgctcttggtcatgtgaactgcacgataaaggacctcaggcgcctcttcttagttgatgatgtagttgattctctggc

SEQ ID NO: 640772 - DNA, 729 bp, Homo sapiens
ccagctactcaggaggctgaggcaggagaatcgtttgaacccaggaggcagaggttgcagtgagccgagatcacaccactgcactccaacctgggtgacagagcaagactccatcaaaaaaaaaaaaaaatttaaaaaattaaacacaaaaaagggatcttccggggctatccatcagggaccctaggaatggcttttaaaacttggccctggggtattttaccctgttggacgaatgaagggcctatggagggctattcttctggccgggttggcctttcaaacctccttcaaggggtagttccttaaacaggtggtgtttacttaggaagacctcaaaggttacaaccttttaggttactcccaatttttacttggaggcctggagcgcactctggttttcccatggttggacgggtagttggcggccttccccattggtgccccaccggcggacagaactagggttggtggtggtccaggtcccatgcataccctggtaccccagttcctaagaagggtaccgggcggaatccttccctgggttgggacttcataagtttaacgttgggggacctctcctggaaatagggacgacagagagcgctgagcttttttatttagcatgtgcattctacaacggcatgatctcggcgcgtgcgactacatgtgctgacacaatggttgcgcgttcacataaccaacttgctctcacccattgggttttca

SEQ ID NO: 640773 - DNA, 534 bp, Homo sapiens
tatagaggcggggggccccgggcgaggggcggcagggtgtcgggactgacctggctccggcctcgtcgtgaaaccagcgcatctccccgctgtatgcttcctcccacagaacccgtcgggcctcagagcgtcggtgagatgctggccgctgctgctgctgctacccatgtgctgggccgggaggtcaagaggccccggggcgtctccctcaccaacatcactctacgagagtccaagcctcacctgcctggacggtcggccaaccatcccattttgatcaggtcaaagatgactaattgcgattgcaaagattgctctgaccgagccaggcacggttgcctgtctaattggcaaacttccactgcaccaacaactgggttataaagccccttgttttattcccctccaaacgtggttaaaggatagtgttttgtgactttctgcggattggaacagacagagtacaacatgggcgtaattttgtggagaaacaccttgcaaaagaagaaggtgccgtaacggagagagaagtcc

SEQ ID NO: 640774 - DNA, 442 bp, Homo sapiens
agaggagttcagcggtgccctgagaacagctcggtacagcagtgtaatggaagcgatatcgaaacgcttcaaatcccaaaccgatcagctagctgctgatttaggccggataaatcttaaaagatcctgataccttcatccagcatggcatccatgatgggttcgactgttcaccttgtgatcaaaatggcagacccgagctcagggccagtccacgcagactagcaatgccgcgggaactaccagtacctcggcgtcaactcccaggagtaactccagagctatttccacaaattgcaacccgttagggttgcggagcctgggaggacttggaggccttaggagcctgggcttgagctcgaccaaattctctgagctccagaggcagatgcaagagcagtttatgggcagccctgagataatgatccaaataatggccaat

SEQ ID NO: 640775 - DNA, 144 bp, Homo sapiens
tgttatgtcccaactaggtcagaaggctggaggtgggagaatcaccgtgaacctgggaggtggaggccgcagtgagccacatgtgcctggctacttacagtataattagtagagacaggtttcgcgagccaccattgataggcc

SEQ ID NO: 640776 - DNA, 1362 bp, Homo sapiens
  misc_feature (516)..(516): n is a, c, g, or t
  misc_feature (1310)..(1310): n is a, c, g, or t
aatctaactggtgacacgttatcagcaaacggcgggattcatctcagatcgatgcccaataccagtgcacttcatcagtatggagctcgggaagcggtaggttatgagatgatctgagcgccgttcgattaccttatgagagtaggtcggaacagtcggtagtagatactcagttctctatcctgagagctagtcaagtttcctgttccctctgtactaatcacagtccgacgaatcgggtaaccttctcgagtaagagccaggcgagtcttgtgggatccaaccgatgtcacgattctaactgtccaggcgtctctgctctgtgggcttctcacgcaaaaagcatttagtcaagactgaccattggtctccttgtcaacctatcatcacaggaggaacagcaacgccttgggcaaatgcaatcgagtcctccagtggcgcaagcacacagacataaaggctcaactccactgttgacggtcccgtaaatctgacatttcatctgtctcacaaaancattcctcaaaggatcactaatagagcgctggataccagaagcgttagtgcaggaatcacaagattactctcatcagactcgcctggttagccaagggcaactattattgcgtagggtcccactacatttgtaaatattggggttagccttaccagcgaatatggcagtcgagagaaccctggcattttggggcgcccacttaggatttttacagtcagacgtacttagaacttttcaaacggaaaggtaacagtcataagcgaatataaataccgcctagatgtatctacttcacaaacacttaaaagccagttagtgtcaagaggaggccacgaatgacggttatcgtagggaaatttcaattgagacatagtttggacacagagcagttcattctaggacaggcaaccaattataataaagtggtgtatacatgttggacagtaccttcaagaactaggggaacagcagcgttcagcctgggcatttctcactagagtgggctcactgcctttttcacggtgccctttgtgggacaaacatgggtgtaatgtaagcaccccctaaggggcaatcgctgtgtacgaagaagcgcctggtactagcaagacccaagctgataccgtttgatctaatcggcatttatgtgcaccgatatttccgtacattcgcgtgtatgagcaccagagttgtagcgtatcgaaaaataacactcgcattcgaacagaactatttggggtacacggggctacgaaatgtgtgcacagctcaactaaattgaaatacaaacggngcccatgtggagaatcttgcacaagggcctaggtgacatcagtctcataagt

SEQ ID NO: 640777 - DNA, 572 bp, Homo sapiens
  misc_feature (12)..(12): n is a, c, g, or t
  misc_feature (26)..(26): n is a, c, g, or t
  misc_feature (40)..(40): n is a, c, g, or t
  misc_feature (43)..(43): n is a, c, g, or t
  misc_feature (50)..(50): n is a, c, g, or t
  misc_feature (55)..(55): n is a, c, g, or t
  misc_feature (59)..(59): n is a, c, g, or t
  misc_feature (66)..(66): n is a, c, g, or t
  misc_feature (71)..(71): n is a, c, g, or t
  misc_feature (87)..(87): n is a, c, g, or t
  misc_feature (96)..(96): n is a, c, g, or t
  misc_feature (103)..(103): n is a, c, g, or t
  misc_feature (110)..(110): n is a, c, g, or t
  misc_feature (117)..(117): n is a, c, g, or t
  misc_feature (120)..(120): n is a, c, g, or t
  misc_feature (131)..(131): n is a, c, g, or t
  misc_feature (140)..(140): n is a, c, g, or t
  misc_feature (145)..(145): n is a, c, g, or t
  misc_feature (174)..(174): n is a, c, g, or t
  misc_feature (204)..(204): n is a, c, g, or t
  misc_feature (216)..(216): n is a, c, g, or t
  misc_feature (241)..(241): n is a, c, g, or t
  misc_feature (246)..(246): n is a, c, g, or t
  misc_feature (250)..(250): n is a, c, g, or t
  misc_feature (253)..(253): n is a, c, g, or t
  misc_feature (285)..(285): n is a, c, g, or t
  misc_feature (290)..(290): n is a, c, g, or t
  misc_feature (302)..(302): n is a, c, g, or t
  misc_feature (325)..(325): n is a, c, g, or t
  misc_feature (329)..(329): n is a, c, g, or t
  misc_feature (331)..(332): n is a, c, g, or t
  misc_feature (334)..(334): n is a, c, g, or t
  misc_feature (342)..(342): n is a, c, g, or t
  misc_feature (344)..(344): n is a, c, g, or t
  misc_feature (346)..(346): n is a, c, g, or t
  misc_feature (364)..(365): n is a, c, g, or t
  misc_feature (373)..(373): n is a, c, g, or t
  misc_feature (375)..(376): n is a, c, g, or t
  misc_feature (379)..(379): n is a, c, g, or t
  misc_feature (381)..(381): n is a, c, g, or t
  misc_feature (384)..(384): n is a, c, g, or t
  misc_feature (390)..(390): n is a, c, g, or t
  misc_feature (398)..(398): n is a, c, g, or t
  misc_feature (403)..(403): n is a, c, g, or t
  misc_feature (405)..(405): n is a, c, g, or t
  misc_feature (419)..(419): n is a, c, g, or t
  misc_feature (426)..(426): n is a, c, g, or t
  misc_feature (438)..(438): n is a, c, g, or t
  misc_feature (441)..(441): n is a, c, g, or t
  misc_feature (471)..(471): n is a, c, g, or t
  misc_feature (493)..(493): n is a, c, g, or t
  misc_feature (532)..(532): n is a, c, g, or t
tctggcagcccnctcagccggttccntttatttggccggngcnaagatcngttcncccngataccngcccnggggggggggtcacgngatccttcncatttcncagatgngggcccngtntgtgggggggngagattggnacccngtctctggttggcgtggctgagtgaaggngtaaagacatgagcctggcagggaaagggnggggaaccgtcncgttattggttgggcctggccatcngcccnggcnccngtggggcccgggtaagggggggaatctgatcngggcngggagaagaggngtgagccgtggaagccgccttcngccncnncngacggccncncngtccccccggccccggcnncctggccncnnccntnccnggcccntgaagtcnccccncncccccccccccccngattggngaagaggcaacnccnttcccggagtctttgactaaaggggctccntgccggcacaatttctagagcnagggactttccacagtgacggcctcttgccggttgcccngggctgctgttgatttctggctctccaggtcctggatagt

SEQ ID NO: 640778 - DNA, 121 bp, Homo sapiens
ccgtcacagaccctgttaggatggcagaagcaggaagcagaagctgttctttccattttcttcttggatgcacccagtacccttgcagacggaagaagcaggaagcggcagaagcaggaag

SEQ ID NO: 640779 - DNA, 173 bp, Homo sapiens
caaaatcttcagcggtgatgggaatgtgcgctcaggaccagagacctgtatccttggtccattcacagtgcggacccctatcagatgacaggcataaagtaatggtagagagggtctacatcagctgggatccggtattctcctgtggaagtccctgcacgattgcttggcta

SEQ ID NO: 640780 - DNA, 669 bp, Homo sapiens
cggagaagaatactacatcgagacctgctggggaatttattttattttattatttttttaggtcttggttgtactgatgggaggaagaagaggttgtgtggcccgtgtctgaacttgttggcactgccttgaatgtgcctcccttcatgtgctgtgctgcctgctggtgcatgcccctgcatgcctgtgtgtgcctgtgttgcatgctctcctgctgtgcctgcttgtcatgtgtgaatgctgcatgtgctgtgccactttgtgaatccctgtgtgatgctgtgtctgcttgcttgctgagtgctggcatgtgtctggcatgtccaacctgcgactgccctgcaccccactcctgctggtggtgtcccccaagagcttgtgaatgctctgaatgtcttggcttgtggccatgggatgatacatgtagtgtgagcctgcccccttgaagccaacttctgagcccacttcttgtgcccaccatgggaataattggtggtggtccctgctaagtgtcatcactggagtggggtcgtgggaactatcagtgatttgaccctgagtgtggcccagaatgtgcctgccaggaggtgttggagaaagtcaatgctttttgcatggatggctgtggcagtctctagcagaggcaccccacttggaagttggtcaatg

SEQ ID NO: 640781 - DNA, 425 bp, Homo sapiens
  misc_feature (68)..(68): n is a, c, g, or t
gtgtgtaggacccaaaagccagcccctaagcccttcaagcggccctttgagagcaagcatcctaaaancccccttcctccaaaattaggtgatgttcaggcaaaaggttgtttacaggggaatttaagacccctttgatttttttacggtttcaacccttagggaaaaaacccgcagggggttttttaacaaactgttggtcagcaaaaaaaaagggggcccaaaaaccctcatttttaaggggttcccttttggggttcaagcaaaaacaattttggggaaaaggcccggtggcttttttttgggaaaatgaaaacccgcccccccctgttaaaaaaaatttttttcccatgggaattaaattgaggttcaaatgggggaaaaaaacccctttaaaaaaaaagggctttgtttttcgcccccca

SEQ ID NO: 640782 - DNA, 711 bp, Homo sapiens
acttcactctccacctccaccactgagatataagtgcataaaggcagtggcttttgttatgtttcactggcacaggacaagtgatcaataaatatctgttgaatgcattaataaatgcatgacgatgatatgaaagacaaagatgatcctccaaaatgataacccagcacatggatgacagtaaatttcaatgaaatgaagaaaaagctaaatatttagagaaaaagaaacagtgtattcctggaaaaaacaattcaacattatttgcagcaagacacattgagttaaaaaggctatatactctccagtagtccaagccaattaaaaaaagtctagaagtagggataaaagaaactatagtgttgtacttcctcataagaacattaagtaccagaaaaaatcactaatgtctgtaagattttgaaataaattgttattgtagaaatattacacccaatcaagtagatatttaagtgacaaaagcaatgggcaagcattatttaacaatcaaaaacttaagaaataatgccccaatgagcacatgttgaaaaactatgaaattaagtcaaagacctcagaaatggaaaacaatggttaaaaagactagtggacgctgggcatagtggctcacacttctaatcccagtactttgagaggctgaggcaggaggatcatttgaagccaggggctccagaacagcctgggcaacat

SEQ ID NO: 640783 - DNA, 366 bp, Homo sapiens
  misc_feature (335)..(335): n is a, c, g, or t
gttgaggctacagtgagctgagatcatgccactgcactccagcctgagtgatggagtgagaccctgtcacacacacacacacacacacacacacacacacacacacatttgtagagaaatatagagaatcttgggggttttcaaatttttcttctgaaatgtgagtggttggccaggcgtggtgttttatgtgtgtaattgcaacagtgtgggagggcatggcgggtggatcatgtgaggtcaggagttcaagaccagtctggcaacatggagaaactgtgtctatactaaaaatacaaaaaatgtagccaggcgtggagacacatatctgtatntcgagctactgagcagggtgcacagagggga

SEQ ID NO: 640784 - DNA, 1036 bp, Homo sapiens
ggaggccagagagggcacacagggggaacggtgtgcagatggcatggaagagagacttcacctgtgctgtgagaaagatgggaaggcccttgctgggtatgtgcccagtctcggaaacaccgtgaccacgccatggtccctcttgaggaggctgctgcaggagtaccaggagaagctccaggtggacattagcgggaactgagcaagaaagacagagagtttggctgatgtaagttggaaagtggtaataattgcaaatgaaatgagaagcagactgggagagaaataggagtgggaaacacagaacatctaggatttgactgccaggaagtttgtgcagcaatggaaagaacgttccgtggttgaatgaagaagctagagagcatgctgaaggagctggtagaaaggatgagagggagcagctgagaatcctggggggagaaagagggcataggtggtgccatgagagctcgagggccgcgtactaggagctcattctcagagctagatcgagaggtgccacagttcaggactggtaactgttgcaggaggtgataattgtcctggaaaggagtgagtccgtggaacctgaatggacctggattattacctctccagaactcaggagtgtgtgccatgtgccagggtgaagaagatgctgaggacatgtgcgtccacattcattctgggatcagacacagcaatccgtgggttgatactttcagaaagatcggagacaagttaggctgggaggaccccagcagaaggatacctggaatgagaacggttgataggtatctaaggccctggggccggacttcccctggacacttctgggggggcaagtcacggaaaggggctggacggggtgttggacaaactggccgagaggggttgcgtgccaaggcctgcactgggggcgtcaaattatggggctcgcaccccctgggcacagcggtccagtgggggcgccaacgcggccgcttgtatgcggccggtaagaacctgattgtgcgccccgaactctacttgcgcg

SEQ ID NO: 640785 - DNA, 137 bp, Homo sapiens
gcggccgcctactactactactgctcgaattcaagcttctaacgatgtacggggacatggcagagtctgcattaccttctagatacatgccactgcattccttcctgggtgacagagtgaaaccctgtcttaaaaaa

SEQ ID NO: 640786 - DNA, 377 bp, Homo sapiens
agctattaaagaattcgattcaagtatttaatctgtttagttatgcgtgcgtcttattaaccgataattatagtaccatttatgttaagtgatcattatgatatgcaataccatatcctatgttgctattgtattttttcctagttggtgtgcctgctcagtaaaaacatatactgtatgtgtatacattcctgtgtttgtataatatgtcaatttatatatttttttataggagaatggtgtaacaatttccctattcttccatatttatttgtccatagtataatggccactttgatgataatttctagaactatgttctgagattgtcagccctttgtctaaaataatggctgtattaatgattaacttctgtc

SEQ ID NO: 640787 - DNA, 2691 bp, Homo sapiens
  misc_feature (2657)..(2657): n is a, c, g, or t
gtcgtcctcgggtgtgggggcggtggcgtggcttttcttggttgtctgtgggtgcggtggggcggggcgggcggtgcggttggtgggtgtggggtgtgggtgcgtcgtggctggtgggggggggggtgtgtctgttgcctctgttgggtgggcggggttgctgcttgggtgtgtggtgctggtgctgtgcggggggtggtgtccttgtgtggttgtgggtgtggtggcgtgcgtggtgggcgtgtgttttgtgtgtgtgcgcttctgtttgtctttggctggtttgcgctgtgtgttggtctctggtttgtttgcgcgttggtgtgtctgtgctgctgtgtgtgtggtgttgtctgttgttgcttctgtttctgtgttctggttgtaggtgtttggtggtggtgtctgttctcgtctgtcgttggggtgtgtgggtcgggtggtgtcgcgtttttgtcgtcgggttgtgtgttggtgtgctttcgtcggtgctgctgttcgtggttgggtgtggtcgctgttggtggtgtgtgggtgtgttggttgtggatggttcgctgtgtgttcgtgttgtgttctgctgtgcgtctgtgcgtgctgtggtggtcgtgtgtgtggtgttgtcgggcggggctccgggttggtggtcggtgtttgttttgtgggtgcggggtaggtggtggtggtggttgtcgggtgggcgtgagtggtgtgtgtgtgggcgtgttggtcgctcgcgttgttgcgtggtggtttggtggggtgtggttggtgcggtgggtgggggcgtggtgtgttggtgggggttgttgtgtgtctgtgtggtggtgtctctgtgtggcggtgtgggcgggtggggttgctggtggtgggtgtgtgtggtgggcgggggggcggggcgtgtttgtctgtttgttgtgctagtcgctgtggggcgtgttggttgtggtcgctggtggcctgtgtgtgctgtgtggttgcgcggtggtcgttgttgttctcgtgtgtctggcgctgggtgcgtgtggtgcttgggtcggccgggttgtgtgcgctgcgtgcgtgctcgtggtcctgtgtgtgtggctctgtgggtgctgtgtgcggtgtgttggtggtcttgtgtgttttggtgtggttgttggcgtgggtgtgtgtggtcgtgtgtggtgcgtggtgtggtgtgcgtgtgggcgtcgtctgtggtcgttggcgctcggtggtggggtttggtgtggtggttcttgttgggtttgtgtgtctgtcggtgcgtttgtggtggggttgtgtgttgtggttgggtgggtttgtggggtgttgggtggtggtgtcgtggttgttggtgtggtgggtgtggtggttgtcgtcgttggtggtgtgcgcgggtggtgttctgcttcgtgtgtgctggtggtgcgtgtcgtgtggtgtgtctgtgtgtctgttgtgttggctgtttggttttggcggtgggtgcggtggtttgttggtgttgctgtggtggtcgtggtgtgtgctttgtgttgtgtggtgttgtggggtgtgtgttggtgggtgtggtggctgtgggtggttggtgctggtggttgtgtgggggtggtgcgcggtgtgtgtgggggtggtgcggtgggtggggggtgggtgggtgcggggcgtgtgggtgtgtgcgtgcggggtgggtggtgtggcgttggtgtggtggggggtggggcggggtggttgttcgggggggggtggggtgtgtgggtgtggggcggtggtgtgggtgtggtggtgggggttggggttgtggttgttggtggtggggggttggggtgagagggaggagatatgatagaagaggaaggtagaatgtaaaaagtgaagaggagagtataggatggagaaggtgtggtgggtgttgttggtgggtggggggggtgagaggtaaatatagaagtataagatgagaagaagtgataaagagtgtgaaagaagatatatgaggaaggtgtgtgttgagtaggatagaggtaggagataagtaggagcgacgagaaagtaagtgatcgggggtgtagtgagtgttcgtgtgagggctgggatgtataaaagaaggagagaatgaggaggtattggtggatgttggtggggcggtggttgtggtgtgtgtgggggtgtgttgttggtgtggcgtgttgtttggtcggggtggtggttgtgtgtttgtgtgggtggtgtcctgctgcgtgtggtttgtctggtgtgcggtcggcgtgtcgcggggtgggtggtggtgtgtgtggcgtgggtgttgggcggtgggctgtggcggctgtggtggtgcggtgtggtgtgttggtcgtgtggggggtggtggaggagggagagaaaatgaaaaggaagagaagtatatgatgagagagaataatatatatatatatatatatatatatatatatatatatatatatatatatatgtatatatatatatatatatatatatatatcatatatatatatatatatatatatatatatatatatatatatatatatatatatatatatatatatatatatataatatattatattatatatatatattttatatgtaaaggaggcccggacccgacctgtccttagttaagtgaattcccccctgcctgaagnggggccttcttaagctgtacggcgtgtagcccct

SEQ ID NO: 640788 - DNA, 538 bp, Homo sapiens
gcctgtctgtgtgtggcgcggtgcgatggtgtgagtgcccagtgactctgaccctgtccccgtgccttcagcgaaggcccccgtgcagcgccggccactactgaactgcctgctgggttgaaaaatatatggccatgtaacacgcttgcaatgacaactttgtctgtggaactgacagacacctgtgatgcatgtgctatgacggtcttactgcaacggtcgaaggaaattgtagcccaaacaatcagtcagtatgcagtgtgcccgtcacagtgagacccgtgccaacgaaccaacgaaagcgagttcctagatggatattgtgcccccgtgtgaccccttgctagagggcccaagacacatccaaaatgcattgccccactgctatatgggaaccttccaaattggctttccacacaattgcaccacgtggcgcccatatatgagcgacttgtggtcgaatggcaactacaacaactctacaagactcgtatatagcataccaaaccaagaaaaaacgtacaacttcctatacaca

SEQ ID NO: 640789 - DNA, 120 bp, Homo sapiens
aggatccaccgcatcttgcgtcacatcagcatttccaatctggctgatgagttgcctgaattgatcaaggtagctctgtccctcaggtgttattccaagttttctgatgggagcaagatg

SEQ ID NO: 640790 - DNA, 324 bp, Homo sapiens
  misc_feature (1)..(1): n is a, c, g, or t
  misc_feature (12)..(12): n is a, c, g, or t
  misc_feature (72)..(72): n is a, c, g, or t
  misc_feature (90)..(90): n is a, c, g, or t
  misc_feature (129)..(129): n is a, c, g, or t
  misc_feature (146)..(146): n is a, c, g, or t
  misc_feature (148)..(148): n is a, c, g, or t
  misc_feature (160)..(161): n is a, c, g, or t
  misc_feature (164)..(164): n is a, c, g, or t
  misc_feature (189)..(189): n is a, c, g, or t
  misc_feature (199)..(199): n is a, c, g, or t
  misc_feature (218)..(218): n is a, c, g, or t
  misc_feature (221)..(221): n is a, c, g, or t
  misc_feature (249)..(249): n is a, c, g, or t
  misc_feature (252)..(252): n is a, c, g, or t
  misc_feature (285)..(285): n is a, c, g, or t
nctggcttctcncgtaagaagagagagatacgtgtagaattgggtggggggaatgagcatgaactgtccgtncggttgggatatgttacnttagagtgagagagagaataaggagccgttctatggaanaaatgggagaagagagncngggttcttttcnngcngagtctagtagtttctctgtaaggngaaataatcnaaaaagactaacctgcccnccngcgccgtatattgctgtgagattgcccngancttgtgctcttctgtctgcagtgtgcacggccntgttctaaccgggaataaaggtgattgattgtattgggg

SEQ ID NO: 640791 - DNA, 182 bp, Homo sapiens
cgcttctcccagatccttgtcttacacacaggtgtgacgctgggcgcggtggatcacacctgtaatcccagcactttgaggaggccgaggcaggtgagatcacctagaggtcaggagttacgagatcagacaccggccaacatggtgaaaccccgatctctaaccacaaaatacaaacaatt

SEQ ID NO: 640792 - DNA, 108 bp, Homo sapiens
gatccggtatagtgaactgaagtgttgatagattgttatagtggcgatcggttaatgacggttgatgtttggtgagcatctgcttaataaacagacattgattccctt

SEQ ID NO: 640793 - DNA, 117 bp, Homo sapiens
ccggcccagactagatggagaagaagcgaggtatggctacacttgacattgcacaacaggtagagccataactcgcttcttctccatcttggtctcctttcctagagacagtgtgtg

SEQ ID NO: 640794 - DNA, 302 bp, Homo sapiens
tcgaccgccattctcctacctcagcctcccgaggtacctgggactacaagcgcccgctgccaagcctggctgatttttttgtattgttagtagagacggggtttcatgtgttagccaggatggtctcgatctcctgacctcgtgatctgcccgcctgggcctcccaaagtgctgggattacaggcgtgacaaccacgcccaggcaaaaaaagttttttaaagaataaattggattatactatacatattctgagacctgcataatatgtcttagaagatttttcatgtcatagctgtcactc

SEQ ID NO: 640795 - DNA, 1474 bp, Homo sapiens
  misc_feature (737)..(737): n is a, c, g, or t
gatcctggtgtcgccatgggccagcgcccgaccgttgttaccggtattgtaagaacaagccgtacccaaagtctcgcttctgcctgaggtgtccctgagtgccaagattcgcatttattgacctggtggctggaaataagtgcaaacatgtgtgatgagtttcctgcttagtgtgccactatggtgtccagatgacattatgagctagctgtcctctgaagtccctggaggctgccctgcaagttttgtgcccagatcaagtaccatggtcacaaaagcttgtggcaaagatggcttccatatcctgggtgctgcgctccaaccccttccacgtcatcctgcatcaaccaagcatgttgtccttgtcgctatgggcgactcgacatgtgctcccaaagcatggacattgccgatggttgccttttgtgcaaaggccgccgagtgtgacacctagttgtgaccaggtggtatacacactttggcccaaacgtatgatacatagatcgcagtctcggacaagcacacatgcctagcatagatagcaaagtggatgcatttgtttgactattgaaggtgccccatagctgccatatgtgggcccagatgtttccaaagcgtttgtcccttgagccctgccctagggcaaggattacccaagcaattacttcatagatgcaaatgttgtgtgtggcctttcaacgccaaatgtataccaaattggtccttgacttgaaacntgttgcacacgaaccacttgcgctagtgccttggacaagatgtcggcgactacaattcccccaggaatgtgacttgttgctggtggttcccaagttaacatttcccccatgtctgttggagcgcacggtccgtaggggaccaaactggttgggctgtgagggccctttgaccacgtccacttaggtcgggtggcttttcccacaatttgttgactagcacaccacacccttctttcaacttaccttctaccccaatgtacagattccgtacgcttatcccttggtcccaaaacgatgacatacagacaaagaagagcacaaacacagctgcgcaaggcacacccaacgcagctgtcgcataatcaatcaccgcggcgggaagaaaacacgctcatagtttgagaacaaggagacaacagccccacccaaagagtgacacgagacccaccgatggcgcagaacacgccccccacaaggaatacccaagatgcacaagaccacgatcggaacaatatggcgcaggacacgcaccagcgcgcagcaccccgcgggcacaacgacgcaccctcgcttcagagaaaccggccaacaaagggcaacgggtgcgtaaaagatcgagcgaacagacagtgttgagatagacccgacctgtgagatcgtgagccagcgggggagaacacccacaagagatgatccacaacacgccaggaaagcgtccgcacaaagaggcaccacgg

SEQ ID NO: 640796 - DNA, 231 bp, Homo sapiens
cgcgctggtggcggcggcgcgtcgttgcagttgcgccatctgtcaggagcggagccggcgaggagggggctgccgtgcgtcagtaccaccgttccttcctaccttatattccttccatccttcgttcctggtccggtcacgagagtagaagtgaagaggttgcagtaaatggatgtcgtgtcccggcagcgagccaggcggttttccaaatgagaccgtgttgaaagggcg

SEQ ID NO: 640797 - DNA, 1120 bp, Homo sapiens
  misc_feature (156)..(156): n is a, c, g, or t
tggtttcttggtgatgcccagtggatcataaccatgtcggattttacaggaattgtggaattatgtggccctcttcgtgggaatagtttctgaacattatctggagccacattctcgtggtgttacaggctcatgaaggaaacgtgcagtgctggngctttccagtgttaatacattatgtgtacaagttgtgcacattttacatctcacttagaattgtgtgccgccgatgtgtgtgggtgtggctttcggtctccctccccttcaccaggtgaacacacattctgtggcttgccagttattttcaccaaaagcaacactcttaggtgggtgtgttccccactgtgggtttaaaaggccttggtggccatctgtggggggctctcgtggggtctccatatcgagggttccactgtgttccgtttctctttactctcgtgttttcccacttccactatacctttaccctaaagtgggtgagtatatgtggactctcggagagggccaaacaccattgccattgggatttacattttgtggtacggtgggcaccaaaatgtggctcgaaaattctcactatactttttctttctcccgggggggggtattaaccacgttgtttggaccagactatttcaaataaggcgataacattgccccggaactcaaaagcgctgtggtggccaccactttttttgaagacttttaaaggggacacacacgcggaaaaacaagctcctttgggaaagtatattcctcgaaaaaggagccccttgtattggttcccccatatagtgtgaaacctgtgaaaagggacccaaaaggcttatttgggccatccccaagtttttcccccctttcccaagttcttggaaattccagaaccaccctttttgagggggagcgtggtggttggggcgggcaagcaattttcttgggcccccaggggttttttagaaattttggggagttaatcctggtcccagcggttccctttctttctcacgaagaaccccagtttactcccccgttgtgtttaagcggctttttgcgcttccccacggggggctttttggtgcacggtggttccttgtttggccccgaagtcttgaagtcactg

SEQ ID NO: 640798 - DNA, 129 bp, Homo sapiens
gaagaggtcgcagatacagaggcatagcgcccagccccatcaggaaccttgcttgtggaagtgcctgagatgcgaggtaaaactgctccagctcctggtgcctgaaactcaaccctcttcaccggccat

SEQ ID NO: 640799 - DNA, 826 bp, Homo sapiens
agcggcatttcacccttcctctggctaaagagtattcctccttctgtagagctctccccagtggattttacgcttaagttccactcccattccaacacccaagaggctagattctgtctcctctacccacaggcgggggcatgtcttagatccccagtgatgcgtgaagaaagatgtctcactttgcatcagacatctagatacccagagtgggcgcgcgggtaggtgcctatgtggcgtcgtccaggaagactgtatagatcaggactgacttatgatcttcactgacgcagaggacagagccgcgagactagacatgagaccagcagttatagactatgactatgtctatgcatactacataagataatagaactagtcacagatcccgcgcagcaggcagtctccgtcccggacaggcgatagcccacggcggccagacctgaggtgactgatcccgcgaggggacggaggggagtgacggagggctatttcccccagagaacgtcaagacgccccccagggacccggcgccgcgcagacagccagccatctgcaaacacagacggcgtgagggcggcgcagtcgccctgccagcaaccgagcagctgctgtgccaggccaagcggggactcactgcctcagtaacctcagccgcagaacccggccggagaccgcgctcagggtcgctccaccccggtagccggtggctccgagccaaagcaaggtgcttggccggggcctgcaagccggcgcggcgcgcccggcgcggaagactgggcctcacctgaggagcacgcgacggagtctcgtccggggcgccaaa

SEQ ID NO: 640800 - DNA, 1402 bp, Homo sapiens
  misc_feature (1402)..(1402): n is a, c, g, or t
gaggttcgtggtgctagtattctactaagccataccagtgccatacctcgtcgctagcagcgacacacgctctacgccgccgccatgactagagcagatagaccctatcgtggcaccctacaaggagccacaacggccagcgcgctcaaccccagcactacgctaactaaccccccgccagcttcccacgcgaccatcgcataccactcataccgcacctcatcagaagccatacagaccaaataccataccatagctagcgacaaacctagcacaccagcggcactgcacgacccaacctacatgcgcacacttacccccacccaaccacagctaggccctactctgcccgcgcagagctaccaacataacacaacaacccctactaccgcctccaccccccgcacagcataagagcgcaccccacacctacccataccacagccactaggggccccccaggacaacaccagacccaccccatgccacttccaaaacggacctatccacctggccgccccaccttgccgaaaacaccaccacattagaccgaccacaataacgatgggcgggagcaccttacctataccaatcccacaaccccggcggcgacaccactccacaagaagacaaactcccgcaacagggggcgcgaatctctctcttgggctaggtcgccggtccccaaacttacagccccctaggacggcgggcacacttggccttgcccccttcgccacgcattaggataggacgccccccgtatctttcctcataccgcccatattccggttgcataccccgcaaacacccaccggcgccccaactgccaaccttttggggtcttcccactcccatatggaccacaaacttctaatcacatcaacgcggcgaacctttacacccagtagtccactacacatatactacaaatgtgtcccctatatcgtatggccgcaccactataaggccgccccccttggcggcggcctttgggcttggcgctttgggcccacatcctcatctttaagcgctacacccttatggggggttcccccacaggccgttaaccttggcgacactgcacgtgaccccaacgagcacatacccaacacgacacgcccacggccagcgccccgggccctcaccatggctgtgcataccgccagccacgcctgccacccctacccacgacgcccgccacacgcccccacgagccccccccgaccgcacccagcccacccccacaaccacgtaccaccccccaccccaccactacaccactcccccaccacggccccgcgcggcccccccaaccgcacaaaccaaccccccaacccggaccaccaagcgcacgacttcaccacaacccgcggcaaccacacacattggcgagccacan

SEQ ID NO: 640801 - DNA, 729 bp, Homo sapiens
agcgggtcgtgctgcgctgcgtcgctttcagcctctggtgaagggcggcgcgcttaggcaggcggtggcgcggctggagtgccgcggggagggctgtgccggttgctttctgcagccgcatctcggccagctctcctcgccgtccccggggcgctgtgcgtctccagtccgggaccgaagccgcctgccgtagcgggcggccagatccgcgtcccgcctcagcggccggaggacatgcgggagagagaatgagccagagggacacgctggtgcatctgtttgccggaggatgtggtggtacagtgggagctattctgacatgtccactggaagttgtaaaaacacgactgcagtcatcttctgtgacgcttcatatttctgaagttcagctgaacaccatgggctgggagccagttgttcaaccgagtagtgtctcccggacctcttcattggcctaaaggtgatctggggaaaaacacgcaagggcctcgttccctggtttacgaggactagggcccaaatttagtgggggtaagccctttccagagcaatatacttggctggctttattcaaacctgcgaggaaaagttgacactgatgtatgagatcctgattctacccaaagtacatatgatttcagctgcaatgccagggtaacactgccaatcacaggaagcgaagcccattgggcttatacaagactcggtaacagcttgatgcacggaacc

SEQ ID NO: 640802 - DNA, 177 bp, Homo sapiens
actctagcgtacccttatggctgggtagcacgattgaccaggtaaatttaggatgaagacctataacatggcggctgtacatacttctacttgtgaactaattacggtaaccgtctttatttcttttcaatctcttaagcagatggattgtaatcgaatgtgacacccagtccatgt

SEQ ID NO: 640803 - DNA, 399 bp, Homo sapiens
agcgggtcgtgctgcgctgcgtcgctttcagcctctggtgaagggcggcgcgcttaggcaggcggtggcgcggctggagtgccgcggggagggctgtgccggttgctttctgcagccgcatctcggccagctctcctcgccgtccccggggcgctgtgcgtctccagtccgggaccgaagccgcctgccgtagcgggcggccagatccgcgtcccgcctcagcggccggaggacatgcgggagagagaatgagccagagggacacgctggtgcatctgtttgccggaggatgtggtggtacagtgggagctattctgacatgtccactggaagttgtaaacaccatggctggagccagtgtcacccaattatggcttccggaccttttcattggctaaa

SEQ ID NO: 640804 - DNA, 693 bp, Homo sapiens
  misc_feature (163)..(163): n is a, c, g, or t
  misc_feature (170)..(170): n is a, c, g, or t
  misc_feature (172)..(172): n is a, c, g, or t
  misc_feature (181)..(181): n is a, c, g, or t
  misc_feature (187)..(187): n is a, c, g, or t
  misc_feature (195)..(195): n is a, c, g, or t
  misc_feature (197)..(197): n is a, c, g, or t
  misc_feature (200)..(200): n is a, c, g, or t
  misc_feature (216)..(216): n is a, c, g, or t
  misc_feature (219)..(219): n is a, c, g, or t
  misc_feature (224)..(224): n is a, c, g, or t
  misc_feature (229)..(229): n is a, c, g, or t
  misc_feature (242)..(243): n is a, c, g, or t
  misc_feature (253)..(253): n is a, c, g, or t
  misc_feature (279)..(279): n is a, c, g, or t
  misc_feature (290)..(290): n is a, c, g, or t
  misc_feature (299)..(299): n is a, c, g, or t
  misc_feature (318)..(318): n is a, c, g, or t
  misc_feature (324)..(324): n is a, c, g, or t
  misc_feature (343)..(343): n is a, c, g, or t
  misc_feature (389)..(389): n is a, c, g, or t
  misc_feature (477)..(477): n is a, c, g, or t
  misc_feature (486)..(486): n is a, c, g, or t
  misc_feature (498)..(498): n is a, c, g, or t
  misc_feature (512)..(512): n is a, c, g, or t
  misc_feature (515)..(516): n is a, c, g, or t
  misc_feature (521)..(521): n is a, c, g, or t
  misc_feature (524)..(524): n is a, c, g, or t
  misc_feature (541)..(541): n is a, c, g, or t
  misc_feature (584)..(584): n is a, c, g, or t
gaagggggtatggtttttctgtgccaactggtgttctcactcgcagtgggctggaggcaggtaagaaaagtgttcgggaagcttgggcagggggttccgggtttgggagggcccgcactttcaggccgtcggaaggaggttttgcagtctcccggtcgcccgnggtgggntntacggcgcnggcatncgggcaantnggngggtgcctcgttgatnagntggtntgcgntcctgaatggggnnggcgtgcccnccggggggttagtggccactctgcanagcctcggggntggtggcancagggttgtcataggtaanattggngccctgatggggtacgccncccacaagtattttgatagtgaggaggatgaggagtagccagcagntcccagaacctttttttccttttgggcctaacttttccagttaggatctagaacttggcctttttttttttttttttttttttgagangggttctcnctatattgtccngggtagagtgcagnggnnattcncanatgggaacatagtacantgcagcctccaactcctagcctcaagtgatcctcctgtttcancctcccaagtaggattacaagcatgggccgacgatgcccagaatccagaactttgtttatcactttccccaacaacctagatgtgaaaacagaataaacttcccccaga

SEQ ID NO: 640805 - DNA, 158 bp, Homo sapiens
gcctgagtcgatctaaggatcccgcgctagcggcattaatgaacgcatttccataatctgatttgcttttaatctaggttggaagggatcaaagcagtggccttgaagggcagacctggacggtggccatccaggccccgttcacttaatgccgctag

SEQ ID NO: 640806 - DNA, 426 bp, Homo sapiens
tcgaccggatgccgccttacaggggatgggacgcttatgtctaagcaaggcgctacagagtcaagacaggtcgttagaagctactacaaattcagcaaagtcgcaagatacaagatcaacagaacaatcagtggtattgctatacaagagaacttcacaatacaaaaatgcaacattaagaaaacaatgtcctttacaatagcatcaaaaagattaaaattcttaggaataaattcaaccacgggaggtctaagactgaacactacaaaccattgttgccaagaaattacagcatggcctagataagtggcaaggtaatcccatggtcatggataggaagatttgcatatgttaacatggcaatactccctgaaatagactacagatacaatacaatccatctcaaaatcctaatggtcttcttgc

SEQ ID NO: 640807 - DNA, 320 bp, Homo sapiens
tcgggacacggatataccggggatggtcttacactgggagtagagatataccggagtacagcatccactggggaacacagtgtcatgagggacaaatgctgtcccggatgacagtcacgttgccagtgactagatttgtccagagaagctagcagtttctactcacgggctgatgtacaagtagatgcgatgccaaaatgagatgaaagagaatacagaataaaattccgtcccttggagcatattccattggcatattctctgctcctgcttccgctggtatctggccttctggtataacatgatgagcgttactgctg

SEQ ID NO: 640808 - DNA, 738 bp, Homo sapiens
agcgcccgcgatgactgtcactctccgcccctacctgagtgccgtgcgggcacatgcaggtctgccctcgtgcgctggagaacttctcctcccaggttgtggaacgacacaatagatgccggaagtggaagtcagtcctcgcccagtgaatttgaggaatcagagtcatattacagatgagaaaattgagattccaacagggtagacttgccgcaaggataagtacacgagaggaggctggatttcaaaaccttttcgccctgtagttcagagcctgtgctcttgctgctgagagaacagactcactgggccccgatctcggagcactcctgcgttgagtagcaagagagctccgtgttacaactctgtgacgcatcagcaggaatgacgaaggaagaaggttctgattgagggctccatgcaactctgtccgggtcagcattgctgtgaaacaggctgatgagatcgagaagatgtcttgccactaagtatcgatgcgcttcatgatgatgctgagcggcagaacttcttcatccattcgaaggacagcctgtggcaggggtatgatatcagctttctgatcaccaaggttccaaacagagcagatgtacaaacagaagttggtggacattcgtgatccaattcatggaggagattgacaacggagatcagtgaagatgaagctgttcgagtcagatgcctgtgcccgcaattgtggctgaagagttccttaagaat

SEQ ID NO: 640809 - DNA, 293 bp, Homo sapiens
cacacaggtacatgactggtatataatccctaaaaaacagatcattatgtcacactactgccacctgtcatcagaatcgcttacctattcagtgtcacttgacatatataaccccacccactcctctatgagttctcacatactcaccagcagtctgtgccggatttcttcctatcccactcattggtaataatcgcattttgttgcacgcacggcactttacattcttctgctgcaacctttacagactgctgtgacacggtgtacttccaggaacactgagtacctatgta

SEQ ID NO: 640810 - DNA, 916 bp, Homo sapiens
  misc_feature (713)..(713): n is a, c, g, or t
gcttcaggagacatcattcctgaacacactgtagggtgaattggtgcatcttccccaccatacacacacacacacacacacacacacacacacacacacacacacacacaccccccaaatcttttccatggggagtgtgtggcaatcttgccaaacagccacactcagagtgtgactctgagtgtgatcttggtcttaagtgagggaacttcttagagaagaagtttgaggcgacaagggccaactatctgtctagtcgtgggctcgtcgtgctgtcccagctactatcaaatctcgtgtacagagacagagggccaatgtgcaaaagtgaaacgccaggaacctattgctaagggcgtcgtgtggctctgtggtggtgtatcatccgccttccgagagaataagatttccccttgccatgtcccaactcgtgtatatatttcgtgtacagaagatatccctgaatattgtgtagggtgagtcgtacagcacaatatttatatctccaaaatatttatagctttttctactatgctatgaattgagatgacgtgctcaattttgtaaataatgtctttgtgtacattaaaaaagtaattttcacataatttatcttgtctatctgttccccttgaagtagttagagagaacctgggcagttatatttgggcgcatttcgaaccagaatttagggtgtaatttcctcttcaacngtgtcaacattggatatcccggctgtgccaagaagtgtttgggctgaggcacaaaaaaaacaacaccacaccaccgttccacaatcaacaaaaccacctacaacatcgaaactaacagacaaaaaaacacaaaaccgccgccatatccacgagacgacgcaatttgaaacaatgactaatacccgccacaggacacgataaca

SEQ ID NO: 640811 - DNA, 320 bp, Homo sapiens
atatggcatatatgctcaaggaaaacagatcattctacaaatggaacatgtacctaaatgtacatcatcatgctgtgcaggagagcaaagacatggaatcaactaaggtgctcattagtggtggtggatcgggtaaagaaaatgtggtataaatacattatggagtactacagagccatagaaaaaagaacgaaatcaggtcctttgcagaaacatggttgcagggggtggtcataatactaagcaaattagtgcaggaacacaaagccaaatatggcatgtcctcacttataagtgggaaatgggcacacattatggag

SEQ ID NO: 640812 - DNA, 1989 bp, Homo sapiens
agattgtccaggagaatggggactgaagctggtggaggggagagagggctaaagatgtagaccccgcgctctcctacggaggtgtgacatcatgcatcatctctggccggaagagaaagagtgtgaggctgccaaggaagctctggaggcatgggttcctgtcaccatctgaagtagaggatgcccttatgacctatcaccgtctacgtatattggagcagaagaggaagtgggatccgacgagagatagaatgggagtcgagtctctgatggctgcaaacgatacaatagttcaccggacaacgcgtgtaagctgcagctcctggaacgattcgatactgcacgagtacaatggcgccgcatcggctggcaagacctgatgagtaccacggggggctcacaggtgcctggggaaccatagcgtagcgcaagacaggtagctcgtaaaacgcgtaggagcttcacacgaagggtccccgaaaggaccacggggcagggtaccccgcggcgacgtgtttcaagaggggaagcttaacatcatacagacgtttgcacagctggttcccacctcgcacaatagagcaccggcaaaagtgtgaaccccaaatgcacgcaagaggttaatcacgaaggacgttgagccatggtacaaacgagatgagtggacgacgacttaaaattgaagcaccgccaaataaatcacgcaagtgaattcgggtaacgaccccattaggaacggaatggacaaagttaaaattcacaacaggataatcaacgcactacggaaactacacacagcggggcaccaagcacatggagggggagcacagacgcgaaagaacacaacacacgaaagcagagacacgacaacaaaaagaatatgcaacacgcaattacaacacgacatgagtgaggaaattaagccggacaagtactacaaggtcacatcacaccaacggaaaacaggacccgtcggaccccacagaggtggacacatcagggcattaacgtcaaccacttgggaacagcaacaagctctggactgaggcgcagtgacaacaccgtacatgagacgagcagaagagaagtagggggacgcaccacgatggacagcaggacagcagctataccgcgcggacatgggaaaccaccaagcgacagcgacagaaaacgaacagagagccgcacaggcacctaccaccaatacggcgagggcacccccgagacgaagaacaaaacaacagacccacagaacgcaggagcagaaacaacaacacagtgcgagcggagcagttacacatggataggggcaagacaacaattaacgacaacattacccacaagacaagaaggacaggaaggaccccccaagtaaaaaccagccaagcgtggcagacaaaccagtgagtagaccgagggggaacgtccccagaaaagacacatgagcgggaacagcagaagggccacacggagacacagagagccacgacgcacacgacgagacaagcggactgacaacacaacgaaattaccgatccgaactgacaggaccaccagagcaggcgcgcgacgaccggaacaataaagagatgacaacgacccccaggaacagaacaagacgggccagagagacgaccgcgacaacgagagacagaggagacgaccgagagcaccgatgcgaacggcgaagacgagagaagtgacgatgcaccggagaagcaagagacggtgagagaaccaacgaacggaagaccggagggcaccagaacacacaggggagcaccgagaaaggaaagcaaggagagacaacacgtagcaggaaggagctcaacgaaacaaaaggatagaacaagtagggagagagacaagacaaagaggaccagagagacgacaatgcagacagcagagaagcgaacacgcagaagcagacgaagaccagaataagcaagaggagaggtcacgtgcgcgaacacaaacagcacagaaaca

SEQ ID NO: 640813 - DNA, 183 bp, Homo sapiens
atgtcattgaggttgatggactgctctcctcactctggctccagatatgaaggtgatcccatgtgacagctggttgtactgtgcgggcgtagcgggaacggcgccattgggaatgtcgtcatgataaaacttgtgagtgcaagagtgtcttgtggggacagtgttgggctagagcatgggtgc

SEQ ID NO: 640814 - DNA, 217 bp, Homo sapiens
catcaagccgtgtcttgggaacaccctggcggtgggatccgcaaaataatggatagagttcgaggtgaacatacatgtccctggcacctgagctgcagtctgacttcattgccatcacgggcctcgctgcaaattttgaaccgggccaaggctgaactgctgaagcttgtgaaggagctacagtgccgagcagagaggcccgggggtaccgagctcg

SEQ ID NO: 640815 - DNA, 475 bp, Homo sapiens
tgattgttcctcacataggattccagaacactgctacaaggttctgaatttttgtccctcacataggattccagaacactgctacaagggtttgaaagtttgtccctcacataggattccacaacactactgctggggtctgaatgtttgtccctcacataggattctagaacactccagctggcttctgagtgtttgtccctcacataggattcctgaagactgctgctgtcgctatagtcgttgcaagtgtctgaatgtttgaccttcaccaaacaccaaatatcctgaccctttagtcttggactttccagcctccagatctgtgagcaataatctctgttgtttatgaattactcagtctaaagtattttgttatagtagcctaaagagactaagagagcatcacctgccctgtcacctcatcaccgcattactgaagctatactaacaacagtcacttttagtgggtgct

SEQ ID NO: 640816 - DNA, 776 bp, Homo sapiens
gttccgatgactgtccacaagctgtaccctgtttgacctagaagtggagtgtgtctgcacatacagcgaatggcaccgacaatgaaagcaagcatggtattcccaaggtaggaggagtataatgctgatgtacgggatgctcttctctatccgctcgtttgtcatgcaagatgtcgccgcgctagactagtgaaggatggcttccgtggccttccaaacgtatgcctgttacaaattccattactactgatgtcgcccatcatggtgatcagatagttgtcatgacagtactgacgttgggcgtgggacccatccagaggatgtgctagcggccacagtctacagtgcgctgtactgtggagctggtggtgaagaaatcccctgtgcccgcatgggccaaagctgtgcacacgtgacgctctttcgctcccgactggactcctatgttcgctctctgcccttcttctccgtcccggtgctggctgaagcaagctacctcaagtctccaggagaattcatgtctgcctggggccctatccggaacctgtgcctaactaaagggcccccctttgtcgccccagaaccagcctaatgacctgcttaccgtctgtgggctatgatgatcgcttctggctgtctgtcgcaaggaacaacctgtggtcaccctgtagtcgcctgccccccacgtcttccgcgcctatcctgctccctggcttctatggtctctgtgttcccgaatccctgctccgggtcatggttactgctccgcgctgccg

SEQ ID NO: 640817 - DNA, 102 bp, Homo sapiens
tgctcagaggatgacggctcgagatgtatcctgccgtgagctttccccccagagggccgccagtgcagtcggtggtactgagaatggagagtcgggagcaca

SEQ ID NO: 640818 - DNA, 164 bp, Homo sapiens
ccgggagtgctagactgggagtgacggctgctgggtaaggatttaggggtatgcaaatattctaaaattaatgattatatatatgcacaatcaatgaatacactaaaaactaaaaactactgaagtatatattttttttaacgatggagtcttgctccttgtcc

SEQ ID NO: 640819 - DNA, 522 bp, Homo sapiens
  misc_feature (62)..(63): n is a, c, g, or t
  misc_feature (69)..(69): n is a, c, g, or t
  misc_feature (75)..(76): n is a, c, g, or t
  misc_feature (81)..(83): n is a, c, g, or t
  misc_feature (87)..(87): n is a, c, g, or t
  misc_feature (89)..(89): n is a, c, g, or t
  misc_feature (92)..(92): n is a, c, g, or t
  misc_feature (95)..(95): n is a, c, g, or t
  misc_feature (98)..(98): n is a, c, g, or t
  misc_feature (100)..(100): n is a, c, g, or t
  misc_feature (102)..(102): n is a, c, g, or t
  misc_feature (104)..(104): n is a, c, g, or t
  misc_feature (116)..(117): n is a, c, g, or t
  misc_feature (151)..(152): n is a, c, g, or t
  misc_feature (157)..(157): n is a, c, g, or t
  misc_feature (164)..(164): n is a, c, g, or t
  misc_feature (173)..(173): n is a, c, g, or t
  misc_feature (296)..(297): n is a, c, g, or t
  misc_feature (302)..(302): n is a, c, g, or t
  misc_feature (345)..(347): n is a, c, g, or t
  misc_feature (352)..(352): n is a, c, g, or t
  misc_feature (374)..(374): n is a, c, g, or t
  misc_feature (382)..(385): n is a, c, g, or t
  misc_feature (407)..(407): n is a, c, g, or t
atttttgggacaacccactcagccgcaacctaaaaaacaagcagaacctctttcaggaaaanngaaccnttagcnnacccnnnagtncncancanaanantntnaaaatgcaatcnnctgcattttccattgctgcagatgtaaaggatgnnaaggnggctcantcaaatganaatctaagcgactctcaacaagagccacctaaaagtgaagtctcggaagggcccgtaaagccctttaattgggaccacaatgttcaaagtatggagactcaaatcgacaaagcccaagctgtnnctcancctgtaccccttgcgaataagcctgtacctgctcaatctactnnnccttnaaaaacaggggggatggagggnggaacagnnnnagcaacatcatcattaacaggngataatgattttaaacctgtgggtataggtctaccccattcagaaaacaaccaagataaaggcctgcctcggccagataataagagataattagattagaaggccatagaggcac

SEQ ID NO: 640820 - DNA, 1071 bp, Homo sapiens
taccctctctctgggtagtgttgtggatgggggagagtggaggagcatctgtgtgtgtgttctctcccatggtgcgactactgtcctgcgtgtttacacgatggtggtgctctcgtttcttcaccttgagaggcccaacggtcgtggcaacgtgtgttcctcccgacgctgtcgtcatggttcctggacgcgtcctttccgcgagttcaccgggcgcaaacgcactggtgtgagaaaccgatcttgcgagcctccgtgtgattggccccgagcggccgccgtgtggccttgcccgcctcaccggtggcgctactcgggcccaggacgccattggcccaacccgcttggaaccatttccgcgggtcaaggtagaccttgagcccggaaatatgtatcggggatatagcccccggtttccccagggccctcctcgccccaagctgcccttgagaggccggcaatgtaagaagattaagaaatcaaggagatgagaccccaggtcagcagccacctcaacgtcggtaccgccgcaacttccattaccgacgcagacgcccaggaacccttaacccccagatggccaagagacctaagcagccgatccccccagctgagaattcgtccgctcccgaggctgaaccaggcgcggggctgagtaaatgcccggcgttacccatctctacccatcatcccggtttagtcatcccaccagaagaaatatggaattccccgccattaagaaatggaccaaagattggagctgaagacctaaagtgcttgctttttgccccttgacccgattaataggactatctgccttatctatgcacgcatggggtttttattatttttacctataagaagtctctttcttggtaataacccaacgtgttttttaaaaaagcctggtttttctccatacgccttttaaggtttttaaattgtttcatatctggtccagttgagatttttaagaacttcatttttaatttgtaataaaagtttaccacttgattttttccaaaaagtcacccaactgccagcccctgttaataaaggtcttaaataata

SEQ ID NO: 640821 - DNA, 468 bp, Homo sapiens
atgtctgccggtttctccttgaagccaatgtgtgggatcatggcatttcacaaaaatatgcctccttccccctcggggtgacagtataagtcaggcctcccttttttcaaggtgggctttaaatcattaaagcttaaattgtcagatcgttcattccctttccagggttatttagtaaagtttgttgaaaacaaaaacccctttttttggtttttttttcagttattttgaaggtccagcatcctgattaaatgtttgccccattaaagaatgaccagcagcagctttcagtttttaaaaaaacacttaaattttgattttacaagggggttacctgttccattgttgtcaaaagccccctttccatcaaaagggttcccccatttttttatccccaaagaactcctcccttttcaatttgtcatgttaaaaaaaggggttacattaaagccctgtgttaagtgtcca

SEQ ID NO: 640822 - DNA, 493 bp, Homo sapiens
tggtatctgaagaatgactacttactttgccaaaggacagtgatgcagttctcctcacatgcacatcccagtgagagctacaaacagaaagatcagctcacacagttgggtgcagagtgctggagcctgtcctggaggcatgtgcaggtgtttgcaggcatggcgggagggcttccagcctaagaacaagggctgggatggttgcatatctgagtagataccctggacctgggtattaaaaagctctagaaaatccagccaggcagagaaggtaggggaagacatttccagtagtaggcacacgatggggcagagttctggacttaagaaagcattcggcatattcagggaccccccatgctaggagtctattggaggtgtcaccagatgtcaacttctgaaaggacgtgtgcttctttcctcctccctgtgcgctcgcatggcacgggtccttttcccactcctgggctcctgtcttgggagctctttcaaa

SEQ ID NO: 640823 - DNA, 235 bp, Homo sapiens
  misc_feature (205)..(205): n is a, c, g, or t
ccccagtcatcctgctctttgctcatgagaaagatccacatacgacctcaggtcctcagaccgaccagcccaagaacatctcaccaatttcaaattcggtaagtgggctcatcttactctcttctccaacctctctcactgtccctcaaccactttgtcctttccactcttcaatctctccacgttcttttaactttgaacttcnctttccattttctggcgagagacaagagga

SEQ ID NO: 640824 - DNA, 106 bp, Homo sapiens
tattggttgcaatagcagtaggctagcatggttatcgcataataaactagtatggggcatcaggggtgtaggtgtgccttgtggtaagcatgtgggctcagggcat

SEQ ID NO: 640825 - DNA, 179 bp, Homo sapiens
tcctcttcgttgaagatcgaggggcatcatatgccgaggccgatgccgaaattgatgaagcattttatgcccattgctgaggatgaaatcctagatgtcaacaggatatgactcatgtcccagccacttcgtgtcagggactttccctggctaacacattcatccgagaaacttaggat

SEQ ID NO: 640826 - DNA, 320 bp, Homo sapiens
  misc_feature (10)..(11): n is a, c, g, or t
  misc_feature (64)..(64): n is a, c, g, or t
  misc_feature (126)..(126): n is a, c, g, or t
  misc_feature (230)..(230): n is a, c, g, or t
  misc_feature (308)..(308): n is a, c, g, or t
gaccaagccnnttgagtgttttcctcccctttggctccaaggttacacattaacccctgtgganctcttaagtcaaccaaagcccagtcggtttctagatggaggctcactctatcgcccaggctngagtgcaatggcagaatctcggctcactgcaacctccgcctcccagattcaagcgattctcctggcctcagctactctggaggctaaggcaagagaatcccttnaacccgggaggtgtaagtttgcagtgagccgagattcgcaccactgcactccagcctgggatgacagagcaagtgctncctcttcaaaaa

SEQ ID NO: 640827 - DNA, 118 bp, Homo sapiens
agtattactgatctttggtgttgtgggtagcgcggggcgtatctccagagcgaactcagtgtgattgggggtcgtgtctaggccctgggggtgggaagctgagggtgaggctggggcc

SEQ ID NO: 640828 - DNA, 644 bp, Homo sapiens
  misc_feature (148)..(148): n is a, c, g, or t
  misc_feature (276)..(276): n is a, c, g, or t
  misc_feature (279)..(279): n is a, c, g, or t
  misc_feature (285)..(285): n is a, c, g, or t
  misc_feature (298)..(298): n is a, c, g, or t
  misc_feature (304)..(306): n is a, c, g, or t
  misc_feature (313)..(313): n is a, c, g, or t
  misc_feature (318)..(318): n is a, c, g, or t
  misc_feature (320)..(320): n is a, c, g, or t
  misc_feature (322)..(322): n is a, c, g, or t
  misc_feature (566)..(566): n is a, c, g, or t
  misc_feature (642)..(642): n is a, c, g, or t
gacacaggcagtaccagtggcaccagcagcccaccagccccctgccgccctgtaccttgtatctccctttccccagggcctgtgcttgaacctgaggcactgcacaccccacactcatgaccacaccctccctactccctttcacccncagcctggtcttcacctaccacagcactcctgagccttgtgcctcagctcatcgcaagagtagcagcagcagcggagacccatcctctgacccccttggctctccaaccctcctcgctttgtgaggcnccngagccntactccctgcagntgcccnnnaagcaangtctncncnccttcccccaccagtccagctggcctggacagtatcccatacccaactccagcagctgcttctccatccctctaatgagactaaccatattgtgcttcacagtagagccagcttggggccaccaaagctgcccattgtttctctaggagctgggcctctctaggcacaatttggcactaaatcaggaggacaaaatattttcccatttctggccggaggaattccgggggaggcccaggaggantttgttaggattccttaggagggtcctctggggaggccctaaaccctttccagattcattggccacatttttcccntc

SEQ ID NO: 640829 - DNA, 612 bp, Homo sapiens
caacgatggtcctcagcttccacgtagcaggattacaggtgcccgccactatgcccagctaattttttttggtattattagtagagacggtttcaccatgttggccaggctgggcatgatggcatgtgcctgtaatatcccagccacttgggaggctgaggcaggagaatcacttgaacccaggaggtggaggttgcagtgagccaaggttgtaccactgcactccaacctgggcaacagagggaaacttgtcttaaaaaaaaaaaaaaaaaaaaaagcttgctgagatgcttaagtgagggaatggtgccttccatttttcctgactcatttgcctgtagcatagggaggggtcaatgataccgaagggaattggttttcatttaagccccttttatgtaaggggcaagaggtgggctattggatatgttttctcccttttaagcctgggaataacccatccaagtgggaaatattatctccattttataaacaaagaaatggagattcagagtggtaaagtcacgtttccctgaatcgccttgcaaataggtgattaaaatctagtctgagcccacatcttcattctttcagatattatgtcataatagc

SEQ ID NO: 640830 - DNA, 160 bp, Homo sapiens
cggacgcattcagacggctctatcttcccaaggagcagtgcacacatgcttccggcaatgtggtctcaccaggcaccagatcaccatcactgacaactcgaaccaagaaccaactggaatcatgctccgggcacagacagaggtgagaattattgtgtga

SEQ ID NO: 640831 - DNA, 537 bp, Homo sapiens
  misc_feature (25)..(25): n is a, c, g, or t
  misc_feature (33)..(34): n is a, c, g, or t
  misc_feature (59)..(59): n is a, c, g, or t
  misc_feature (472)..(472): n is a, c, g, or t
gactgatcagagcataccctatccngatgtgtnnccctgtgatctacttctggcagatnctcagtctggacaggtcttccctatgagatagaacctgataaggagctagggcaattctgacaacattaccaaaggcccacataacttctaaattttggtctggtctgaaggaaaacctgttcttgccctagtgatggatgaactctcttatctctggcttctagagaaaaaaaaaagcatacctcttttactttttaagtacctccatcagagtcatgaaatcacctgtcaagactatctatcttttatgtttccattctggtaagaactctttaaatgaggacactgctgattgctggtgatgttttttgagcaaacactcgggggtatggatgaaagccaatcgcaggtcaaatgactccttggggaagctacttctcctctattcagatttcactaaaatcttccaagntgaaagcaaatctaggatttcggtcttcattggctgtccatttttgtaatgaacgagtgtttttc

SEQ ID NO: 640832 - DNA, 286 bp, Homo sapiens
tcacacgactccctgtgcgacgaccggtttctcacgtgggacgacacgacaaccacgctctggacgactggactgctggtgactggctgcccacaccacacgtgctgacattgtgcttgacacacctgacgctgtgcaccttaccacaccgtggttactgtgtgtgttggcctgaggctgcggatggctgcacacccttagcacacccccacgcaccattatgggacgtgccgacggatggagtggactcacccatgacgtgtcaccgtgactgttggacagaccc

SEQ ID NO: 640833 - DNA, 442 bp, Homo sapiens
  misc_feature (51)..(51): n is a, c, g, or t
  misc_feature (64)..(64): n is a, c, g, or t
  misc_feature (72)..(72): n is a, c, g, or t
  misc_feature (106)..(106): n is a, c, g, or t
  misc_feature (118)..(118): n is a, c, g, or t
  misc_feature (122)..(122): n is a, c, g, or t
  misc_feature (187)..(187): n is a, c, g, or t
aagttttttcaaccaaccacacttaagcccaaaattattattcagatttgntgtgaaaattaancagcaaantgcaaaaataagagtaccagaagtatgatcaaanccatgcattctnacanttttaaggtcagctcatcattttgggaagggcagggcttggttttaaaagtataacttaaccggntgtcacgcctgtaatcccagcactttgggaggctgaggcaggcagattgttgagtccaggagttcaggaccagcctggacaacaaaaaccccatctccactaaaaaaacaaaacattagccatgcacacctataatcccagctactcaggaggctgaggtaggagaatcacctgatcctgggacctgtggctgcagtgaccaagactgcatcactgcactccagcctgggcaaccaaagcgagaccccttctcaa

SEQ ID NO: 640834 - DNA, 155 bp, Homo sapiens
gatctgccgccgggttgctgtgcgactattctccgggagccgtccgtgtaaccgccggaacctggcggaggttaattatagaaatgccaagtagggaatttcccattggttaagtggtaagaggtcgattggccttggagttcactttattatga

SEQ ID NO: 640835 - DNA, 133 bp, Homo sapiens
ggggacttacctttagttttaggaggcttgagattggaggatctcattctgccttcctggttcctgctttggtgtagggttggaaaacagaaatcctctagctctcctcagattctacctccttaagctttta

SEQ ID NO: 640836 - DNA, 103 bp, Homo sapiens
cgtgttttggtaaggtccacagtgaaaagtcccaaactcagccacgatagaggcaaggccgccatatacaaagggtttccaatgcagaccagacatctcatga

SEQ ID NO: 640837 - DNA, 559 bp, Homo sapiens
  misc_feature (70)..(70): n is a, c, g, or t
caccatcggcggaaatccccgagggtcacgcacggcaatcaacgaatccagtgtcagaaacagcaatganacagcgccttcggtttctgccagaacacttgtaattgcttcgacgacattgttagccggcgttcgggcaatgctgtgaagaatcgtttccgtatcagatgtggaggaaaagattgcaccttcgcgttcgagttcccgacgccttacatccgcgaaaggcagatttccattatggcagattgccaattggccatgctggcagatgacggaaaatggctgtacctcttttattgtgttgcggcctgccgttgaatatcgcgtgtggccgatggcagaattcccgcttagctttctgagagtttcttcatcaaaaacatcggctaccagcccaatcgaacgaaactgatgcagttcatttccatcggaagaaacaatgccgcaagcctcctgcccgcggtgctgcagtgcaaaaagaccgagctgtgtaagtgtggaagcctccggatggccaaaaaccccgaaaatcccacactcttctttgaacttatcg

SEQ ID NO: 640838 - DNA, 151 bp, Homo sapiens
aattaaaaattgccaagaatggtggcatgtggaggcaaatggaggctgaggcagtaggatcacttgagcctggaaggccaaggctgcagtgagccctgattgtgccattgtcctccagccctgggtgacagagtgcatacttttctaaaaa

SEQ ID NO: 640839 - DNA, 278 bp, Homo sapiens
ggtttcactcagtaaacaggatttactactttaaggaaattttaattggaaaaaattgcccgtggaaatttctgtatcagattgtggtttactgagttatcaccttaacctggacactattcctaaactgcaccacagccggttgtttcaagaaacaaaaacaggccgggcgtgatgctcaccacctataatcccagcactctgggaggccgaggtgggaggatcacctgaagccaggagttcgagaccagcccggccaacatggcaaaaccccatct

SEQ ID NO: 640840 - DNA, 719 bp, Homo sapiens
tttttttttttgtggaaatggagtcgggctctgtcgcccaggcgggagtgcaggggcggcatctcagctcacgggaagctcggcctcccgggttcacgccatggccattctcccggcctcgcctcccaagtagcgtggggctacaggcgcccgccaccacgcccagcgtaattttcgtggtattttttatagtagagaacggggtttcaccaggttgggccaggcgtggtctcgaactccgtgacctcaaggtgatccgcccacctaggcctcccaaaggggcgtgggattacggggcgtgagatcacgggcgccgcggccccaggtgacatatttagtgagaaacaaagagacaaggcagtggcgtgacctctccgagggttacagccgtggagaagagggtgaaagggtgttgggtggttccaagcagcctcagggcagctggtgctgcggcgtgcatgttcgggcccgaaagcggggctatggggtctaccagatgccttcagggaaaagggccagaacctgcactggcacggcacagtcactgtgtgtggtgtgggacccagtgtcggctgagaggcctggaggggtcttgcctcccttgtagtccttggtgtcctaaccaggagggcctcatttggcctgggcggccctgtgcccactattcacaggccaggccggcacatgaccttgcctaggggggaagtccccagtgtttc

SEQ ID NO: 640841 - DNA, 1033 bp, Homo sapiens
agcggggtgaggctatggctgcgataaaggccgtcaactccaaggctgagtgtggcgcgggcccaggcagcctttgccctgtcaactatatgcgccgcccgagggctgcaggactgtgcttgcggaccaacttgggtcctaacatggcaccagtgaagaagtgcttgtttcgtggtgcagcatgacatccaagactcacccaaagatggcaactgtgctgctcgaatgagatgcaagacttcaacagtccaacagcgttccttgcatagcaagaagtacgcaacagcgtcaggatgacgtcacaggacgatcgtacgtacttcaaatgttcgtaaattcattggagagttcattaaagactaagctgacctgtacatttctgtagggcctgcagccctagaataatagctgaaggatttgaatgctgcaaagataagcatgcacttgaagttctcggacggaagttagaagtgacaacaggatgatgaccatgcaaaaatcctcttagatgtagctagaacatcattacgaaactaaagttcatgctgaagctggctgatgtcttaaccgcaggttgtggctggattctgtatcggctgttagcacatgaccagggttaccctattgatctcttcatggtagaaatcctggagatgaacgcataaccttaggaaccagtaatacgaaagttgatccaaggattagcttggactcatggggtgtgccgtcatcccagatcttgaactaatgcggaggttgaacgattggcgcttttatcccttactttgcaaacggcttcacctggtaacttgttggcacacaacgggaagtgtgaagctcctgcgccctcgttggtaatagaggaactggccgtattaacacacaggccccaaatttggggtgaacaaggtcggagaggaccaacttatttgctcgcatagcagttctccgaaaacatatagtgaaccctcaaagggacaaagtctctgtggacacggcaactcaaaaaggagatgttcggcgctattaccaa

SEQ ID NO: 640842 - DNA, 118 bp, Homo sapiens
  misc_feature (27)..(27): n is a, c, g, or t
  misc_feature (60)..(60): n is a, c, g, or t
tgtgttcttttccgatcttttgtagtnatacacatgacaattgggtttcacgcacgtcantgagatgttctccttcaaaccttgttactatgtcagcacattaactgcctggcatgga

SEQ ID NO: 640843 - DNA, 736 bp, Homo sapiens
  misc_feature (1)..(1): n is a, c, g, or t
  misc_feature (26)..(26): n is a, c, g, or t
  misc_feature (42)..(42): n is a, c, g, or t
  misc_feature (348)..(348): n is a, c, g, or t
  misc_feature (358)..(359): n is a, c, g, or t
  misc_feature (361)..(361): n is a, c, g, or t
  misc_feature (384)..(384): n is a, c, g, or t
  misc_feature (393)..(393): n is a, c, g, or t
  misc_feature (405)..(405): n is a, c, g, or t
  misc_feature (413)..(413): n is a, c, g, or t
  misc_feature (415)..(415): n is a, c, g, or t
ntagttgctcgtgtggctggcttagnaattgaccctaccagntgcctcctcctggtgactaccagctatggaaccgttggatacaacctacctgactcaccccacagacctcacagcgcacatggacagcccccacacgccagagtgacctgctcggttgcagcgggagtcaagaaatgtgcctgctgacactcaccccacagactagtgccccgtggaaaacttatttgggtaatgttctgggccgaataaaggctggagtcccacagacccctttcctctctcctgctccccactcatcttccccattttgttcagccctatgaggtgtgctactgtattagtccnttttcacacnncnggtaaagacatgcccaagactgngtaatttcnagaagaaagagntttaatanangcacagttccacatggctgggtaggcctcacaatcatggcgcaaggtgaaaggcacgtctcacatggcagcagacaagacaagagagcttgtgcagggaaactcctctttataaaaccatcagatcttgtgagacttattcactatcagaagaacagcatgggaaatacctgcccccatgattcaattacctcccacctgttccctcccacaacatgtggggaattcaagatgagatttggctgggggacacagctaaaccctttttttagttcccttttttctctggatctgggaggataaacctaacttggggattgtc

SEQ ID NO: 640844 - DNA, 178 bp, Homo sapiens
ctggtcatgtctacgagttcccctcacgcccattccacaacagtcaaccatcgtaaagcacaaaccctgctcagcccgtgttgtacaaaatgaaggggtgcagccctcgcccggggcacagggtccggacagctcgcggggccaccctgtccacggctgtgcatgctctacgctggtg

SEQ ID NO: 640845 - DNA, 479 bp, Homo sapiens
cctcatctaatctgccttcccctcatccacagacaatatggagaaagaaaatgggaggatgtatgttatccactttatctatgctttgtccccgttgttagactgacagcgtcagtaaatcggtgggacatagatagaaccgtgaacagaaaacagaaaaaacccggagacagggagaggctgagagggaagtggtggcatttactgctctgacacttccactgtccctgctggggatgctggggccaaggcctgtggggcctgtgaactgcacagccaggagcaaggaacccactaaatactccgtcacctccatgtcccctctacagtgttaaattattacataagcaggtgaaaggtagaaggcgaattatgtgagtaaatatggtctgttttctcttcagcaaaaatgactatttttgtgtgtgactaatttatttttattattgtaaagatacaataaaccggttgaaatatct

SEQ ID NO: 640846 - DNA, 129 bp, Homo sapiens
ccgatccttctccactggttgcgggctacaagttcacacagcagcctgataattttggtatttttagtagagacggggtttcaccatatgggccaggctggctcgaatcctgactcgatgatccaccca

SEQ ID NO: 640847 - DNA, 376 bp, Homo sapiens
  misc_feature (7)..(8): n is a, c, g, or t
  misc_feature (33)..(33): n is a, c, g, or t
gttttgnnctttcctgtaaccttttcagggctngcgtcccctgtaggtggggggtatagtggaaccgggcctgggttttggggactggagggcaggggtccttttgccctggggtcccagggtgctttgcctgctcaggcaggccttttctgggagcccctcgccccgagactcagcttggccaacttggggggctgtgtccccccagcccgcccgtcctgtgggctgccccgctccccttgttccctcctgccccggttcgagggccgagtctgtgggccctttctgccttcctgcccctgtccttttttacccgtcgccttcccctgttatccccgcctcctggctccgtccttttataaagaggggccctcca

SEQ ID NO: 640848 - DNA, 788 bp, Homo sapiens
gaggacaggggacagtggcgggcgtgtgaataagcttccagagaatgatgcccacatcctagtgtatcctattgaatagaggggactgatagactcccaaggcatcccccaggcttgtgagtaacatcagggcctgcgcgaggatgattgctggacggtctgtaagaactatcccttgggtccccgtggcgtggacaagcttatggtagagtggcagaggcaaagcaagaattgctaatgatgggggcacaattctgacactgtctggatgttgtccatcctgcgagcaaagacgttgggtagacattgccaaatcccaagatgctgaggtgggtgatggcaccagctcagtgaccttgctggtctgcagagtttctgaagcaggtgaaaccctagtgtggacggaaggttgtacagcccgcagatcatcatacgagcgtttccgcacagccacccagctggcgagttaacaagatcaacagagatagctgtgaccgcgaagcaaggcaggagtaaagtggagcagacggaagctgctggaaaagtgtgccaggaccgctctgagctccagaagctgatctcccagcagaagagctttctttgctaacgatggtggtggatgcagtggatgatgctcgatgacttagctggagctttagaatgataggcatcaagaaggtacaggggggaagcccgtcgaggattctcagctggtagctggtgttgcattcaagaagactttctcttagcgccgggttgaaatgcaatccaaaaagtaccacatgccc

SEQ ID NO: 640849 - DNA, 633 bp, Homo sapiens
  misc_feature (24)..(24): n is a, c, g, or t
  misc_feature (168)..(168): n is a, c, g, or t
taaagagactcgtgtccgattggnggtctttctcccaaaggaggcagttatttgataaacacgaatatccacggttcccccctgttgttagtaatgagctgcttcacacaatcttagccttttttacaacaagacatcacgcctgcggtgggcctgtcccattcacgnctctgcgactgctcgttaggccaatcggaactgacctctcgggtgtcacgccacctcgcgtccgcgctctgtgcggcaaggtgtttaggctgggtctccacacgttattcgctgtcaatatgttcaacacgtcgctcagtgacttgtaattcccatctttatagggagcattgggcggccggctccgctaccagctctcggttcttgataagagtgacatgggatacgcccaaccagccagtccctagggagtgcagttccccttcccaccgtgatgaaacgttctgtcttgattattagatcctccgtaggtgggccaaggccattctcatgtcagcatccgcccgaataacaatcgttctttctctcggtcccaaatatcaggcagttgcaggttgtggcaggtcactctcaagaaaaacctcccctcggtcagtgcagcgccccatgtcaacttacaccctg

SEQ ID NO: 640850 - DNA, 444 bp, Homo sapiens
  misc_feature (75)..(75): n is a, c, g, or t
  misc_feature (87)..(88): n is a, c, g, or t
  misc_feature (417)..(418): n is a, c, g, or t
  misc_feature (426)..(426): n is a, c, g, or t
aaaatggtgtaaactcttttgaagccaaaagggagggtttgtttagcccaaaagttcaaaacaagctggggaaanaccaaaaccccnntttttttaaaaatatatatattttaaatatacttaaatatatatttctaatatctttaaatatatatatatattttaaagaccaatttatgggagaattgcacacagatgtgaaatgaatgtaatctaatagaagcctaatcagcccaccatgttctccactgaaaaatcctctttctttggggtttttctttctttcttttttgattttgcactggacggtgacgtcagccatgtacaggatccacaggggtggtgtcaaatgctattgaaattgtgttgaattgtatgctttttcacttttgataaataaacatgtaaaaatgtttnnaaaaaatnataaaataaataaatgcg

SEQ ID NO: 640851 - DNA, 376 bp, Homo sapiens
agcgtaaaccgccggccagtgattccgtattcttggccatagttgtttcttggggtcaaacctccgccctgagattccaaatcctggccctaagttcttcctgggggcaaaacctcctccctgagttccaccccctgcccttaattttttcccaggggcaaaacctcttcccggggttcaaaaaccttcccttaaattcttaacctgggccaaagcttttccctggggttaaaaaacctgccctaaatttcttactttgggccaaagctttttccgggggaaaaaaacccccccttaaattctattttctgggcaaaagcttttcctgggggaaaaaacctcccccgagatgtccaaacctgggcaaaagattttt

SEQ ID NO: 640852 - DNA, 840 bp, Homo sapiens
  misc_feature (38)..(38): n is a, c, g, or t
  misc_feature (61)..(61): n is a, c, g, or t
  misc_feature (74)..(78): n is a, c, g, or t
  misc_feature (80)..(81): n is a, c, g, or t
  misc_feature (96)..(98): n is a, c, g, or t
  misc_feature (114)..(116): n is a, c, g, or t
  misc_feature (118)..(118): n is a, c, g, or t
  misc_feature (124)..(124): n is a, c, g, or t
  misc_feature (129)..(129): n is a, c, g, or t
  misc_feature (136)..(136): n is a, c, g, or t
  misc_feature (153)..(153): n is a, c, g, or t
  misc_feature (157)..(157): n is a, c, g, or t
  misc_feature (187)..(187): n is a, c, g, or t
  misc_feature (281)..(281): n is a, c, g, or t
  misc_feature (288)..(289): n is a, c, g, or t
  misc_feature (291)..(291): n is a, c, g, or t
  misc_feature (298)..(300): n is a, c, g, or t
  misc_feature (312)..(313): n is a, c, g, or t
  misc_feature (319)..(319): n is a, c, g, or t
  misc_feature (341)..(341): n is a, c, g, or t
  misc_feature (357)..(357): n is a, c, g, or t
  misc_feature (359)..(359): n is a, c, g, or t
  misc_feature (369)..(369): n is a, c, g, or t
  misc_feature (371)..(371): n is a, c, g, or t
  misc_feature (382)..(382): n is a, c, g, or t
  misc_feature (468)..(468): n is a, c, g, or t
  misc_feature (476)..(476): n is a, c, g, or t
  misc_feature (478)..(478): n is a, c, g, or t
  misc_feature (482)..(482): n is a, c, g, or t
  misc_feature (485)..(485): n is a, c, g, or t
  misc_feature (491)..(491): n is a, c, g, or t
  misc_feature (813)..(814): n is a, c, g, or t
  misc_feature (822)..(822): n is a, c, g, or t
cgcctgaaaccctcgcgccccccgcgccccccgcgccnctctttttccccttgatggaaantgaccatacaatnnnnncnnccttcaggggatcannnggacggagtggggggnnngngggggngaggnggggggngtggtttccaatgtgtncaangagatattaggagcagaaatgcaaggggcngcaagacctaccaggacagaactttccccaattacagggtgactcacagccgcaagggtgactcacttcaatgtgacacttccggctgcggtgngtgcgcnncngacacgnnnggggggggtggnngagagngacaggcagctcggactcaacnaccatagataatatcncngaaaacctancngccagaggggngggcacaaagagggatgtaatgcactttgggaggccaaggcgggaggatcgcttgagcccaggagctcaagaccagcctgggcaanaaaccaanancccnaanacaaanaaaaatatatatattttaaatatacttaaatatatatttctaatatctttaaatatatatatatattttaaagaccaatttatgggagaattgcacacagatgtgaaatgaatgtaatctaatagaagcctaatcagcccaccatgttctccactgaaaaatcctctttctttggggtttttctttctttcttttttgattttgcactggacggtgacgtcagccatgtacaggatccacaggggtggtgtcaaatgctattgaaattgtgttgaattgtatgctttttcacttttgataaataaacatgtaaaaatgtttnnaaaaaatnataaaataaataaatgcg

SEQ ID NO: 640853 - DNA, 225 bp, Homo sapiens
ctggattggagtggttattgatcctgagaactcatgggaatgttgtgtgtacagcagtggtgtctggaggaagtcgctggaggaagaatctataggatcatcagatctcgcgcagaattgagtgcaaacagatctcccttttcatcctctcactcagatgatgtatagccctcagacttctgattatcttttagctctcagcactgaaaatggcgcacgtaggag

SEQ ID NO: 640854 - DNA, 942 bp, Homo sapiens
ggcctccaagcgcgccccgagcagccccgtggctaagccgggtcctgtcaagacgctcactcgtgaagaaaaacaagaagaaaaaacaggtttttggaaaagctaaggctgcgggaagtaagcaatgaagccagccaagctggcccctggtgctgtgtgtgctgacctccaacaggcaccagcaagacttttctcaaacactggaacggctgctgcaacgagtggctgctgaaacaacaaactctcatggccccagaaaagcctcttgtcatctctcagactgggttccaacaaagaagcccaaaattatccagcacaaacaaaaacacgagacctcgcctcacgctgaagggacgaggagatgccggcaggaaaagaccaggaggccagcacgggcgctctgttccttcaggcttccaagatggacaggagggcgccagtacctcgcaccaaggccagtggacacacgcgcacaataagaaaggaaccaaggacaggacaaatgcgtgatatcgatccagaacgcacgggacatcgcagcatcacgcaagcggcaaagctcaaggacgcgccacccccagcccccacccaccgcgccacacgacatctgcgctccgaccgacccctgcgcacccacccgcgcatactcccaacgactgccactacgcgtcccacgcacgcgcgccaacaatagccgcgccaacacacccggcccccccgcgacgcgcaccccctacacccctcaccctcgcgaccagacacccccctccgccggcccctacaccagccctaccccttgccccgtctccctgctggccggtcccccacacgagcccccccccccgccccccctcagcccccgcgtcccccccccccacctcgccctcccgctctccgccccccccccccccccctctccccccccccgcccctcctcccccc

SEQ ID NO: 640855 - DNA, 631 bp, Homo sapiens
cctacccccaattaggagggctcggcctgatccaggactgcaccccacccccacgtccagccatccaacctcacttcgccttacaggtctccattttgtggtaaaaaaaggttttaggccaggcgccgtgctcacgcctgtaatccaacactttgagaggctgaggcgggcggatcacctgagtcaggagttcgagaccagcctggccaacatggtgaaacctccatctcccagctgggtttcaccaccaagctcagtgcctaccatgagctgtgcaggagacctggctggccgccctgatcgtgttggcggtgcttgaagccatcctgctgctggtgctcatcttcctgcggcacgggattcgtatggccatcgccctcctgaaggaggccagcaagcctgtgggacagcatgatgtctaccatgttcatacccacgtggtcccttttgtcctcctcctcatctgcattgctacgtgggccatgactgctctgacctggctaattcggggcaaccccagtatgtctctgggcatccacatcagctccccggctggagaaagtgccataactcctcatgcaccccaaggccaccttgtgaaccctcgtgccagtgttgtgtgcgttccagg

SEQ ID NO: 640856 - DNA, 313 bp, Homo sapiens
tggccaggactagcttaatagacattattaccccatggatttatgggataataaaggttatttcatgtctgcttatgaagatactatgtatgaaattacttcagagagctatatgtgatgtgaaaataaattagctagggttaaggttatattctatttccagcatagaaggtggataatctaatggtgtagaaagaatcactaggttgtcatttaaccagttattttcatatatagtatcttataagagaacatgaaaaacatttattatcccataaaatccatggggtaataatgtcaatttaagactggt

SEQ ID NO: 640857 - DNA, 275 bp, Homo sapiens
agtagcccatcagaagaatcgtcgttccaggtacatttaaaagtaacaagctgtcctgatcttgagtctcagaggtacagtccaaaacagtcccagatctatgaacattcactttagggacagtgaccaatatcgctattttcaggggccttccctatacatccactcggactaatggcaaacaggcttacctccagttgcaaaggataatattaaactgtagtgacttaactaaggttggatttattctctgacctattccagaattgccccga

SEQ ID NO: 640858 - DNA, 498 bp, Homo sapiens
ttggacaaaattccccagtactgctttaatagtgaaaaaaacacacccccatccaaaagaagtttcaacacggcttgtcgttagaattcaaagttttttcctgccatggggagagcccaggcgaacctttcccgctgggttttgctggagatcttttccactggcaccctgaaccgcttgcaccaggcaatgctgatcctggggtccaggtagttgagcttggacgtgcccagggccacctggttgttctcctccttggccggggcctgcacactcagctgcgccagctgctcctgcagcttttccaggagccgcctttttttctccaggacactcctggacttgccatccccttgggctttgggctaagccctcgccctcctaagttttgccctggccttagccacctgctccttttttgcctggatctttgtttggagattttgcatcgactttttgaacgtactgggggttgctcgctgatggttgcagaaaatg

SEQ ID NO: 640859 - DNA, 173 bp, Homo sapiens
gatcccccgccataccggatttcactggtgctttttctacagtctccctcatcatcattaatcatcatcatcatcatcttcatcatcatcctcttcatcatcatcgtcatcatcttcatcagcagcaagttttacttttttctgtggaacctagctaccacctccagtgaaat

SEQ ID NO: 640860 - DNA, 113 bp, Homo sapiens
tcgaatcgagctcggtaccgaattcgacacgtgtgcattatgacatgcgccctcaggcctgcacggtacttccgcagcgggtacagccgctccttccgctgctgcttcttggt

SEQ ID NO: 640861 - DNA, 101 bp, Homo sapiens
agacagtagcaggttcaaggcagggtgcatggtggctcatgcagggtggggcatgcatgcaggctcattgtttttttgtgcaattcattcgcatccatggc

SEQ ID NO: 640862 - DNA, 141 bp, Homo sapiens
  misc_feature (140)..(140): n is a, c, g, or t
ggaaaaacgtcagaaaagggaagtggggttaagatggtgcagacgagttagtgggtgcagcgcaccagcatggcacatgtatacatatgtaactaacctgcacaatgtgcacatgtaccctaaaacctaaagtttttttna

SEQ ID NO: 640863 - DNA, 284 bp, Homo sapiens
  misc_feature (56)..(56): n is a, c, g, or t
  misc_feature (126)..(126): n is a, c, g, or t
  misc_feature (188)..(188): n is a, c, g, or t
  misc_feature (216)..(216): n is a, c, g, or t
  misc_feature (236)..(236): n is a, c, g, or t
  misc_feature (244)..(244): n is a, c, g, or t
gagatactttttactgtgatatgtaatttactggagacaggaactgctcgtttggngatggttagcatcacagggtgttttaagtcgatacttgcaacccttgagctcaccacagtagcaacaggnggtggctaggaaattattcacagcaggacagtacgcactgcaattaattgtatgcagttatnatttaataccacatctttatgctcacgnttctctcaactgtgaatggngccatgtnacagttggtatgtgtgtgctttaagcttcttgataaattt

SEQ ID NO: 640864 - DNA, 289 bp, Homo sapiens
ctatagaatctctgcagctctcttgccttctccctaagctggtacctgccctccatataaatgggcttctgatagtatacacacttctaataaaatccacaataaaccatgttctcactttcacatgtatcatagcaactgctttatatgactgatgatggcttccttgcacaccacatatacagtgcgcatgatatagccgggcttctggagcaccagctgcagcctggctactgctttttactgcagaatgaactgcagtacagcatagcggagtggaggcttgctg

SEQ ID NO: 640865 - DNA, 251 bp, Homo sapiens
aagcgggagtgcggtgtcatgggttgtggctgactgcagcgcgtcaaactccctggactcaagcaatcctccccctcgaggtccctgagtagctggtactacaggggtgcaccagcatgcctggctaatttttaattttttttgtggaaacggggtctcactatgttgcccaggctggtctccaactactggcctcaagcaatcttccagccttggccttccagagtgctgggattacaggcatgaaccac

SEQ ID NO: 640866 - DNA, 791 bp, Homo sapiens
atgagtacatattggccagcgtgctccgagtatgatgaactccgtgggtctgagagtgggcaaacagtggaagaaggttggtgacctggtgcctgtgcctgacactggactagaccttgcatagggacccattactggaactagtagacgcatgagactatgagagaccccattgagaagtaattggcatttatcacactgtggacattctaatacctgctatcactactgtgaaactactgaatgcttacaccactaggagcgccttgtgtgcttcaatcgtcatgtgacctagtgtgagaggcatcgcgggactccgttcgcacagactgtcgaaagagacacaggcgagcctattggtgcgaacactttggtgcaacagaggacatacatgtggaggcacgtcgcgctatcgcgtctagcactggtgacacataattgcggagccgggacacaacattgagagggtggaccagaagcacacaccaccgaagcagaactccgcagcagaacagaaaaaagaagaaagagaagaagaacaggaaggaacacccacgacagcgacaaagcaacaaacaaaacgaacagaaacaaaacgataatcgaaaccacgggagagagaaccaacaaaacacacgtaaccacaatatgccgccaaaaccaagctaggagatcacgacacacaaaccaaccagatacacgcgccacattaggagcaccacagccgcgcacgctgcagaccacacaaaaaaaatgcagagaaaacaggagggacaaagaagcggacaccc

SEQ ID NO: 640867 - DNA, 189 bp, Homo sapiens
agcttttaaaatgcttttgtatttgggcctttcatacaaaaaagccaaaataccattttcatgtaatgctatacttctatactattttcatggaaaaactacttctatactatttccaggaaaaacatacctctatacctttttccaggttaatactatacttctatattaaagttttacccactcaaa

SEQ ID NO: 640868 - DNA, 337 bp, Homo sapiens
tgtcttacgctgaatacaaaaatattaagttaggccaattaacaaccctacagtggcctctacatattcaaatgaatgatagtcgcacatctcacacttaaaatcaaaagttagaaatgagctcagtgaagaaggcatatcaagagccaagatacgacaaaaactaagcctcttgtgccaaacagccaagttgtagatgcaaaggaaaagttctggaaggagattaaaagtgctaacccagcaaacacatgaataataagaaagctaaacagtcttattgctgatatggagaaatcttaatggtgtcaaaagaagaccaaactagtcacaacatttc

SEQ ID NO: 640869 - DNA, 370 bp, Homo sapiens
aaaaaaatcactgaggctaatccaaatgtctgcttgacgaggcttttgtggagcaaggaggagaggcttggtgaccagacacctggcgaaatggcactgatcctgatatgatccagtggtgctactcggtgtggccaggtgatttatggagggaacttcagacctgtttctatggttgccccacctcccactccgactttcttacatacttcatgttcgtgcgtttcaagactttgccgattatccacattccatctctatttattatttacttaatattgttctctaaacgtactcgtgtttgaagttaaatgtgctcattatgtttcttctaataatcattaaagcaaatatataatcattcgaaaaa

SEQ ID NO: 640870 - DNA, 269 bp, Homo sapiens
tcccccataggggtttcgcccccgatggtgggtccgggcctccccatggggcccccccttttaaagggtggtttgttccccgattaaagtcccccggggtttggggtccggccgggggaatcccgggggggtttttttttcttccaattcccccccgggcgaaggggccagggaaataggggctccttccccaggggccctcccccgggaatggtttcttttccccttgggttttttcccccccccccccccggccgggggttgtttta

SEQ ID NO: 640871 - DNA, 709 bp, Homo sapiens
gggggtaaaacttagtacatgtccctaaatatttaaaaccaaacaaccattaagaaaaaaaaataaaacccaaaaaaagaataaacaaaaaaaaaaagaaacctgaaacaaaaaaaaataaaacccttggggcccgtttggccccttatgccttttggttcctataatttttactaatccgtctgcattttgggtcatttggccacttgccccttttggggattcgttttaaaataacttggccggcgtttaacacggtggggtttggaaaacccctggcttacccaaccttacgggttttgagttaaatcccctttttcccctttgcctttttcccaaaggggcccaatgggaggggttttcaaaccgttggcctttcctaaaggtgaatggcaatttgtaggcgttattatttggataaattttgggttaattgttgtaaaattcaatttttttttaacccattggctttaaaacggaaaagccctttttatgtaaaactgttaacccgagaagggatagcccgttgtaccatttgggaccgggttccctttttagactttgtatttaatggtactgggtttcctttttttctggcaatgggcctttacggggaacggtccctttatgaacttttttgggataagggtctctaaggcctaagtcggaaccctatagggagccccctttgggttctccgggtgccctc

SEQ ID NO: 640872 - DNA, 319 bp, Homo sapiens
tcatatgacgtagtcataacttcacataaacttccgtgtctcgaaagcgtcaagagatagagttatgagtcgttgtttctttttaaatgggggtagttttctatctgtcatgggctctagcatctactccgctacccaattctgtcatctccaagctgagtttcctcttctgaggcagaggcgggagcagttctttttcagttctcatcctctccatcccaatccagtatatcaatcaactctaactcggagacgtctagctggccatgtttctacaactttcactggatttctttaggcattgaagcaaacatttttt

SEQ ID NO: 640873 - DNA, 195 bp, Homo sapiens
gtcatagtttgatcagtgtatgccgtcggtcgtgtgtgacctcgtccgttctaggtgaggacactggccatgcctttcaagtgcatgcagctcactgatttcatcctcaagttacccgcacggtgcccaccataagtatgtgctccatgcctggcagccggcagccatccatactccttttccgcccggggtacc

SEQ ID NO: 640874 - DNA, 659 bp, Homo sapiens
ggcgaggaagaagtcgacgtggcaggcggaaagcgtggcggctgcgtgctagagcctttccctttaccgcacccaagggagctggagcgacaacggaacgacgtcgtttccgtttccacgcacctcttcctgttcccgtccttgaggacgccgtgccgggtcagtgttagcctccaggcccgtggttgtggaaggcgacagagagtcatggcgatgtttgagcagatgagagccaacgtgggcaagttgctcaaggggtatcagacaggtacaagtccgtgagaacctggcgcacgcctggagcgctatgtaggagacgcaggccatgggaaaatgcctatgatctggaagccaacctggctgtcctgaagctgtaccagttcaacccaggcttctttcagaccacggtcaccggccagatcctgcttgaaggcccctcaccaacttgccgcacacgagacttctaccctgtgcaagtgcatgatcgaccaggcacatcaagaagaacggcaatccgacagattttgtacctcggggacctgctggagacctgtcatttccaggcgcttctggcaaagccctggatgaaaacatggacctcttggaaggtataactggctttgaagactctgtccgaaagtatatctgccatgtgtggg

SEQ ID NO: 640875 - DNA, 358 bp, Homo sapiens
gagatggggtttcaccatgttggccaggctggttttgaactcctgacctcaagtgatccgcccgcctcagcctcccaaagtgccaggatcacaggcatgagccaccacacccagcccatcaaagctttttgaaatgatctgtaggccaggagtggtggctgcggctgtaatcctaggatcatgaggccacaaggtgagttcaagactagcctggccaacatggcagaaccctgtctctacaaaactacaaaaagttagcttggcatgtggcacgcttctatgagtccaagctactctggaggctgaggtgggaggattgcctcagcctggaaggttgaggctgcagtaagccgtaatt

SEQ ID NO: 640876 - DNA, 91 bp, Homo sapiens
attgtttcaggtggaaagtattatacgagattctattaggatagatagtgctgtgactacattacagaatataactactgatgtctgcaag

SEQ ID NO: 640877 - DNA, 590 bp, Homo sapiens
gcccaccttctcccgctcacctcaccacctactaacgatctggtgatttgtctacagcaaccgaatatgctaataactacatgtgaacgtacatcaagccacatctccaagtacagtcgcatctacttctgtcagacctccttactaatgctgcggagtcgtgagatactggagcgcgtaccagtggtgctcccccaagagtggccgcgcagccaaagttctcgtctgaggagaggagatgatcgagcgcgcatgcacagctccatgtggatgccgctgatctgacagagactgcaggccggtcgactctatcagatcctggaccctccccggagctccatcagtcagctcggaagtccctgcacacagttggctatgaatgtcctcaatggatcccctcggtcgcactacctggctgacagtatcctctcatctcaaatctgcctccctgactcctaccgaaaagtgggctgacaggacacccagtgcagacctcttccactacgacagcatgaacgcagtcaactggggcatgcgagagtacaagatctacccttatgaactgctgctggtgactacaagaggaagaa

SEQ ID NO: 640878 - DNA, 387 bp, Homo sapiens
gcagccaccttccttcaccctcatttaatacatttcacatcctgacttgcctctgagaggaccactgtggtgtgactctgggttgggggagatggacacataagtaatcatgacacagaggctgggtgtggtggctcatgcctgcggttccagcacttcgggaggccaaggtggaggaatcgcttgaggccaggagttcgggaccggcctggccaacttggcgaagccctgtctctgctgaaaacacaagaattggctgggtgtggtggttcatgcttgtaatcccagctactcgggaggctggggcgggtgaatcgcttggacctgggaggcggaggttgcggtgagtcaggatcctgccactgtactccagcctgtacaatagtg

SEQ ID NO: 640879 - DNA, 188 bp, Homo sapiens
  misc_feature (122)..(122): n is a, c, g, or t
  misc_feature (152)..(153): n is a, c, g, or t
ctggagccaggtagttcgagaccagcctgggcaacgtggcatgactctttctgctaaaaaacaaaaaaagttaactgggtttggtgacatgtgcttgtggtcctagcagctcgggaggactnatgggacgaatccttgagcccagaaatttnnggttacagtgagctatgatcacaacactcagggct

SEQ ID NO: 640880 - DNA, 301 bp, Homo sapiens
aaaaaaaaaaaaaatttaaaaaaaaaaaaaaaaaaaaaaaaaaaaaaaaaaaaaaaaaaaaaaaaaaaaaaaaaaaaaaaaaaaaaaaaaaaaaaaaaaaaaaaaaaaaaaaaaaaaaaagggggcccccttttaaaatttccctttgggggcccaatttttccctcccccatttttttttaaaaaaggggcccttttttgggcccttttttaaaacttggccttggccccctttttaaaaactttaacttggaaaaactttttccttggaatttttggaaaagacccttttttttggggg

SEQ ID NO: 640881 - DNA, 277 bp, Homo sapiens
gattgtcctatgcgacagaaggaagtaggcattgacaatttagcaaaatccaggaccagaccgtctcagatcttctaaaacatatgccatagattctgtggcagatttcaaggtctcaggccatgggctggagtccaagagttaagcaaatcttagcaatggggagagataggcattagcattggaaagagggacaatacgcagcccttagtacgaaagcagacaccgacaataaggagaccgcgcctgactctaatctagacatagaagatatctg

SEQ ID NO: 640882 - DNA, 102 bp, Homo sapiens
atgctcagtgctctagctggcagcgggaacccaggctacaacccatatcgtcgagtgccaggacatgcagtgcgcaccgtcaagtgtcgatggcaccaagct

SEQ ID NO: 640883 - DNA, 250 bp, Homo sapiens
  misc_feature (80)..(80): n is a, c, g, or t
ggggtttcaccgagttagccaggatggtctcgatctcctgacctcgtgatccacccgtctcggcctctcaaagggctggnattacaggcgtagccgctgcgcttagccagaaataggtttttactctgtggctcaggctggtctcaaacttgtgggctcaagtgatccacccactttggcctcccaaagtgttaggattacagtgtgagccaccgtgcctggcggattcattttttttttttttttttaa

SEQ ID NO: 640884 - DNA, 364 bp, Homo sapiens
gaagagaaaaagtccccttgaaatcagggctactaatatgatgagtaaactaatttaaaatatcttcgttaaaaatttatatttttaaaatattctatttaaccaccacattcagcattgcacatagaaattatatttgcacctgggatttttgtggactgaaatttatgtcttcatacatttcatatgttgaaatctaatcccaatagatggtatttggaggtgaggcctttgagaggtaattaggtaatgagggtggagtccttatggatgggattactttctctttaaaaaggagggaggaagatcacttgagtccaggagtttgagaccagcctagccaacactgggagactctatctgt

SEQ ID NO: 640885 - DNA, 117 bp, Homo sapiens
tcccctcagttaagcgagcataacggagctcagtaagcggagcatcagtaagcgagcatcagtaagggagcaacacaactatacccccagcaggcgtgaccgctccgcttactgatg

SEQ ID NO: 640886 - DNA, 169 bp, Homo sapiens
cataatcacttttcctttactctgcatccgtattctgtatgccctttctcctaacacctcacaacaaaactaactaatactaacatctcagacgctcaggacataaaaaccgtctgaactatcctgcccgccatcatcctagtcctcatcgcccttaccaaagctagat

SEQ ID NO: 640887 - DNA, 119 bp, Homo sapiens
tcggattagggccaatagggatcatttgcttgtctaatagggttgctgggaaagcttcattcaggtcctcaagtggtcatctgatcgagatggaattaacgttcgttcatctctctcca

SEQ ID NO: 640888 - DNA, 586 bp, Homo sapiens
tggataatagtccattttattaaataatttataaagtcagaccaggtgcttggggctgtgtaaggggaaaccatttcctttcctacgtggtcacatatagccgtggcagaatttatactcagggtgccaaaaaattctccctttaattctcaatttatataagtgaaagtgtggtggaattaaagatagactccgtgtgcgtgtgttcagaggaaaagcctgtgcgaaccacatatctgtggtttatagaggtgtggagagccacaaagagggtaaagttatatctcccacaattctccaccaaacttctccccgcacgtgtgagacctctccgccacacgagcgtctcccgcgtgtgtcgtgcgcggtattctctcccatactccaaaatcaacacctctctaagagaatagtgtccccctttaacacaccccccaaaaaaacagagtatctcgcccaaaatctcaaaacactgtggggtgccacacaaaaagaagaggcgtttaattaagaatatttgttgggaaaaagaagaacataattctctccacaccccccccaaaaaacttttctctccacaacacta

SEQ ID NO: 640889 - DNA, 214 bp, Homo sapiens
cagagatctcgccactgcactccagcctgggtgacagagcaagactctgtctcaaaaaaaaaaaaaaaaaagttcccaattaagttctgttggtgtgggagccccatatatcacaccaggttaagaggaaactatggacctaaggtgaattaaaagaggatgaaatgatttggctctacaggctctcccaagatgagcgggaattgactccagc

SEQ ID NO: 640890 - DNA, 109 bp, Homo sapiens
catctctcctctcgacatctctccttctcgcacacagccgcggcgaagaatgtcggagagagagtggatgtcggagagggagaggatgtcgggaagggacgcatgtcgg

SEQ ID NO: 640891 - DNA, 1257 bp, Homo sapiens
ggttttcctgcgcagtgagcctgcagggggcgtaggcagccatggctgcccagccggaatggcatggtcttgaatgccccacttccacaatggacttggcatgctggctgctgtggccactgtgtgttcaaccatgcctggccctgtgaagatccgcatgactgtaatgtgccctggcaatgccaatggctgctgcctgcatctgctccgctgcccctgcgtcggtgtcccatcctggcccatcgtgctgctgccccacggttcgggtaccacactgaaggtgcggctgcctggcctgcggctttcagcctggaggagctcagtggtggcctggcattcacaagaaaggttgggccctggaccatcggcatttctgtggatcctgaggatggcggaacaatgtccactggatgtccctgcaggccaaccgtgcagcggctgacaggagtacctgctccaaaactcatcctcttcccccaggaagccctcgtgccccaagaagggagacagtttctgctgaagaactgaaactgtgcaccagctgaccggaccggtcatgcccgtccggaacgtctataagaagggagaaagctcgagtcatcacttgaggaaagagaagactttcaaagccttcgctagtctccgtatggcccggtgccaacgcccgggtcttcggcatacgggcaaaaagagccaaggaagccgcagaaccgggatgttgaccagacaaaataaggccctcctggggacttggacatcagtcggcagtcaatgctgggatctcccacgttggtgtgttccgtggcaccactggggactgggatggggctccatgctgtgattcctcatgcagagacattggagcttcttgaaagacagtcagcctgaaaatgtacttctgggtttgatagcctgtagtgtgagggaagagcgtgagtaaaccggggactacttggttgggaagggataaaagggcgttgattaaaagagatgacaactagtaaaaagtagcgtcctagatttattgggggcagatagatagaacggaacggtactaaggcgtcgaccgcttcgaaaagggggatagggcctaatagtgatttagggtagtaggcaagaagtagaaaaggtaggaagagtagtacggatagagtagtgagggtagacggcactagtctctctcttgttcgctacactactttcgagtagagtcgataacggaagaaggaagaacgcagagagagaggagagaagtaa

SEQ ID NO: 640892 - DNA, 944 bp, Homo sapiens
  misc_feature (13)..(13): n is a, c, g, or t
  misc_feature (81)..(81): n is a, c, g, or t
  misc_feature (84)..(84): n is a, c, g, or t
  misc_feature (102)..(102): n is a, c, g, or t
  misc_feature (117)..(117): n is a, c, g, or t
  misc_feature (181)..(181): n is a, c, g, or t
  misc_feature (261)..(262): n is a, c, g, or t
  misc_feature (264)..(264): n is a, c, g, or t
  misc_feature (270)..(270): n is a, c, g, or t
  misc_feature (273)..(273): n is a, c, g, or t
  misc_feature (290)..(290): n is a, c, g, or t
  misc_feature (300)..(300): n is a, c, g, or t
  misc_feature (302)..(303): n is a, c, g, or t
  misc_feature (309)..(309): n is a, c, g, or t
  misc_feature (312)..(312): n is a, c, g, or t
  misc_feature (315)..(315): n is a, c, g, or t
  misc_feature (318)..(318): n is a, c, g, or t
  misc_feature (328)..(328): n is a, c, g, or t
  misc_feature (335)..(335): n is a, c, g, or t
  misc_feature (400)..(400): n is a, c, g, or t
  misc_feature (515)..(515): n is a, c, g, or t
  misc_feature (520)..(520): n is a, c, g, or t
  misc_feature (528)..(528): n is a, c, g, or t
  misc_feature (595)..(595): n is a, c, g, or t
  misc_feature (884)..(884): n is a, c, g, or t
  misc_feature (904)..(904): n is a, c, g, or t
  misc_feature (906)..(907): n is a, c, g, or t
  misc_feature (910)..(910): n is a, c, g, or t
  misc_feature (914)..(914): n is a, c, g, or t
  misc_feature (943)..(943): n is a, c, g, or t
tgggggggtggtntgggggagaagtggggattgggggagggagggtgggggtgggatgggtggggggggggaggttggagnatntggggtgtgggtttgaanagaaggggattgagnaaggtggatgaggtggtggagagttagatgggtatgagggagagggaggtgggggggaggatgntggaggtgggaaaggagaaaaggaagggggatgaggtgggggagggggtggaggaaggggtgggtgagtttgggtccccnnangagttngtntttgaggtgtggggcgncattggggangnnaaggtnggnggntantaggagtggnggggganggtgcgatgatgacccgggcgcaacctggctgggggcccccaggagggagactgaggtcaggagnggagcctccagcttgagcctagctcagcagcccaaggacgatggtgaggggaggtggggccaggccccctgccccgctccaatcggtaccatccccgccctggttcccactctgnccggngtccccgncccccctgtgccctgttccccacctacctcagctgggtcaggcacagggaggggagggatcagccanattgggcggccacccccgcctccaccactttccaccatcagctgccaaactggtccctctgtctccctggggccttgggttctgtttgggggtcatgaccttcctagtttcctgacgcagggaatacaggggagagggttgtccttccccccagcaaatgcaataatgccctcacccctcctgagaggagccccctccctgtggagcctgttacctccgcatttgacacgagtctgctgtgaaccccgcaacctcctccccacctcccatctctccttccaggcccatncctggcccagagcaggaggnannganggangatggcggtgggtattgtatctgaatttna

SEQ ID NO: 640893 - DNA, 211 bp, Homo sapiens
cagcctatacacataaatacaactgtatatgcatcatactccactagatctatattacaattatatatcacttacatatttcattatctatcaatgtatatatatgctaaaatctctaaatatgtatatcattatagaattccagtcttttaattagtgagctgaatccatttagaacatttaaaaactacattaccatagacaatatctg

SEQ ID NO: 640894 - DNA, 822 bp, Homo sapiens
  misc_feature (8)..(8): n is a, c, g, or t
ggctgacnggttttgcagactaccatcttccctgcaactctgaaggatggacttaaccaccaccatgtcgagcaaaagaacaaagaccaagaccaagaagcgccctcagcgtgcaacatccaatgtgtttgctatgtttgaccagtcacagattcaggagttcaaagaggccttcaacatgattgatcagaacagagatggtttcatcgacaaggaagatttgcatgatatgcttgcttcattggggaagaatccaactgatgagtatctagatgccatgatgaatgaggctccaggccccatcaatttcaccatgttcctcaccatgtttggtgagaagttaaatggcacagatcctgaagatgtcatcagaaatgcctttgcttgctttgatgaagaagcaactggcaccatacaggaagattacttgagagagctgctgacaaccatgggggatcggtttacagatgaggaagtggatgagctgtacagagaagcacctattgataaaaaggggaatttcaattacatcgagttcacacgcatctgaaacatggagccaaagacaaagatgactgaataacttcaaattccagccaaacgttccttgtgccacttgggtatctgggatactctgatggcgttagttaaggtcgatagcgggtgattatctgagcattggaattgttttatatcgatgaagggctttcataattttagataaatgtattatacagcttccatagggataaggatttagagagatgggaggatatattgaaattggctttaaagctggggggccagaggaaatgggtcaaa

SEQ ID NO: 640895 - DNA, 178 bp, Homo sapiens
gatctcagcaggtcccgcagctctctctgttgggggctggcggggggcagtctggggggcaggcaagtggtcccgggcagcattttgggcatggcaaaagtccaggcaggcatggcacagccagcctggccagcaattcacatcagcagcaaattcaggcacaccccccaacatttcc

SEQ ID NO: 640896 - DNA, 631 bp, Homo sapiens
  misc_feature (77)..(82): n is a, c, g, or t
  misc_feature (84)..(86): n is a, c, g, or t
agcggggacgcaaccatctgcggaaaggataggggggaggaagacttaacactgcaacaacaggtacaaaaaagaannnnnntnnntaacaggacccagaggaccattatatattgctctatattctaggtcgcccactttacacttccttctcatgcacttggtcaataccacgcccgctgaccacactggcgacttccctctctgtcgcccctccgtgaagtcagacccactctgcgggccaagaaaggtgaccgggcttccttccggcttgctaagcagaggccggaagcggtggtttttagcggctctctgggtagcagggtggtgtgatagcggcagcgaggggctcggagaggtgctcggattctcgtagctgtgccgggtgagtggcgctcgcgttcgggcgcgtgagacccatcccggggacccgtctccgcgggggcagctggagggcggcggggctcctggcgccggtagcgcacctgggcaggtgtgccagccaggtccccggttctgggatccgaggccatggcttggagtggcccagacccgaacttcgctcctgtgcccaaacttggaactctggaaatgtggcttcgctcactggcgccttgagcttgggcgactg

SEQ ID NO: 640897 - DNA, 858 bp, Homo sapiens
  misc_feature (669)..(669): n is a, c, g, or t
  misc_feature (700)..(701): n is a, c, g, or t
  misc_feature (706)..(706): n is a, c, g, or t
  misc_feature (720)..(720): n is a, c, g, or t
  misc_feature (727)..(727): n is a, c, g, or t
  misc_feature (730)..(730): n is a, c, g, or t
  misc_feature (814)..(814): n is a, c, g, or t
gtgtgatagcgtatgctaggggcttggagaggtgctaggattctggactctgagccggacttaaccaccaccatgtcgagcaaaagaacaaagaccaagaccaagaagcgccctcagcgtgcaacatccaatgtgtttgctatgtttgaccagtcacagattcaggagttcaaagaggccttcaacatgattgatcagaacagagatggtttcatcgacaaggaagatttgcatgatatgcttgcttcattggggaagaatccaactgatgagtatctagatgccatgatgaatgaggctccaggccccatcaatttcaccatgttcctcaccatgtttggtgagaagttaaatggcacagatcctgaagatgtcatcagaaatgcctttgcttgctttgatgaagaagcaactggcaccatacaggaagattacttgagagagctgctgacaaccatgggggatcggtttacagatgaggaagtggatgagctgtacagagaagcacctattgataaagacaaagatgactgaataacttcaaattccagccaaacgttccttgttgccactttggggattctgagatatttctcttgcatgcccttagctttacagcttttggcatttcctggtggatttattcttagccattttgggcaatggaanctttataatcagactgggaacgggactttcnnttaanatcattttcgaatnaaaaatnggntaatttaaccttccaggcctttttccccaaaaactggtgggtctatacagagtcaatatattttttcagagaaagttattcgcncgattttttccggaatcataattaaactttatggttaaattaaa

SEQ ID NO: 640898 - DNA, 573 bp, Homo sapiens
  misc_feature (77)..(82): n is a, c, g, or t
  misc_feature (84)..(86): n is a, c, g, or t
agcggggacgcaaccatctgcggaaaggataggggggaggaagacttaacactgcaacaacaggtacaaaaaagaannnnnntnnntaacaggacccagaggaccattatatattgctctatattctaggtcgcccactttacacttccttctcatgcacttggtcaataccacgcccgctgaccacactggcgacttccctctctgtcgcccctccgtgaagtcagacccactctgcgggccaagaaaggtgaccgggcttccttccggcttgctaagcagaggccggaagcggtggtttttagcggattctcgtagctgtgccgggtgagtggcgctcgcgttcgggcgcgtgagacccatcccggggacccgtctccgcgggggcagctggagggcggcggggctcctggcgccggtagcgcacctgggcaggtgtgccagccaggtccccggttctgggatccgaggccatggcttggagtggcccagacccgaacttcgctcctgtgcccaaacttggaactctggaaatgtggcttcgctcactggcgccttgagcttgggcgactg

SEQ ID NO: 640899 - DNA, 168 bp, Homo sapiens
agagaaaacagccccattattattattattatttttattgtagagacaaggtttcactatattgcccaggctgttcttgaactcctgggctcaagcaatcctcctgctttggcatcccaaagttttgggattacagcatgtgccgccacacctggccaattactcccc

SEQ ID NO: 640900 - DNA, 1239 bp, Homo sapiens
  misc_feature (77)..(82): n is a, c, g, or t
  misc_feature (84)..(86): n is a, c, g, or t
  misc_feature (1050)..(1050): n is a, c, g, or t
  misc_feature (1081)..(1082): n is a, c, g, or t
  misc_feature (1087)..(1087): n is a, c, g, or t
  misc_feature (1101)..(1101): n is a, c, g, or t
  misc_feature (1108)..(1108): n is a, c, g, or t
  misc_feature (1111)..(1111): n is a, c, g, or t
  misc_feature (1195)..(1195): n is a, c, g, or t
agcggggacgcaaccatctgcggaaaggataggggggaggaagacttaacactgcaacaacaggtacaaaaaagaannnnnntnnntaacaggacccagaggaccattatatattgctctatattctaggtcgcccactttacacttccttctcatgcacttggtcaataccacgcccgctgaccacactggcgacttccctctctgtcgcccctccgtgaagtcagacccactctgcgggccaagaaaggtgaccgggcttccttccggcttgctaagcagaggccggaagcggtggtttttagcggctctctgggtagcagggtggtgtgatagcggcagcgaggggctcggagaggtgctcggattctcgtagctgtgccgggacttaaccaccaccatgtcgagcaaaagaacaaagaccaagaccaagaagcgccctcagcgtgcaacatccaatgtgtttgctatgtttgaccagtcacagattcaggagttcaaagaggccttcaacatgattgatcagaacagagatggtttcatcgacaaggaagatttgcatgatatgcttgcttcattggggaagaatccaactgatgagtatctagatgccatgatgaatgaggctccaggccccatcaatttcaccatgttcctcaccatgtttggtgagaagttaaatggcacagatcctgaagatgtcatcagaaatgcctttgcttgctttgatgaagaagcaactggcaccatacaggaagattacttgagagagctgctgacaaccatgggggatcggtttacagatgaggaagtggatgagctgtacagagaagcacctattgataaaaaggggaatttcaattacatcgagttcacacgcatctgaaacatggagccaaagacaaagatgactgaataacttcaaattccagccaaacgttccttgttgccactttggggattctgagatatttctcttgcatgcccttagctttacagcttttggcatttcctggtggatttattcttagccattttgggcaatggaanctttataatcagactgggaacgggactttcnnttaanatcattttcgaatnaaaaatnggntaatttaaccttccaggcctttttccccaaaaactggtgggtctatacagagtcaatatattttttcagagaaagttattcgcncgattttttccggaatcataattaaactttatggttaaattaaa

SEQ ID NO: 640901 - DNA, 242 bp, Homo sapiens
  misc_feature (11)..(11): n is a, c, g, or t
  misc_feature (33)..(33): n is a, c, g, or t
  misc_feature (101)..(101): n is a, c, g, or t
  misc_feature (134)..(134): n is a, c, g, or t
ggctggcggcnggggagctgcgtctcccgcccngcggcactgcccaagcggactgcacccttcgcggacgtggccccgctacagctcaaggtccgcgtgancagagggagttgagccgcgggtcgtgccaggcntaacatcgcaggaggtcttcgagaagaccaagcgactcctgttcctcggggcccaggctacctggaccacgtgtgggatgaaggctgtgctgtcgttcacctgccaga

SEQ ID NO: 640902 - DNA, 1484 bp, Homo sapiens
  misc_feature (77)..(82): n is a, c, g, or t
  misc_feature (84)..(86): n is a, c, g, or t
  misc_feature (1295)..(1295): n is a, c, g, or t
  misc_feature (1326)..(1327): n is a, c, g, or t
  misc_feature (1332)..(1332): n is a, c, g, or t
  misc_feature (1346)..(1346): n is a, c, g, or t
  misc_feature (1353)..(1353): n is a, c, g, or t
  misc_feature (1356)..(1356): n is a, c, g, or t
  misc_feature (1440)..(1440): n is a, c, g, or t
agcggggacgcaaccatctgcggaaaggataggggggaggaagacttaacactgcaacaacaggtacaaaaaagaannnnnntnnntaacaggacccagaggaccattatatattgctctatattctaggtcgcccactttacacttccttctcatgcacttggtcaataccacgcccgctgaccacactggcgacttccctctctgtcgcccctccgtgaagtcagacccactctgcgggccaagaaaggtgaccgggcttccttccggcttgctaagcagaggccggaagcggtggtttttagcggctctctgggtagcagggtggtgtgatagcggcagcgaggggctcggagaggtgctcggattctcgtagctgtgccggcccacaatgattctgagctaaaacacaaaataaaaaccagattcattgccaccagcgctcacctcgcctgacttaaaaaaaagtttcgtacaacagacactccttgacaccaaggatctttcacttaatccctcaaaaataaagactcgagctgggtgcggtggctcacgcctgtaattccagcactttgggaggccgaggcaggtggatcacgaagtcaggagttcaagaccagcctgcacaaggacttaaccaccaccatgtcgagcaaaagaacaaagaccaagaccaagaagcgccctcagcgtgcaacatccaatgtgtttgctatgtttgaccagtcacagattcaggagttcaaagaggccttcaacatgattgatcagaacagagatggtttcatcgacaaggaagatttgcatgatatgcttgcttcattggggaagaatccaactgatgagtatctagatgccatgatgaatgaggctccaggccccatcaatttcaccatgttcctcaccatgtttggtgagaagttaaatggcacagatcctgaagatgtcatcagaaatgcctttgcttgctttgatgaagaagcaactggcaccatacaggaagattacttgagagagctgctgacaaccatgggggatcggtttacagatgaggaagtggatgagctgtacagagaagcacctattgataaaaaggggaatttcaattacatcgagttcacacgcatctgaaacatggagccaaagacaaagatgactgaataacttcaaattccagccaaacgttccttgttgccactttggggattctgagatatttctcttgcatgcccttagctttacagcttttggcatttcctggtggatttattcttagccattttgggcaatggaanctttataatcagactgggaacgggactttcnnttaanatcattttcgaatnaaaaatnggntaatttaaccttccaggcctttttccccaaaaactggtgggtctatacagagtcaatatattttttcagagaaagttattcgcncgattttttccggaatcataattaaactttatggttaaattaaa

SEQ ID NO: 640903 - DNA, 142 bp, Homo sapiens
cccttcccgccaagtgagttaccttcatcaccatctcaaagcactgtcatcaactcctgaccttaatgaagacattatcatctcaggataacccccactaccatgatggcttattctctctgaacttacatacaatgagagg

SEQ ID NO: 640904 - DNA, 954 bp, Homo sapiens
ccccgtatcctcggtcgtcagggtgtctcccgggcctccaaagggtccttcctcgccgcgatgtctttcacccaagtgtgaccttcgggacattggtttatatcaatcctcttagggtcttcgcgccacctctggggccgcgaaggcgccccgggtgcccggccctccgcccagggtgtaccgtgccctccccgccatttccccgcgttaccccgctgttggggccgccaacgcgcgtcaaaacacatgaactgcccgttagggtgaaagcagaggatgcggccccgctttcgtgcgacacgtgggtaggcggcccaccacatgttttggaagtgcccggaggacaccacatcgggtagggggctttccgcgaagaccaccagcgtgcgaaggcctctaccaggcagcacccacctaggcaagcacagcaccagtcagcgaaaaaaaggaaccccacgcacatcacggtggggtggatcaaaccaacacgcacggggcgcaaagaacatgcactgagtgagtccagcacaagggagcccacacagttcgcccaagaagaccctccaacagaaggcttatacactaggatgataatccccgaatggcaccggcgccaccccccaggcgttaaacccaggagcggcagagcatagcctttgtacgaactccttgtggcatacaaacaggccgacctcaaagtgctcaaatgttaacaaaggggtgctttatatgatagacacaccgccgccgggtttatacgcactcacgaaggaccagtagtgatgtatcttgggccgccactctagcgtgtttctatgtatcgagcgagtgccgatattgagtcttattagcgggtcccacaaacccgcctaattattggggtaggagaacccaacgacaccccaaatttggcgccaaattgtggcgccccataaaaacaaacaaacaataaca

SEQ ID NO: 640905 - DNA, 1653 bp, Homo sapiens
gccactgtatcataacctctcagctgacgaatgcaaggcaccaatcggagaggcagcttcgatataaggaaacacgtggctgaactcacggaagacaaacgaaattctggacgtgagcaacagaacagaaacgagaacatactactggagaccacagaccagaccctactgggaagcacacgggacacctctattagaaaagcctgaccaagcgacgtatgacttggactcttttcctgacacgcagcacaagcccgggcttccagcaggcattgggagcaagttcccaggctgcaatggccaaatatcgacagagggaagctagacgatgcatgtaaacaccaatatgcttttggcccggcctattgcagacttgcatcaccgtggtaatcgatatcgtcccattatccgtgcaatgactcatgcacggcagtgggcactgtcgtcgtcatcaatgtgtagaaattctagtgtcaacacatcatcatgcacgcagcgcgcaaaacgcataattccgacgaggaacacatgggctaaatagtgtgtcggaaatcaccaactggtgcatgcagcatcatcatcgcgacaggtgccaacttctggtgtttgaaggctgggcttggcacgaaacatacacaagactctagttgcaaaataccatgtgcacgttggacatagcgtataggatggaacacaaacaaactaagtatactacagctggagcccattactgggccaaagatacatgaaagaggagagaaacaaaagggatagaaacatgaactggacacaaatcctaaagaacaagaaatcagtcatcaatacgacggtaacgttaacgaaaatagcaccagacatgaggcaggccccggaagatccctgactaaattgagccaccgcagaaacagactcaatcaaaaacacatggcaatacaacagtggaaaaacccacgctcagacacacaaacacgaagagctacatcacgacgacaccagcacgaacaccactctcttctgttgtctgcgccgacggacgcaaaagaaaaaccggacaacaccaaagacaacgaacgacggaaagagagcaagaagagaaaagccagaaaaaggacaacacacacgaagcgcagacagaaacaacacgaaaacgagcaacacacaggaacgagaaccaagcgcaaaaaaccaaccacacaaaacacaaacggaaacagaaccggaagacaagcaacaaagaagagagagcaagcagagcgccaggagaaggagaggagaaagaagaagagggagagcacgaaagaggacgaagacgcaacgcacagacaaagaacgacaaccagcaagaggaagacgacgaaagaagagaaagaaaaagaagcagaagaaaaagaaaagcgagagaggaacgcagagcaagaaagagggaaaagcggagaggccgcaggaagacggcagagaagggacaaggcaaaagagaagaggacagagaagcgaacacgcaggcgacgcgcaggaggcgcacgcggagcaagggaggaggcgaccgcgcacagcgggaccgggaagatgcaagagacaggactaagggggagcgggacggacggcgagaagggcgcgggagcacgcaagagcacagcacgacaacgggaccga

SEQ ID NO: 640906 - DNA, 1602 bp, Homo sapiens
  misc_feature (77)..(82): n is a, c, g, or t
  misc_feature (84)..(86): n is a, c, g, or t
  misc_feature (1413)..(1413): n is a, c, g, or t
  misc_feature (1444)..(1445): n is a, c, g, or t
  misc_feature (1450)..(1450): n is a, c, g, or t
  misc_feature (1464)..(1464): n is a, c, g, or t
  misc_feature (1471)..(1471): n is a, c, g, or t
  misc_feature (1474)..(1474): n is a, c, g, or t
  misc_feature (1558)..(1558): n is a, c, g, or t
agcggggacgcaaccatctgcggaaaggataggggggaggaagacttaacactgcaacaacaggtacaaaaaagaannnnnntnnntaacaggacccagaggaccattatatattgctctatattctaggtcgcccactttacacttccttctcatgcacttggtcaataccacgcccgctgaccacactggcgacttccctctctgtcgcccctccgtgaagtcagacccactctgcgggccaagaaaggtgaccgggcttccttccggcttgctaagcagaggccggaagcggtggtttttagcggctctctgggtagcagggtggtgtgatagcggcagcgaggggctcggagaggtgctcggattctcgtagctgtgccggcccacaatgattctgagctaaaacacaaaataaaaaccagattcattgccaccagcgctcacctcgcctgacttaaaaaaaaggttatgctcctttagatctgtaaactcagtctcctaactgcccttcatccactttctcatgcatctgaaatcctcatattttgtagaagcctgttctgtaagtctctctactttccagtttcgtacaacagacactccttgacaccaaggatctttcacttaatccctcaaaaataaagactcgagctgggtgcggtggctcacgcctgtaattccagcactttgggaggccgaggcaggtggatcacgaagtcaggagttcaagaccagcctgcacaaggacttaaccaccaccatgtcgagcaaaagaacaaagaccaagaccaagaagcgccctcagcgtgcaacatccaatgtgtttgctatgtttgaccagtcacagattcaggagttcaaagaggccttcaacatgattgatcagaacagagatggtttcatcgacaaggaagatttgcatgatatgcttgcttcattggggaagaatccaactgatgagtatctagatgccatgatgaatgaggctccaggccccatcaatttcaccatgttcctcaccatgtttggtgagaagttaaatggcacagatcctgaagatgtcatcagaaatgcctttgcttgctttgatgaagaagcaactggcaccatacaggaagattacttgagagagctgctgacaaccatgggggatcggtttacagatgaggaagtggatgagctgtacagagaagcacctattgataaaaaggggaatttcaattacatcgagttcacacgcatctgaaacatggagccaaagacaaagatgactgaataacttcaaattccagccaaacgttccttgttgccactttggggattctgagatatttctcttgcatgcccttagctttacagcttttggcatttcctggtggatttattcttagccattttgggcaatggaanctttataatcagactgggaacgggactttcnnttaanatcattttcgaatnaaaaatnggntaatttaaccttccaggcctttttccccaaaaactggtgggtctatacagagtcaatatattttttcagagaaagttattcgcncgattttttccggaatcataattaaactttatggttaaattaaa

SEQ ID NO: 640907 - DNA, 1322 bp, Homo sapiens
  misc_feature (77)..(82): n is a, c, g, or t
  misc_feature (84)..(86): n is a, c, g, or t
  misc_feature (1133)..(1133): n is a, c, g, or t
  misc_feature (1164)..(1165): n is a, c, g, or t
  misc_feature (1170)..(1170): n is a, c, g, or t
  misc_feature (1184)..(1184): n is a, c, g, or t
  misc_feature (1191)..(1191): n is a, c, g, or t
  misc_feature (1194)..(1194): n is a, c, g, or t
  misc_feature (1278)..(1278): n is a, c, g, or t
agcggggacgcaaccatctgcggaaaggataggggggaggaagacttaacactgcaacaacaggtacaaaaaagaannnnnntnnntaacaggacccagaggaccattatatattgctctatattctaggtcgcccactttacacttccttctcatgcacttggtcaataccacgcccgctgaccacactggcgacttccctctctgtcgcccctccgtgaagtcagacccactctgcgggccaagaaaggtgaccgggcttccttccggcttgctaagcagaggccggaagcggtggtttttagcggctctctgggtagcagggtggtgtgatagcggcagcgaggggctcggagaggtgctcggattctcgtagctgtgccggcccacaatgattctgagctaaaacacaaaataaaaaccagattcattgccaccagcgctcacctcgcctgacttaaaaaaaaggacttaaccaccaccatgtcgagcaaaagaacaaagaccaagaccaagaagcgccctcagcgtgcaacatccaatgtgtttgctatgtttgaccagtcacagattcaggagttcaaagaggccttcaacatgattgatcagaacagagatggtttcatcgacaaggaagatttgcatgatatgcttgcttcattggggaagaatccaactgatgagtatctagatgccatgatgaatgaggctccaggccccatcaatttcaccatgttcctcaccatgtttggtgagaagttaaatggcacagatcctgaagatgtcatcagaaatgcctttgcttgctttgatgaagaagcaactggcaccatacaggaagattacttgagagagctgctgacaaccatgggggatcggtttacagatgaggaagtggatgagctgtacagagaagcacctattgataaaaaggggaatttcaattacatcgagttcacacgcatctgaaacatggagccaaagacaaagatgactgaataacttcaaattccagccaaacgttccttgttgccactttggggattctgagatatttctcttgcatgcccttagctttacagcttttggcatttcctggtggatttattcttagccattttgggcaatggaanctttataatcagactgggaacgggactttcnnttaanatcattttcgaatnaaaaatnggntaatttaaccttccaggcctttttccccaaaaactggtgggtctatacagagtcaatatattttttcagagaaagttattcgcncgattttttccggaatcataattaaactttatggttaaattaaa

SEQ ID NO: 640908 - DNA, 962 bp, Homo sapiens
  misc_feature (77)..(82): n is a, c, g, or t
  misc_feature (84)..(86): n is a, c, g, or t
agcggggacgcaaccatctgcggaaaggataggggggaggaagacttaacactgcaacaacaggtacaaaaaagaannnnnntnnntaacaggacccagaggaccattatatattgctctatattctaggtcgcccactttacacttccttctcatgcacttggtcaataccacgcccgctgaccacactggcgacttccctctctgtcgcccctccgtgaagtcagacccactctgcgggccaagaaaggtgaccgggcttccttccggcttgctaagcagaggccggaagcggtggtttttagcggctctctgggtagcagggtggtgtgatagcggcagcgaggggctcggagaggtgctcggattctcgtagctgtgccggcccacaatgattctgagctaaaacacaaaataaaaaccagattcattgccaccagcgctcacctcgcctgacttaaaaaaaaggttatgctcctttagatctgtaaactcagtctcctaactgcccttcatccactttctcatgcatctgaaatcctcatattttgtagaagcctgttctgtaagtctctctactttccagtttcgtacaacagacactccttgacaccaaggatctttcacttaatccctcaaaaataaagactcgagctgggtgcggtggctcacgcctgtaattccagcactttgggaggccgaggcaggtggatcacgaagtcaggagttcaagaccagcctgcacaaggtggtgaaaccccgtctctactaaaaatacaaaaattagctgggcatggtggtgggtgcctgtaatcccagctactccagaggctgaggcagagaattgcttgaaccctggaggtggaggttgagatcgcgccactgcactccaccctgggcgacagagcaagactccgtctcaaaaataaataaataaaaataaataagtaaataaaaaaaaa

SEQ ID NO: 640909 - DNA, 184 bp, Homo sapiens
gtcagcactgtagtaatattactgtgggagggatggcggcggtataccagaaggaagaataatcttcatggtctctggcctctatcttcagtaaatttgcagtctaggtcagatagagaaaactggccgcccactgcaaatgttggcctggttctcatagtgatgttaaagattaaaacaggag

SEQ ID NO: 640910 - DNA, 105 bp, Homo sapiens
accactccaccttactaccagacaaccttagctaaccattaccaatatagtatagccgatagacattgaaacctcgcgcaatagatatagtaccgcacgcgaaag

SEQ ID NO: 640911 - DNA, 949 bp, Homo sapiens
  misc_feature (77)..(82): n is a, c, g, or t
  misc_feature (84)..(86): n is a, c, g, or t
  misc_feature (903)..(903): n is a, c, g, or t
agcggggacgcaaccatctgcggaaaggataggggggaggaagacttaacactgcaacaacaggtacaaaaaagaannnnnntnnntaacaggacccagaggaccattatatattgctctatattctaggtcgcccactttacacttccttctcatgcacttggtcaataccacgcccgctgaccacactggcgacttccctctctgtcgcccctccgtgaagtcagacccactctgcgggccaagaaaggtgaccgggcttccttccggcttgctaagcagaggccggaagcggtggtttttagcggctctctgggtagcagggtggtgtgatagcggcagcgaggggctcggagaggtgctcggattctcgtagctgtgccgggacttaaccaccaccatgtcgagctttgctatgtttgaccagtcacagattcaggagttcaaagaggccttcaacatgattgatcagaacagagatggtttcatcgacaaggaagatttgcatgatatgcttgcttcattggggaagaatccaactgatgagtatctagatgccatgatgaatgaggctccaggccccatcaatttcaccatgttcctcaccatgtttggtgagaagttaaatggcacagatcctgaagatgtcatcagaaatgcctttgcttgctttgatgaagaagcaactggcaccatacaggaagattacttgagagagctgctgacaaccatgggggatcggtttacagatgaggaagtggatgagctgtacagagaagcacctattgataaaaaggggaatttcaattacatcgagttcacacgcatctgaaacatggagccaaagacaaagatgactgaataacttcaaattccagccaaacgttccttgttgcactcttntagtctgagattttctcttgctgccctaagcttacagctttgcatt

SEQ ID NO: 640912 - DNA, 1251 bp, Homo sapiens
  misc_feature (525)..(525): n is a, c, g, or t
ggagagaggagaactagtctcgagtatttttatttttttttggtccatgaggcatttaattggtaaatttttgttttacttccctaaaaaaaaaatcccaggatttcccctccggtggtgtttccgtctggctccttcatgggtccatgatgccagctggaggttgtcagtacaatgaaaccaaatcgggcgggatggaagcagataattctggccattttcccaggtcttggagttggcactgtcaagatctgggggctggatcaccccagcatcttggttaaagcctggcctggtagggtgttcaacaaacaattttccccagttcctggtgggtcatcaatggatttacaaattcgccattggtaacccatggcttacatcatccacaggtggaagaaaccgggacagatggatctttgggacgcacgggcctaatataaacgcacctggggctgtattggcctatctctttgtcgcgggcatattggtggagataacttcttggaaaacgctattctggcncaggggactattcatggcgcgccacctattgtgtggcgcgagcgccgcgggagaaaagagacccgcgggttgggtgcctccgcctctccccctgtggagaccatagcgggttcacagagcggcggccggttagcaagattagacccacaagatataaagaggcgcagagactcccgagagggtggcccccagaggtgcctcaaagcgcgagagggcgaagtatgtccccgggggggaagccgacacactctacccaaggaggaaggctgtgctgtggggctccaacccaagagaaagccccacaaattcggggacagccccccggtgtgttttcctcggccggacccttacagacgccggagaaaaacacctcatacacaagaagtgtcgcctctccagaaaaaaaagagggcggtgtagaaaaacgaccaagaaatgacaaaggaattttcggggacggcggggcggtgttagacacaacgaagctgttcccaaagaaaaatattttgtggtcccaacaccaaaaaggcggcaagacacacaagtgggcggcactcccattggtggtttttcgtgcgcaaggaaggaagcaccaccatcttgtggcccccatttgggaagggtgtaattctctgtcggccaatttcttcccccaatgtcccttctgtttttcgatcggcaccccggaaaaatttggggccccttaatggtattattaattcccca

SEQ ID NO: 640913 - DNA, 385 bp, Homo sapiens
  misc_feature (237)..(237): n is a, c, g, or t
gatccacagtaagtggcggacctgggagtgatagcaaggacagtggtgagctcagttcactcccaatgagcccaacaacactggacacccggccacttagagtcttcttgcctgctagacagcagcagcagcggcagaagcagcaagagcagaagcagcaacagtaacagcagcaagttccgtccgggaaccaaccttctacctcctttgagcatcaaggcagaccccacaggtgtnttggaactccccaaagagctgtcagaaatctttgatcccacacgagagtgcatgagctcggagctgctggaggagttgatgtcctcagaagtagttgcccctctgcttcgtctttctccacccccgggagaacaccctcctctttcga

SEQ ID NO: 640914 - DNA, 228 bp, Homo sapiens
gtttagagtgttaagttaaagaagccaattacaaaaggtttcacgttgtatgatttcgtttatagtgaaatgtccagaataggcaaatctgtttgagagagagaaagtagatgagtacttgcctaggactgggaggaggattgcgaggaaatggagattcactgctaatgagtacagggtttcttttgggggcgcttatgaagatgctctgaaattgattgtgatggt

SEQ ID NO: 640915 - DNA, 214 bp, Homo sapiens
cgctttctgactctcttcacggacagtggataaacagtgtgaaggtatatactggcgacgcagagagtccatgtggcaagtgccttgcttggttgtccgcgctagaactcgaggtgcgttgcaggcgatttctcgtcgaccatgttcgggcttcatgagagcggtggatcgtccgaggtgctttcttgcccttgctccgctgtgcgcgtcatac

SEQ ID NO: 640916 - DNA, 122 bp, Homo sapiens
ttttttgccccccccccccccccccccccccaaaggggggggggaaaaggggttttggaaaggggggggtttattttttttttttggggagggaaaaaaaaaaaatttttgggggcccccca

SEQ ID NO: 640917 - DNA, 118 bp, Homo sapiens
aggggagggctcctaggggcagagaatgttccttaggttttctttgtgaatgaaattcctccttccccccatctctgagtatgaggacagcccaccacatctgccctttcgcagtgtg

SEQ ID NO: 640918 - DNA, 120 bp, Homo sapiens
tggacagcacagaggaggtggacagcacgaggaggtggacagcacagtaggaggcaaccagccagaacgcctgaacgcaggcacatacttcctattctacacccccctcctctgtgctgt

SEQ ID NO: 640919 - DNA, 223 bp, Homo sapiens
gtcactgacttagctattttgctgctgtactaattccaggtattgatgatgctaaagcacctagctatggtccttggcagtcagaaattatgaaacataggcgagtaacttaatgtgacaggcaacaagttggtaacatattataatactgggcgtgggatgagagagaaaaatcaaatatgaaacccgaactgcaagcctgacaggatggcctactaagctt

SEQ ID NO: 640920 - DNA, 965 bp, Homo sapiens
gtgttatgcggcatttgctcttattgtcattatttctcttattatacttaaaagttctgggattgctcttattatttccctaaacgaataatgtcctggatgatgtacaatacatccagtactctttctgtgttatctgtaggctgggcaagtttccacatactgcatataatagctagatggtatcgagcattattttgtgccgggcactgagttctaagtgcttcacatatattaacttaatttgaaattcatacatcagctcgttcacaaggacaaattaggttcattgatcccaattactatagtatgaactaacgtgacgacagtaagcatgtacattggtgcaaggtctcgtgcgtgttaaagaggccctaggatttcatttctcccccactagcctcaactattctctgcctaatagtgatctgtatcagtcggcacgggactccctttggtcctgctggagaacgaggaatgatatatcccataactataggaggaaattctgatcttaatgagtatgacaggcgtaggagggagtgatgttaagcagtgatgttcagaggcccttggttgatacgatactgtgttcggacttggggttgaattgcataggtctatcaagcaaggaaccatgcgtcctgaggctacggaaaccaggtcgtgcaagaacgtgggagaaagcaaaaatcgagcattccattgaggtctcggcacgggtaccctggtctgagcctatgcagacggtaattctcaagaaagcatcacagcgatacaaaactctctaagaaattcggtgcggcccgccaggaaggtgacacaggggggcggccataacaccaaatgcaggggacccggtcggacagttgtgtcaccacacagcggggcagggtgccatacgttgtgacgtggggccgtatgaccgggcgggaccctcccggtgaacaaccccacggacgcac

SEQ ID NO: 640921 - DNA, 822 bp, Homo sapiens
gcgccttatctactgagggctcattgattgagatgggtctagttaagcgaccgtaccgaaagtgaggttgggactaccagaccacacactgggatcgagagacttgacgtgcctctagtccaccatgaacgatcttaagcatagtgctgaccagtcccaactatgccatctcatagcagacacatgcgagcagagatgtgaggttactaacgtacaaaaatgtgccaccgtgaatgcgcaagttgcatacgtatgattgtgctcccctctcaatgtatcaggaactaggtatatctcctggaacagtctcatgtggtgtcatgggaccaaaaccaatagacaacgccgcgtcagcgcacttggtcaaccaattcgacttgcatgcatcgcaggacaagcctggcatcaatttcgtcatccacgcttcccccttcctaattgaacgatctcggaaaggcacagaatctggcataccaggtaatgtcgtccccaaaggtgtttttcgggggggtccccttcttcacaagccgtggcgagttggacaggggtgccaaacgaaccaacgcgaaagttgtgggggggcaactctgacttaaggcccatattgagagaggccccatagctgcttaagagcgagcgctcgaataggagccatctattggtccgcgaagccaaagtatgttaacggcttcccaaaggcaaaaatgcccttggatttccttcccaaaggcgaggccaaccatttgtctttcccatccaatttggaagaaccctttccgctttattcggggcgggaaacgacacggttgggaacggtggtgg

SEQ ID NO: 640922 - DNA, 712 bp, Homo sapiens
agaggaaaaaaaaaaaattaaaaattttaaaaaaaaaaaaaaaaaaaaaaaaaaaaaaaaaaaaaaaaaaaaaaaaaaaaaaaaaaaaaaaaaaaaaaaaaaaaaaaaaaaaaaaaaaaaaaaaaaaaaaaaaaaaaaaaaaaaaaaaaaaaaaaaaaaaaaataaaaaaaaaaaaaaatttttgcccctttttgccccatgtattttaaactttcaaattttttttgcttgggcccaaatttgggctttttttgccaaaagctcctttagggggggttatttaaattaaagggggcctgttttaaaacatttgtattgggaaaaaccttggttatccccaattaaactcttttgaaaaaaaccccttttttcccagggggtataatactcaaaggccccccccttggtccttttaaaaaaattgcccacccctcaggggctatggaatttttgagcgctaaattttttgtaaaaatccgggaaaattttttgaaaaacgcttttttttttaacacaatgggtccatattggtaaaaccctttttatcaaaaaatatttccccgctatggcttctatgtttgtcccatttgtcaaaagggtcccctttttaaaagcggtgttctccaccctaaaggggggaaaacccttttattgggggagggccccttctcggaccctttcccttaaatcttttgggtttcggcgctctgt

SEQ ID NO: 640923 - DNA, 308 bp, Homo sapiens
  misc_feature (47)..(47): n is a, c, g, or t
  misc_feature (81)..(81): n is a, c, g, or t
  misc_feature (83)..(83): n is a, c, g, or t
  misc_feature (105)..(105): n is a, c, g, or t
ctgcagtggatgatgatgatgatgatgcagcttaagatgatttactngttttgtttttgtgtttgttttgcttttttgagntngagtttcactcttgtcacctanactggagtgcaatggcgtgatctcggctcaccgcaacctccgcctcccaggttcaagcaattctcctgcctcagcctcccaagtaggtgggactacaggtgcccgccaccacacccggctaatttttgcatttttagtaatgacagggtttcaccatgttggccaggctggtctccaactcctgacctcaggcgatccactgt

SEQ ID NO: 640924 - DNA, 578 bp, Homo sapiens
tcgttcaagtcctttaacacgcgtcagatgacttacttcatgcaagttaatgtagcacactcaattcttggtgtcatagctattgcctgcaagtcatctgcagcaaaagtggattccatctttagacatcactttctcaggtcatcggtaagaagcaactcctcatctgtttaagttttattatgagatcgcagcaatttagccacatcttcaggctccatttctaattctagttctctcgctatttctaccacatgtgcaattacttcttacaatgaagtcttgaactcctcaaagccatccttgagggctggaatcagcttcttccacactcctgttaatgtagatattctggcctcctcccatgaatcacaaatgttcttaatggcatctagtatagtgaatcttttccagaaggttctcaaattgactgtgcctcaagatccaactaaggaatctatggcagcaatagccttataaaaagtatgtcttaagtgataagactcgccaggcacagtggctcactcctgtaatcacagcactctggaacgctgagaggggaggtcacttgagcctag

SEQ ID NO: 640925 - DNA, 360 bp, Homo sapiens
acgacgttgagtactatgttgactcatcccaggaccccgacttcgaggagaacgagtttctctacgatgacctggacctcgaggacattccacaggcgctggtcgcacctccccccccagccacagccacatggaggatgagatcttcaaccagtccagcagcacgcccacctcaaccacctccagctctcccatcccgcccagcccagccaactgtaccacggaaaactctgaagatgataagaagaggggacgttccacagacagtgaagtcagccagtctccagccaaaaacggctccaagcctgtccacagcaaccagcaccctcagtccccagctgtgccgcccacctacccctc

SEQ ID NO: 640926 - DNA, 1175 bp, Homo sapiens
ggagctggaggctcctcccggaggtaccaagtgatccggggtagcgagcacgtcgctccgaaccgttctggcctcgcagtccgatgacgcacgttcctcttctcgaccaatggtcgcctagaggctagagcacacgagactcgaaggccaccagacgcgctgtgacgacgactgagagtacagctggtgagcttcatgtctaggggatacgatggataagagctaaagcgcatgggaatgcagcgattcaggtatgacacgaatacggcttgaagaccaagaacatcccgagtctctgaatgtgacataggatactcgatgtgcatagatacacgtgcccatcatttcactcttcagagtaaccgttggtgacataacctgcacaggctgcaaggtacaagtaagaagctggcgaacacatagagctgcgagaggctgcatacacacatttggaaagccaatgcaagtatgggcttggcagttcctgaccccttaatgcctgagccttccaagcaaccaaagaaccagcttaatcctattggttcattgacaggaatcggctatgcatcatggctggagacttcctgaatatacccttgcccaggagggaggacctgcgtcataaagagagaatatactacaagtttgcaggctagagtcatatatggaagacctggaaaggggggcatcaaagaaaagcaagtcaacagggaatgtggttgagaaaatttcttgccacattagtactatttctccagaagaacacagttcctttaaccaaatggtagtaaggacatacttcaggatgttctgggcattcctcgcaggaacttctctggtgaaaagatcaactcaccggacaacgaagcctcgtaaaatccacaaaccagatcacctcagcgctagcgcaatgccacggaacaaagcggtaacacatgacacattcggagcattacgcaacagaccgctggacacacacacagcccgcactcgcaccaagccccaaaaggagaggaccgggccctgcggacgcacaaggacgcgccaagcgtcgggcgtagccacagaaagaagtcggacaaaggccagcaaacaccacgcaagatacaggggtagaccaacgcaagaatatatgcgtagcgacgaacgacataacatctgaccgaccacaaaga

SEQ ID NO: 640927 - DNA, 849 bp, Homo sapiens
  misc_feature (434)..(434): n is a, c, g, or t
tggactttaaccaagcttacggcctgcaaaccctttgttaccaaagcacaatcctgcagggccctaaatgctttaatcttggattcaatacagcactaggtttctggtgacgcacagagtgggggctaaagttacgggttaatagctatctcaaagcagaaacaattttccttagtcacagatcaaaagggagttccttatgtcttccttttctactatagacggtaacaatctgtatctcttcttttccccacaaaattgttgtgcccccagaaaacccccagaagcgggaaagagggagatctggtcacggccggtgcaggtctcaccctggagctgagtgagggtcttcagctccggggtctgctctctttccacatttgtgttctctcacgtgggccctccctcgagtggctgtgcctctttaggccccnccaggggcacccgtgtgtgttaccctcaagagccctcccgtgggcctcagcttgtgcttcaagagccgccactctcagatttgctccccaagaactcttcagccccattatatgtgattgaaaaacgccaggagattctcctcaggtgcctgtgggacaacccctgtggaatttgtgcagggggcctctcctgtgcctctaactctctgtgccccccaagccaacctgttgggggggtgggccctccagaaccaattgtttctcccctaatctggaaacagtgagctcctccgtggacaagcgtgcctcgaaggcttaagagagcctcgtgccggggcggagagtggtgcctacccattgaggggggaaggtttgggaaaaatggggtccttgcgagcacccggaagttaaacac

SEQ ID NO: 640928 - DNA, 164 bp, Homo sapiens
  misc_feature (41)..(41): n is a, c, g, or t
  misc_feature (56)..(56): n is a, c, g, or t
  misc_feature (107)..(107): n is a, c, g, or t
tttccttaataactaatgataccgctgtctactgacggcancaatggtattgatgnggatttccttatcggtaatctgacgaggtccactgctaccagattcaagtnaaaaaactaatctgacccgtccacctccatgatgatgatcgtctgatcccgggaatt

SEQ ID NO: 640929 - DNA, 368 bp, Homo sapiens
ggattatagtgacggagttactaagggtcgtgaatgggatgcccctggctgggtgctattgatgcgaagagggtccaatagggttccaacgacagcgtatgacgagttggtctgaaagcccccggtatcattcctcgaatatcatatgcgggaacctgagcagactggcattaatgctgtggataccttggtgccacttgcgccgtggtcagcgtgaactgattattggtgaccgacagattgggagaaccccagctgctattgacacatactcagttaaccagataacgtctcggttgatggatcctgatgaaacagaagaagctgtactgtatttatgttgctattggtcaaaagagatccactgt

SEQ ID NO: 640930 - DNA, 349 bp, Homo sapiens
  misc_feature (331)..(331): n is a, c, g, or t
cgtcatgtcttctgacagaatatatacaggtggggactggcaagggaaatcctatctcaggaaggcgaggaacaccaccacagagccacagacccttagcaatgttcccgtggctttcattttgcatgttggcccttgtctctaggacagatgtttgagtgtgctggggacgcagctgagcccatgatgacgagtgttggcccttgtacctcaaactcctccataagaagtgcctcattaagggccaaggtcacaggtcagagtcacactcttgaggtggtgcgtgttgggcaagggttgccacacatttccccaatgaaacaggttgggnggtgtgtgtgtgtgtgtg

SEQ ID NO: 640931 - DNA, 156 bp, Homo sapiens
taacctttccttatgagcatgccggcgtggggttgacagttgagggtaataatgactggtgggtggatggtagatatggggctgttaatggtcagttcagggttttaatcggacgcaggcttaggcgccaatcaacataggggggtacggagctcg

SEQ ID NO: 640932 - DNA, 491 bp, Homo sapiens
  misc_feature (211)..(211): n is a, c, g, or t
cagtatgctgatctgaagctggagaacttcctccatatggcagagggcttaagaaagaaacgaagaactctaagctgggtctgctaacatcactccagtttagactgatcttggctgacgcagacatgcttgtacctctggatcggaaagatgatttactctcgggaatcttctctgtcagcctgtacatctgaaggctttacagcactcnagttgggacattcacattagtgtttgttctctgatggtatctctgagaatactggttgtaggactggccggtattgccaacgggactgggttcacccccaggtctgcggcagttgtcacagcgccagccccgctggcctccaaagcatgtgcaggagcaaatggcaccgagatattccttctgccactattctcctacgtggtatgtcttcccatcatcataacacgttgcctcatgagggtcacacttgaattctccttttccgttcccaagacatgtg

SEQ ID NO: 640933 - DNA, 381 bp, Homo sapiens
ctactactcctcaggcattatactggccccctcccatccactacacatcaagctcgcggatcagccccacccaggactggcaaattcgctctactcaacatgccctgagctcaggacactcacacactcactcttagtctaaatagaccacttacactgaatccgtacacggcctttccctacagggtctgagcacaggcactgcagtcatttctatccattctgtcagacataattcctcagattaagccttcccacctcaatacagactgataacagatgagcctttattattcaaatcagacacgcagtttaacaggctcttagtattcagtgaaacctttatatcccttacggtcctccgtctacaagaaaagtaca

SEQ ID NO: 640934 - DNA, 716 bp, Homo sapiens
gtaagctttgaaaggcatgaagatgctgagaaagctgtggactcagcatgaccggaaaggagctcatatggaaaagcaacatttaagttgttgggtcgatgctcagagaaaaggtggacagcggcagacgtgacacttactgtcgcatacgattgactccgatgaaaacatcgataggatctctcagataccaggagtgtgcaatcatttatgtgaacaatatcttgcatgatgcgctatttgcactgatgactcgtctccgggaacgagtttactccattggggctaccaatcactagtgcaaaggtcatgctgcgaggcgtggtcgcagcatacatgaggctacggtcatccggaatacgttactctcatgcccccaagataggaatcgccatcttatacatacagtatatcgcccacacattgaacacaggttacggcacattcgttgggccaacaaatagccccttggttactgatcacgcttctaaagctttcacgccgcacaatggcacacggaaaggatggccacagggacgtccaaacccctttcaacgtacatccctaagatataattagttggcagtcacgcaacattgacgacgaaacgttgttacgagcaggcataggatccccccaaaacccctggtacattcaactaccccttttatgccagccaagcgacgactacctttcaagactaacaccaccatggg

SEQ ID NO: 640935 - DNA, 190 bp, Homo sapiens
gcccagtgcgcgtccacctgctcgtccgcagaggtaagcgcgttgaggagagccccgtgaggtttcgcacggttgcttactagggttctcatagaattttcttcttcaccactcaattcatatcttaccttacacaagcaggtcaaggcagtcaaccaaaggaggaatttccctttttccgagaccaaga

SEQ ID NO: 640936 - DNA, 367 bp, Homo sapiens
gagtgacacctggacacagaagaagttctacggtgtatggatggtggcaactgacaatcgataatccgtgtcagtgtctaccacattgcagccctcatccgcgacccggttgccagttcagaaggggcagagcctctaccatgggaccttcgatgccttcatcaagatcctgcgagcagatggtaatcactggatctctaccgagggttcctaggtcaatcccttcaccctcatctctggcgcagtgttatgtcaccacttatgagctcaacctgaatttggtggctgactacggccagagtaacacagtcagttcactggtggctggtggctcagcctcccttgtggcccaaagcatcagaatacc

SEQ ID NO: 640937 - DNA, 373 bp, Homo sapiens
cacgtctgtcctctttccatgcagctgcctcacctgctctgcagtggcggccgcggggccaggctctgggggctcttcacgagtagcgtgtagggtgtcttgtttccccctatactgtggcgaatggggtctcaccatgttgcccagtgccggtcttgaacctctggaatcatgcaagcctacctcggactccctaaatgctggggaattagaggcatgagtcactgcgcttggccttcatgtcattggttaataaatacccattacttgaaaacaaaccaatgaagcaacaacaacaaaaaccttttacacttgggaactgtggggttgttgctcaagaagcacctaggaatggcggaccccactcttccct

SEQ ID NO: 640938 - DNA, 495 bp, Homo sapiens
aaggtcgaagaggtgtgggagtatctgtccttacccaggtttcacactcaatctgatatagcatgaccatgtctttgctacttcctatgataaataggtatgatctttattcccactgtacatgtctgttctatcctcggcctcccatcaggccctgtgtcttagttcctttgttaatatcttgaagtttagtccctccatccttaatacgccccatccctccccatcatgcaaccagtggtttattccagtgtagcaataggggctattaccacagaggcctcctgtggtgccctcgtatcataccacactgttcctgtggagagggaatgaccggcactgaaggtaccttacaactggctcatattatcagaggaccttggtcctttctaaatctctagtctctcttcatatccttcatcaggtgttttaagatgtctctgagaagccatcaaggcaaaggagaactttaagttccttgttccagcccggagt

SEQ ID NO: 640939 - DNA, 897 bp, Homo sapiens
cacggggcttttacaccgaaatgttgtataatagcacacattggacaacgccctgttttagtgggtgttattgcggcaggaacgacacacattatacagggatatttttaggggtgggcaacaccaccgtgtatagtagggataactcccgcgtcagaagggggatgaccccccaccgaaaagatgttttgggtgcacaccagaggaaatattacactgcaggaggcgttgtggtgaaaagaaacccggcgaccgcgccccccacgagaagacacttatttacaccgggtctcttaaaggagttaaaccgagacgcccttggggtgtcgccgaaatattctcggcacacagtagaggcaccgcgccgcctctcaccccagtgtagtgtagacacacggcgcgcaacactgcatgcgatcgcacaaagtgtgtgagaggagacccccttgcgccacatgtggggcgcactgttgccacccgatgtgttgcgctcacagatgccacatgtgcccttctcacatgggcgccagagagatctccccgccgtctcctcccataagccaacccaagaatgatagtcccgccagccaacccattggcccaaccgggggtggtgttttttccggggggaaccctggtggctacatcttcgccaatcccgtgggggccacactggacatctcccaccatctatcccaacaatcctcctggcctctgttgggtccagatgttgggggcctgcgttggggaattccacccttctttctttcttcttccccagctgaacccgaggctaaagaaagaatgaggcaagagaaaatgtaccccacaggtgtgacctcccaaacccccactcaagtcagagaaacatgaggaataaaggtctacaagcagatc

SEQ ID NO: 640940 - DNA, 399 bp, Homo sapiens
agttcgacggagactctcgggctgtgtcatgccaggcgagagaagatcaaagtcagtagcatccttgctgtcagcatcacggcatcttgccaagaaaagcaggtgagatctggcaagggattgtccacagagaacaaagaggagtgggatcgcaaggctgaggatgcctggagggactatgaaaaagccatgaaagactatgaggggggccgaggcgaatcttctatgagggacccgtcaaagaagatgacgagagtcgaggtgaagctggcaaagaagtccacgccctctaggggctcatcatccaaggtcgtcctcgaggcagctatgcgagagcttcaagagccaagagttcgtgtctagtgatgagagctcttcgagagagtctccggcgaacag

SEQ ID NO: 640941 - DNA, 1925 bp, Homo sapiens
tgtttcacggcagcctgaccaacatggtgaaacttcgtctctactaaaaaatacaaaaaaacgaccaggcgcagtggctcatgcctgtaatcccagcactttgggaggccgaggtgagcggatcacgaggtcaggagatggagaccatcctggctaatatggtgaaaccccatctctactaaaaatacaaaaaattacctggcgtggtggcgggcgcctgtagtcccagctactcaggaggctgaggcaggagaattgttgaacccgggaggcggaggttgcagtgagccgagatcgtgccactgcactccagcctggtgacagagcgagactacgtctcaaacaacaacaaaaacaacaacaaaatacaaaaaaattagccggacgtggtggcggatgcctgtaatcccagctactcaggaggctgagacaggaaaatcacttgagtctgggaggcggaggttgaagtgagccaagatcatgccattgcactatagcctcggtgacaagagcaaaactctgtctcagaaaaaaaaaaaaagaaaagcaaagaaaaaaaaggcacaatatgtaatgctatttgctaaagtcagcctctttatgggtcttttgttgacttcttctttagtggctccacttcttagaagttaatgagcaattcctgctatagcagcagagcctctaccaaagcagggggacttcagggaaccactggttgtcagatgtgctgggcgtgaacatgagcgtgaacagaggaaaagtgtctgatttaactggtctcgggtgaggcctgcatgttgggatgtttagaggttccccaatgataactaataagaagccaaggttgaaaaccacatctaggccaaactgcgattaatttttgccttccacctccttatcaatgtcctctttcccttatgaccctgctgcctacctgactcagttgcgtccactttctctgtgaatcttcccttacctccacgttggctgccagcttcaagattgcatgcccctctgagcagtttatctctaaccaagagaggtattcctttccaagagttccattaaaagtccaaaggagaagttaattggcctgactttggaccatgtgtgcccacctctcaaccaatcactgttatcagggcagtcatccctttgtccagccatgctcctgtatcagagaagcactgccatgacagatattgggcaaactgatatatgacccccaatactgggtttggtgctcattctcgttaatgcatgtgttaagggtttcattctaatcatctgcaaaaaagtgattgttgtctttaaaatgttaccaaaactagtcttttagcaagaatcttactagaataaaatggctcttgctacctgtatttttaatcagcctatgtatattgatcccattcctgatattatcaccttaatatataacagccccaattcctcttattgagcattggttgctagggaaagcaaaaagttaagagaaaactactgagattttctctctaatttgcctctgtctgcctctaactagcttagagatcttggacaagtcctttaacagttctctgtcagctgcttggactgtgaaatagagataaaagtacctgtctatttcaggccgggcacggtggctcacgcctgtaatcccagcactttgggaggcccaggagggtggatcacgaggtcaggagattgagaccatcctggctaatgcagtgaaaccccgtttctactaaaaatacaaaaaattagccgggggtggtggtgggcacctgtagtcccagctacctgggaggctgaggcaggagaatggcatgaaacccggaggcggagcttgcagtgagccgagatcacgccacggcattgcagcctgagtgacagagtgagactccgtctcaaaaaaataaaacatt

SEQ ID NO: 640942 - DNA, 289 bp, Homo sapiens
  misc_feature (24)..(24): n is a, c, g, or t
  misc_feature (146)..(146): n is a, c, g, or t
  misc_feature (176)..(176): n is a, c, g, or t
  misc_feature (197)..(197): n is a, c, g, or t
  misc_feature (200)..(200): n is a, c, g, or t
  misc_feature (228)..(228): n is a, c, g, or t
  misc_feature (261)..(261): n is a, c, g, or t
tatatacaactacgcaaaggcccnaacgttgtaggcccctacgggctactacaacccttcgctgacgccataaaactcttaccaaagagcccctaaaacccggcacatctccatcaccctctacataccgcccgaccttagctctnccatcgtcttctactatgaaccccccttcncatacccaatccctggtcaanctnaactaggcctctattattctagcacctntggctagccggtacttcaatccttgatagggtngcatccttacgcctgatcgggcactgta

SEQ ID NO: 640943 - DNA, 943 bp, Homo sapiens
  misc_feature (8)..(8): n is a, c, g, or t
agcttgtngcgcagtcgtgcgtaatatattgtatgtcactctcctatgggtgatctctcacttgcgcctctttgtcgcttgtaaagagcacactggggtgaaccagcaggagtggttcagagcagagatagacctctcgtgtctattagtcctccatatgtggtactgagacgacttggaagccaactgggtaaaaatcctcgttattgtgactctgtttccgccacgggataaattgccagcacttggtgtaaaataacgaaccgcgcacgcgttttatctgtgcctcaaaacccacccttggtattaagtatcattctccgattttcaataacctttggttaggaacccgctttctatacccttcttctccccgggaagcaccccccacaatgaccctgggacactcttttttagaggctactctacgtcccaccactttggtggttattgggtaaaacaacccaaagctctccgttttcttagattctgggagcgcggaggtccccttagaatgaaactggtgtgtcgctggtggcacaagcccgtggtaaacaatatctaaccaccactctttattctcctggtgtcaaaaacaattgggcgataaactctccccacgtgaagttgtttcacaaaatttccctctttgccccctttttttctccccccccgcaataattacctcttttccgtgtccctacctgctcacattgtgtgtggtccccccccaacgcgctgacttccctgtatacacccccactgtaacgtcaaatacgcaaacacacacaacgaccgattcagtacgattcatgtaataaatgactcggcatactaggcgcgcttctctctccgcaccccggtatcggtcgcgtgggccccccgattcctttgttctgggaccgacccccccacctacttcaatcgcaacacacaccaaaat

SEQ ID NO: 640944 - DNA, 131 bp, Homo sapiens
agtgtagcatcgtctgggtcacgggggtctacagcgttaggctctccttgcaaagttattctctagataaatatcattatgctagaaggtataggggttagtcctatgtttatccagagtgttcgcctgat

SEQ ID NO: 640945 - DNA, 367 bp, Homo sapiens
gaaacggcattctgacaactactgtaggaaaggacacctctacagacactagcaagagaaactaaaaccttaaagtaacggttaccaaataacctacggggatgacactaactttcatacgcaagacaaacacacaagggttatacaaacagcatcagtcacccaataaaatgcccaagcaaaaacaacaacctcaagtcccaacaagttagattcaacaggtccaaccagcaagcaaacgtgtcaccagtgttgcaacaccaaccaaccaactcaccacaatcatactagcatcatccggtcatcccatcactcatcatcatcgcaatcatcagcaatcagcatcatagcacccatcatagtcatc

SEQ ID NO: 640946 - DNA, 294 bp, Homo sapiens
tctagaggatccctccctatgagacatcaactgatggagtatattgggttggaaaaaaagccaggcttaggaagttagaaaggggaactaagagaaaggaaactcagaggggcaaaatcagcctgtctccctcagttccagattcctgagccatcacctagacaacgtctgaatccctttggcttttcctgaggctgttaggggtgagggttttgcagagggaaagggagggagctcacagctggaaggtgaaataaaaatagcatcagggaagaattcttcctggtcacttac

SEQ ID NO: 640947 - DNA, 883 bp, Homo sapiens
cgcgagcggtagctggtgtgtggcaccatggcttgggatcaccaccatcgaggcggtgaagcgcaaggatccatgggttctgcagcagcagggcagatgatgcagagtgagcgagctgatgctgcctccagcgaagaagttgagggagaaatggcgtggccctgggaacaggctgaggctgagtgtggcctccttgaacctgtaggatccagctggttgaatgaagagctggaccgtgctcaggagcgcctggccactgccctgcaaaaagctgggaagaacgctgaaaaaatgcttgctgatgagagtgaagagaggtatgaaggttatttgaaacaccgtggccttaaacagatgccgaaaagattggaactccatggaaatccaaactcaaagaagctaagcaccatttgcagaacgaggcatgataggaaagtatgatgaggtggctacgttaggtaggtgatcatctgaagggagacttggaacgcacagaggaaacgagctgagcctggcagaagtcccgtatgccgagagtatggatgagcagattagcactgatggaccacgaacctgaagtgtctgaggtgcctgctggaagcacaacgtaactctcaaaaacagacagataatatattacggcagaagtcacggactcttactggtaaactcaggaaggcaagagaccccggatgctggagatatggcaggagagctccggtatgcacagctggacacagacgtatgttgcctgggaggaataaatgggagatgggccaaagagggactcccgttcccaaggagtgtgggacaaccgtgttaccctgatgaattaaaggccagccaacctgggagtcctccctaccagaccgcagagagaatg

SEQ ID NO: 640948 - DNA, 1381 bp, Homo sapiens
  misc_feature (586)..(586): n is a, c, g, or t
  misc_feature (1019)..(1019): n is a, c, g, or t
agtgtagagattgccatttttatttgtgattttttgttttttcttatttggggtacttcaggatagccaaattatctatcgtgctattaaagtggctaaagtgacccaaggtgtttttttttgggtttttttttgtgagaaccaaagttctcacgtgtttgccccaggccgtgaagtgtgcaggtgggtgacaaactcctcggcctcagctgtggcaagcctcgtgtttctcccgaggttctcagcgcccaatttctctcgctggggctctacagcctctccacagagtataggcgtggggaatatacgagggcccccgcgccaagagggtgcccgggggccataaatttgcggggatattttaaagtatagaagaaacgggggtttttctcccacccagtgtgtgtgtgacgccccgaggagtagtgcgtttctctcaagactctctcctgtggcaccttgtgtgtgaaaacccacacgccgcgttttctctgccgggcctcttcccaaaagagggtgccgtgggggattatccccggggggtgttgtttgatgacgccccacccaagcgccgctggtgggcccnccgttgtggaaccaccccacgggcggggggttctttccacaagaagcggagagaccaacaaacaccctcatattttcttgtgttagaaacctcctatctccaggaagattttttaatatcactatagcggctataatttaggtggggatcttattttatacggcgatattaatctcgtgggggagacactcttatcgagaacattcttcttagaagaaaatcttctcttgttgtcccacgccatcattattgttttgttgactcatattaacaacatacagccggtgggggtacaggcgctcctcccgaaagttaataattgtggggcgccatgttgccaggtgttgcaacaagaggcaatataatacaccacacaccgttggtgtgggggggcagtcttcaaaccaaacatacgggggtggtcccacaacantcttctggttgtggggtacacgcacactttaacaccaacactttttttaacaccgcttttttaccaagaacaaccctcgtctttttaaaaccgttgctatatgtaacacagtgttgtgtgtcccccaaatatgagggggcccgcaaaccactctctgtaatatgatttattcctccccgcattttttataatacaacagcggggcgcaagacgcggacacgagtgttttcttataacaatatttcccccccccggcgtggggagatcaaaatatgcgagggacagtaggggacattgtggggccatcccatctcaaacagggcaattcaattactgttgtgtggcggagaaaatcctccccg

SEQ ID NO: 640949 - DNA, 1640 bp, Homo sapiens
  misc_feature (49)..(49): n is a, c, g, or t
  misc_feature (51)..(51): n is a, c, g, or t
  misc_feature (54)..(54): n is a, c, g, or t
  misc_feature (69)..(69): n is a, c, g, or t
  misc_feature (83)..(83): n is a, c, g, or t
agggagtcgacagcatccgattgctaaaacattcaactctgggtgagtngntanccaactaggcaggtngacaggtcagtctncagctgactgtctgcctctgcccaatttaggtgcctatgacagcatccggcatgcccatagccagtctgcagaggcagaacgtcgtgccaatacctcagccctggcagtacctagccctgtgagcaactcggcaagtgctcggcatcggacagaggcactgatggatgctcagaaggaggacttcaacagcaaacacatggccaaccagcgggcacttggcaagctctctgcccatacccacaccctgagcctgacagacataaatgagctggtgtgtggggcaccaggggatgcaccctgtgctacaagcccttgtgggggtgccggctgtcgagatgaggatgggcagccgcgctgtgggggcctcagctgcaatggggcagcggctacagcagacctagcactgggccgggcccggcacacacaggcagagctgcagcgggcactggcagaaggtggtagcatcctcagcagagtggctgagactcgtcggcaggcaagcgaggcacagcagcgggcccaggcagccctggacaaggctaatgcttccaggggacaggtggaacaggccaaccaggaacttcaagaacttatccagagtgtgaaggacttcctcaaccaggagggggctgatcctgatagcattgaaatggtggccacacgggtgctagagctctccatcccagcttcagctgagcagatccagcacctggcgggtgcgattgcagagcgagtccggagcctggcagatgtggatgcgatcctggcacgtactgtaggagatgtgcgtcgtgccgagcagctactgcaggatgcacggcgggcaaggagctgggctgaggatgagaaacagaaggcagagacagtacaggcagcactggaggaggcccagcgggcacagggtattgcccagggtgccatccggggggcagtggctgacacacgggacacagagcagaccctgtaccaggtacaggagaggatggcaggtgcagagcgggcactgagctctgcaggtgaaagggctcggcagttggatgctctcctggaggctctgaaattgaaacgggcaggaaatagtctggcagcctctacagcagaagaaacggcaggcagtgcccagggtcgtgcccaggaggctgagcagctgctacgcggtcctctgggtgatcagtaccagacggtgaaggccctagctgagcgcaaggcccaaggtgtgctggctgcacaggcaagggcagaacaactgcgggatgaggctcgggacctgttgcaagccgctcaggacaagctgcagcggctacaggaattggaaggcacctatgaggaaaatgagcgggcactggagagtaaggcagcccagttggacgggttggaggccaggatgcgcagcgtgcttcaagccatcaacttgcaggtgcagatctacaacacctgccagtgacccctgcccaaggcctaccccagttcctagcactgccccacatgcatgtctgcctatgcactgaagagctcttggcccggcagggcccccaataaaccagtgtgaaccccca

SEQ ID NO: 640950 - DNA, 125 bp, Homo sapiens
atacctgtccttcagagtaggttgatgtaatacagcaacatttataattttgtttttccttttgagacacagtctcactcttgcccaggctggagtgcagtggtgcgatctctgctcacggcatt

SEQ ID NO: 640951 - DNA, 299 bp, Homo sapiens
tgggctaaggggcagcaataatatggtttggtagtgtctcacccaaatctcatcttgaattcccaagtggtgtgcgaggcaccctgtggaaataactgaatcctgggggcaggtctctcccatgccgttcttgtgatagtgaataagtctcatgagatctgatggctattataagagggagttttcctgcacaagcgctctttgcttgctgccatctgtataagacatgatttgctcctccttgccttctgtcatgattgtgaggcttccccagcagagacggaatcgtgatctagatc

SEQ ID NO: 640952 - DNA, 1390 bp, Homo sapiens
accggagtctataaaggcagtcgggtagccctggacaaggctaatgcttccaggggacaggtggaacaggccaaccaggaacttcaagaacttatccagagtgtgaaggacttcctcaaccgtgagcctcccacgtgtcccaggccatgtggttgtcccctttggcaactcccggtgtctgtatctcccttggttcatacttgagcctcagggactacactggattagtgtttatgatcccttgactggctcctgagttattgcccatatgtggtcccaggtccatgttcttgagtctgagccccttgtatagtccctgtccttgtgattatatccttatgcctggtaacaaacccctatcccatgtacatgtcctgagtccataccccaaaactgtatcctcatgcccatgctggagaatctatgttcttaagttcttgctgtgtccctatagaggagggggctgatcctgatagcattgaaatggtggccacacgggtgctagagctctccatcccagcttcagctgagcagatccagcacctggcgggtgcgattgcagagcgagtccggagcctggcagatgtggatgcgatcctggcacgtactgtaggagatgtgcgtcgtgccgagcagctactgcaggatgcacggcgggcaaggagctgggctgaggatgagaaacagaaggcagagacagtacaggcagcactggaggaggcccagcgggcacagggtattgcccagggtgccatccggggggcagtggctgacacacgggacacagagcagaccctgtaccaggtacaggagaggatggcaggtgcagagcgggcactgagctctgcaggtgaaagggctcggcagttggatgctctcctggaggctctgaaattgaaacgggcaggaaatagtctggcagcctctacagcagaagaaacggcaggcagtgcccagggtcgtgcccaggaggctgagcagctgctacgcggtcctctgggtgatcagtaccagacggtgaaggccctagctgagcgcaaggcccaaggtgtgctggctgcacaggcaagggcagaacaactgcgggatgaggctcgggacctgttgcaagccgctcaggacaagctgcagcggctacaggaattggaaggcacctatgaggaaaatgagcgggcactggagagtaaggcagcccagttggacgggttggaggccaggatgcgcagcgtgcttcaagccatcaacttgcaggtgcagatctacaacacctgccagtgacccctgcccaaggcctaccccagttcctagcactgccccacatgcatgtctgcctatgcactgaagagctcttggcccggcagggcccccaataaaccagtgtgaaccccca

SEQ ID NO: 640953 - DNA, 5878 bp, Homo sapiens
  misc_feature (129)..(129): n is a, c, g, or t
gaaggcagtttccggagggaaggggtagggttggggtgggggcgctctccgcccggtgttgcgctccttcccagaatccgctccggcctttccttcctgccgcgattcccaactttgctcaaagtcgcnggactctaagctgtcggagggaccgctggacagacctgggaactgacagagggcctggagggaaacaggccaaagacccacaggcagagttgacacggaaccccaaagcaaggaggagggctcgggcccgagaccgttcacctccccttatccctgttcccctcttcaggatggagctgacctcaagggaaagagggaggggacagcctctgccctgggaacttcgactgggcctactgctaagcgtgctggctgccacactggcacaggcccctgccccggatgtgcctggctgttccaggggaagctgctaccccgccacgggcgacctgctggtgggccgagctgacagactgactgcctcatccacttgtggcctgaatggcccccagccctactgcatcgtcagtcacctgcaggacgaaaagaagtgcttcctttgtgactcccggcgccccttctctgctagagacaacccacacagccatcgcatccagaatgtagtcaccagctttgcaccacagcggcgggcagcctggtggcagtcagagaatggtatccctgcggtcaccatccagctggacctggaggctgagtttcatttcacacacctcattatgaccttcaagacatttcgccctgctgccatgctggtggaacgctcagcagactttggccgcacctggcatgtgtaccgatatttctcctatgactgtggggctgacttcccaggagtcccactagcacccccacggcactgggatgatgtagtctgtgagtcccgctactcagagattgagccatccactgaaggcgaggtcatctatcgtgtgctggaccctgccatccctatcccagacccctacagctcacggattcagaacctgttgaagatcaccaacctacgggtgaacctgactcgtctacacacgttgggagacaacctactcgacccacggagggagatccgagagaagtactactatgccctctatgagctggttgtacgtggcaactgcttctgctacggacacgcctcagagtgtgcacccgccccaggggcaccagcccatgctgagggcatggtgcacggagcttgcatctgcaaacacaacacacgtggcctcaactgcgagcagtgtcaggatttctatcgtgacctgccctggcgtccggctgaggacggccatagtcatgcctgtaggaagtgtgagtgccatgggcacacccacagctgccacttcgacatggccgtatacctggcatctggcaatgtgagtggaggtgtgtgtgatggatgtcagcataacacagctgggcgccactgtgagctctgtcggcccttcttctaccgtgacccaaccaaggacctgcgggatccggctgtgtgccgctcctgtgattgtgaccccatgggttctcaagacggtggtcgctgtgattcccatgatgaccctgcactgggactggtctccggccagtgtcgctgcaaagaacatgtggtgggcactcgctgccagcaatgccgtgatggcttctttgggctcagcatcagtgaccgtctgggctgccggcgatgtcaatgtaatgcacggggcacagtgcctgggagcactccttgtgaccccaacagtggatcctgttactgcaaacgtctagtgactggacgtggatgtgaccgctgcctgcctggccactggggcctgagccacgacctgctcggctgccgcccctgtgactgcgacgtgggtggtgctttggatccccagtgtgatgagggcacaggtcaatgccactgccgccagcacatggttgggcgacgctgtgagcaggtgcaacctggctacttccggcccttcctggaccacctaatttgggaggctgaggacacccgagggcaggtgctcgatgtggtggagcgcctggtgacccccggggaaactccatcctggactggctcaggcttcgtgcggctacaggaaggtcagaccctggagttcctggtggcctctgtgccgaaggctatggactatgacctgctgctgcgcttagagccccaggtccctgagcaatgggcagagttggaactgattgtgcagcgtccagggcctgtgcctgcccacagcctgtgtgggcatttggtgcccaaggatgatcgcatccaagggactctgcaaccacatgccaggtacttgatatttcctaatcctgtctgccttgagcctggtatctcctacaagctgcatctgaagctggtacggacagggggaagtgcccagcctgagactccctactctggacctggcctgctcattgactcgctggtgctgctgccccgtgtcctggtgctagagatgtttagtgggggtgatgctgctgccctggagcgccaggccacctttgaacgctaccaatgccatgaggagggtctggtgcccagcaagacttctccctctgaggcctgcgcacccctcctcatcagcctgtccaccctcatctacaatggtgccctgccatgtcagtgcaaccctcaaggttcactgagttctgagtgcaaccctcatggtggtcagtgcctgtgcaagcctggagtggttgggcgccgctgtgacctctgtgcccctggctactatggctttggccccacaggctgtcaagcctgccagtgcagccacgagggggcactcagcagtctctgtgaaaagaccagtgggcaatgtctctgtcgaactggtgcctttgggcttcgctgtgaccgctgccagcgtggccagtggggattccctagctgccggccatgtgtctgcaatgggcatgcagatgagtgcaacacccacacaggcgcttgcctgggctgccgtgatcacacagggggtgagcactgtgaaaggtgcattgctggtttccacggggacccacggctgccatatgggggccagtgccggccctgtccctgtcctgaaggccctgggagccaacggcactttgctacttcttgccaccaggatgaatattcccagcagattgtgtgccactgccgggcaggctatacggggctgcgatgtgaagcttgtgcccctgggcactttggggacccatcaaggccaggtggccggtgccaactgtgtgagtgcagtgggaacattgacccaatggatcctgatgcctgtgacccccacacggggcaatgcctgcgctgtttacaccacacagagggtccacactgtgcccactgcaagcctggcttccatgggcaggctgcccgacagagctgtcaccgctgcacatgcaacctgctgggcacaaatccgcagcagtgcccatctcctgaccagtgccactgtgatccaagcagtgggcagtgcccatgcctccccaatgtccagggccctagctgtgaccgctgtgcccccaacttctggaacctcaccagtggccatggttgccagccttgtgcctgccacccaagccgggccagaggccccacctgcaacgagttcacagggcagtgccactgccgtgccggctttggagggcggacttgttctgagtgccaagagctccactggggagaccctgggttgcagtgccatgcctgtgattgtgactctcgtggaatagatacacctcagtgtcaccgcttcacaggtcactgcagctgccgcccaggggtgtctggtgtgcgctgtgaccagtgtgcccgtggcttctcaggaatctttcctgcctgccatccctgccatgcatgcttcggggattgggaccgagtggtgcaggacttggcagcccgtacacagcgcctagagcagcgggcgcaggagttgcaacagacgggtgtgctgggtgcctttgagagcagcttctggcacatgcaggagaagctgggcattgtgcagggcatcgtaggtgcccgcaacacctcagccgcctccactgcacagcttgtggaggccacagaggagctgcggcgtgaaattggggaggccactgagcacctgactcagctcgaggcagacctgacagatgtgcaagatgagaacttcaatgccaaccatgcactaagtggtctggagcgagataggcttgcacttaatctcacactgcggcagctcgaccagcatcttgacttgctcaaacattcaaacttcctgggtgcctatgacagcatccggcatgcccatagccagtctgcagaggcagaacgtcgtgccaatacctcagccctggcagtacctagccctgtgagcaactcggcaagtgctcggcatcggacagaggcactgatggatgctcagaaggaggacttcaacagcaaacacatggccaaccagcgggcacttggcaagctctctgcccatacccacaccctgagcctgacagacataaatgagctggtgtgtggggcaccaggggatgcaccctgtgctacaagcccttgtgggggtgccggctgtcgagatgaggatgggcagccgcgctgtgggggcctcagctgcaatggggcagcggctacagcagacctagcactgggccgggcccggcacacacaggcagagctgcagcgggcactggcagaaggtggtagcatcctcagcagagtggctgagactcgtcggcaggcaagcgaggcacagcagcgggcccaggcagccctggacaaggctaatgcttccaggggacaggtggaacaggccaaccaggaacttcaagaacttatccagagtgtgaaggacttcctcaaccaggagggggctgatcctgatagcattgaaatggtggccacacgggtgctagagctctccatcccagcttcagctgagcagatccagcacctggcgggtgcgattgcagagcgagtccggagcctggcagatgtggatgcgatcctggcacgtactgtaggagatgtgcgtcgtgccgagcagctactgcaggatgcacggcgggcaaggagctgggctgaggatgagaaacagaaggcagagacagtacaggcagcactggaggaggcccagcgggcacagggtattgcccagggtgccatccggggggcagtggctgacacacgggacacagagcagaccctgtaccaggtacaggagaggatggcaggtgcagagcgggcactgagctctgcaggtgaaagggctcggcagttggatgctctcctggaggctctgaaattgaaacgggcaggaaatagtctggcagcctctacagcagaagaaacggcaggcagtgcccagggtcgtgcccaggaggctgagcagctgctacgcggtcctctgggtgatcagtaccagacggtgaaggccctagctgagcgcaaggcccaaggtgtgctggctgcacaggcaagggcagaacaactgcgggatgaggctcgggacctgttgcaagccgctcaggacaagctgcagcggctacagggtaagaaatggggcaccagagacacaagactgcgggaaaccccccctaaactgacacctgcccttcctagaattggaaggcacctatgaggaaaatgagcgggcactggagagtaaggcagcccagttggacgggttggaggccaggatgcgcagcgtgcttcaagccatcaacttgcaggtgcagatctacaacacctgccagtgacccctgcccaaggcctaccccagttcctagcactgccccacatgcatgtctgcctatgcactgaagagctcttggcccggcagggcccccaataaaccagtgtgaaccccca

SEQ ID NO: 640954 - DNA, 275 bp, Homo sapiens
attgcaaggaaatcaggaggagaagtgtactggacagagcaagagaggcaccagagcccagacccaaacacacatcatcggatacattccttgccctgaaggagatcagagaaaaacacatccactgtgtccttggagtgggaaatggctttttttaacacaatagtttcctataaagcatcaaaaaaacctcagagaaaacctcagcaaaagttcccttactctacaaatctttcggcatcaggcagtagaggctaggacatggctacgctact

SEQ ID NO: 640955 - DNA, 5767 bp, Homo sapiens
  misc_feature (129)..(129): n is a, c, g, or t
gaaggcagtttccggagggaaggggtagggttggggtgggggcgctctccgcccggtgttgcgctccttcccagaatccgctccggcctttccttcctgccgcgattcccaactttgctcaaagtcgcnggactctaagctgtcggagggaccgctggacagacctgggaactgacagagggcctggagggaaacaggccaaagacccacaggcagagttgacacggaaccccaaagcaaggaggagggctcgggcccgagaccgttcacctccccttatccctgttcccctcttcaggatggagctgacctcaagggaaagagggaggggacagcctctgccctgggaacttcgactgggcctactgctaagcgtgctggctgccacactggcacaggcccctgccccggatgtgcctggctgttccaggggaagctgctaccccgccacgggcgacctgctggtgggccgagctgacagactgactgcctcatccacttgtggcctgaatggcccccagccctactgcatcgtcagtcacctgcaggacgaaaagaagtgcttcctttgtgactcccggcgccccttctctgctagagacaacccacacagccatcgcatccagaatgtagtcaccagctttgcaccacagcggcgggcagcctggtggcagtcagagaatggtatccctgcggtcaccatccagctggacctggaggctgagtttcatttcacacacctcattatgaccttcaagacatttcgccctgctgccatgctggtggaacgctcagcagactttggccgcacctggcatgtgtaccgatatttctcctatgactgtggggctgacttcccaggagtcccactagcacccccacggcactgggatgatgtagtctgtgagtcccgctactcagagattgagccatccactgaaggcgaggtcatctatcgtgtgctggaccctgccatccctatcccagacccctacagctcacggattcagaacctgttgaagatcaccaacctacgggtgaacctgactcgtctacacacgttgggagacaacctactcgacccacggagggagatccgagagaagtactactatgccctctatgagctggttgtacgtggcaactgcttctgctacggacacgcctcagagtgtgcacccgccccaggggcaccagcccatgctgagggcatggtgcacggagcttgcatctgcaaacacaacacacgtggcctcaactgcgagcagtgtcaggatttctatcgtgacctgccctggcgtccggctgaggacggccatagtcatgcctgtaggaagtgtgagtgccatgggcacacccacagctgccacttcgacatggccgtatacctggcatctggcaatgtgagtggaggtgtgtgtgatggatgtcagcataacacagctgggcgccactgtgagctctgtcggcccttcttctaccgtgacccaaccaaggacctgcgggatccggctgtgtgccgctcctgtgattgtgaccccatgggttctcaagacggtggtcgctgtgattcccatgatgaccctgcactgggactggtctccggccagtgtcgctgcaaagaacatgtggtgggcactcgctgccagcaatgccgtgatggcttctttgggctcagcatcagtgaccgtctgggctgccggcgatgtcaatgtaatgcacggggcacagtgcctgggagcactccttgtgaccccaacagtggatcctgttactgcaaacgtctagtgactggacgtggatgtgaccgctgcctgcctggccactggggcctgagccacgacctgctcggctgccgcccctgtgactgcgacgtgggtggtgctttggatccccagtgtgatgagggcacaggtcaatgccactgccgccagcacatggttgggcgacgctgtgagcaggtgcaacctggctacttccggcccttcctggaccacctaatttgggaggctgaggacacccgagggcaggtgctcgatgtggtggagcgcctggtgacccccggggaaactccatcctggactggctcaggcttcgtgcggctacaggaaggtcagaccctggagttcctggtggcctctgtgccgaaggctatggactatgacctgctgctgcgcttagagccccaggtccctgagcaatgggcagagttggaactgattgtgcagcgtccagggcctgtgcctgcccacagcctgtgtgggcatttggtgcccaaggatgatcgcatccaagggactctgcaaccacatgccaggtacttgatatttcctaatcctgtctgccttgagcctggtatctcctacaagctgcatctgaagctggtacggacagggggaagtgcccagcctgagactccctactctggacctggcctgctcattgactcgctggtgctgctgccccgtgtcctggtgctagagatgtttagtgggggtgatgctgctgccctggagcgccaggccacctttgaacgctaccaatgccatgaggagggtctggtgcccagcaagacttctccctctgaggcctgcgcacccctcctcatcagcctgtccaccctcatctacaatggtgccctgccatgtcagtgcaaccctcaaggttcactgagttctgagtgcaaccctcatggtggtcagtgcctgtgcaagcctggagtggttgggcgccgctgtgacctctgtgcccctggctactatggctttggccccacaggctgtcaagcctgccagtgcagccacgagggggcactcagcagtctctgtgaaaagaccagtgggcaatgtctctgtcgaactggtgcctttgggcttcgctgtgaccgctgccagcgtggccagtggggattccctagctgccggccatgtgtctgcaatgggcatgcagatgagtgcaacacccacacaggcgcttgcctgggctgccgtgatcacacagggggtgagcactgtgaaaggtgcattgctggtttccacggggacccacggctgccatatgggggccagtgccggccctgtccctgtcctgaaggccctgggagccaacggcactttgctacttcttgccaccaggatgaatattcccagcagattgtgtgccactgccgggcaggctatacggggctgcgatgtgaagcttgtgcccctgggcactttggggacccatcaaggccaggtggccggtgccaactgtgtgagtgcagtgggaacattgacccaatggatcctgatgcctgtgacccccacacggggcaatgcctgcgctgtttacaccacacagagggtccacactgtgcccactgcaagcctggcttccatgggcaggctgcccgacagagctgtcaccgctgcacatgcaacctgctgggcacaaatccgcagcagtgcccatctcctgaccagtgccactgtgatccaagcagtgggcagtgcccatgcctccccaatgtccagggccctagctgtgaccgctgtgcccccaacttctggaacctcaccagtggccatggttgccagccttgtgcctgccacccaagccgggccagaggccccacctgcaacgagttcacagggcagtgccactgccgtgccggctttggagggcggacttgttctgagtgccaagagctccactggggagaccctgggttgcagtgccatgcctgtgattgtgactctcgtggaatagatacacctcagtgtcaccgcttcacaggtcactgcagctgccgcccaggggtgtctggtgtgcgctgtgaccagtgtgcccgtggcttctcaggaatctttcctgcctgccatccctgccatgcatgcttcggggattgggaccgagtggtgcaggacttggcagcccgtacacagcgcctagagcagcgggcgcaggagttgcaacagacgggtgtgctgggtgcctttgagagcagcttctggcacatgcaggagaagctgggcattgtgcagggcatcgtaggtgcccgcaacacctcagccgcctccactgcacagcttgtggaggccacagaggagctgcggcgtgaaattggggaggccactgagcacctgactcagctcgaggcagacctgacagatgtgcaagatgagaacttcaatgccaaccatgcactaagtggtctggagcgagataggcttgcacttaatctcacactgcggcagctcgaccagcatcttgacttgctcaaacattcaaacttcctgggtgcctatgacagcatccggcatgcccatagccagtctgcagaggcagaacgtcgtgccaatacctcagccctggcagtacctagccctgtgagcaactcggcaagtgctcggcatcggacagaggcactgatggatgctcagaaggaggacttcaacagcaaacacatggccaaccagcgggcacttggcaagctctctgcccatacccacaccctgagcctgacagacataaatgagctggtgtgtggggcaccaggggatgcaccctgtgctacaagcccttgtgggggtgccggctgtcgagatgaggatgggcagccgcgctgtgggggcctcagctgcaatggggcagcggctacagcagacctagcactgggccgggcccggcacacacaggcagagctgcagcgggcactggcagaaggtggtagcatcctcagcagagtggctgagactcgtcggcaggcaagcgaggcacagcagcgggcccaggcagccctggacaaggctaatgcttccaggggacaggtggaacaggccaaccaggaacttcaagaacttatccagagtgtgaaggacttcctcaaccaggagggggctgatcctgatagcattgaaatggtggccacacgggtgctagagctctccatcccagcttcagctgagcagatccagcacctggcgggtgcgattgcagagcgagtccggagcctggcagatgtggatgcgatcctggcacgtactgtaggagatgtgcgtcgtgccgagcagctactgcaggatgcacggcgggcaaggagctgggctgaggatgagaaacagaaggcagagacagtacaggcagcactggaggaggcccagcgggcacagggtattgcccagggtgccatccggggggcagtggctgacacacgggacacagagcagaccctgtaccaggtacaggagaggatggcaggtgcagagcgggcactgagctctgcaggtgaaagggctcggcagttggatgctctcctggaggctctgaaattgaaacgggcaggaaatagtctggcagcctctacagcagaagaaacggcaggcagtgcccagggtcgtgcccaggaggctgagcagctgctacgcggtcctctgggtgatcagtaccagacggtgaaggccctagctgagcgcaaggcccaaggtgtgctggctgcacaggcaagggcagaacaactgcgggatgaggctcgggacctgttgcaagccgctcaggacaagctgcagcggctacaggaattggaaggcacctatgaggaaaatgagcgggcactggagagtaaggcagcccagttggacgggttggaggccaggatgcgcagcgtgcttcaagccatcaacttgcaggtgcagatctacaacacctgccagtgacccctgcccaaggcctaccccagttcctagcacgtccccacatgcgggagtcgtctagagtcgacctcagc

SEQ ID NO: 640956 - DNA, 302 bp, Homo sapiens
ttaactaacctttatcccccctaaaatgcccggcatctttgcccgaggcgtttttgttcatgtctgtcaccgctcaacctgccagccctgcgccggatcatcacgcccagttcatcgaactgctgagcgcaagcctcgcgcagaacgcgtttatcaagctggtgctggccaagtacgtcggtgaggaagccgagttgcagcggctgatcatcaagcaggtggtggtcaaggagcaggcgtgcctgtcctttgtctatcgctacaagacccgtgacatcaccaagaacttcccgagtctcacg

SEQ ID NO: 640957 - DNA, 5924 bp, Homo sapiens
  misc_feature (129)..(129): n is a, c, g, or t
gaaggcagtttccggagggaaggggtagggttggggtgggggcgctctccgcccggtgttgcgctccttcccagaatccgctccggcctttccttcctgccgcgattcccaactttgctcaaagtcgcnggactctaagctgtcggagggaccgctggacagacctgggaactgacagagggcctggagggaaacaggccaaagacccacaggcagagttgacacggaaccccaaagcaaggaggagggctcgggcccgagaccgttcacctccccttatccctgttcccctcttcaggatggagctgacctcaagggaaagagggaggggacagcctctgccctgggaacttcgactgggcctactgctaagcgtgctggctgccacactggcacaggcccctgccccggatgtgcctggctgttccaggggaagctgctaccccgccacgggcgacctgctggtgggccgagctgacagactgactgcctcatccacttgtggcctgaatggcccccagccctactgcatcgtcagtcacctgcaggacgaaaagaagtgcttcctttgtgactcccggcgccccttctctgctagagacaacccacacagccatcgcatccagaatgtagtcaccagctttgcaccacagcggcgggcagcctggtggcagtcagagaatggtatccctgcggtcaccatccagctggacctggaggctgagtttcatttcacacacctcattatgaccttcaagacatttcgccctgctgccatgctggtggaacgctcagcagactttggccgcacctggcatgtgtaccgatatttctcctatgactgtggggctgacttcccaggagtcccactagcacccccacggcactgggatgatgtagtctgtgagtcccgctactcagagattgagccatccactgaaggcgaggtcatctatcgtgtgctggaccctgccatccctatcccagacccctacagctcacggattcagaacctgttgaagatcaccaacctacgggtgaacctgactcgtctacacacgttgggagacaacctactcgacccacggagggagatccgagagaagtactactatgccctctatgagctggttgtacgtggcaactgcttctgctacggacacgcctcagagtgtgcacccgccccaggggcaccagcccatgctgagggcatggtgcacggagcttgcatctgcaaacacaacacacgtggcctcaactgcgagcagtgtcaggatttctatcgtgacctgccctggcgtccggctgaggacggccatagtcatgcctgtaggaagtgtgagtgccatgggcacacccacagctgccacttcgacatggccgtatacctggcatctggcaatgtgagtggaggtgtgtgtgatggatgtcagcataacacagctgggcgccactgtgagctctgtcggcccttcttctaccgtgacccaaccaaggacctgcgggatccggctgtgtgccgctcctgtgattgtgaccccatgggttctcaagacggtggtcgctgtgattcccatgatgaccctgcactgggactggtctccggccagtgtcgctgcaaagaacatgtggtgggcactcgctgccagcaatgccgtgatggcttctttgggctcagcatcagtgaccgtctgggctgccggcgatgtcaatgtaatgcacggggcacagtgcctgggagcactccttgtgaccccaacagtggatcctgttactgcaaacgtctagtgactggacgtggatgtgaccgctgcctgcctggccactggggcctgagccacgacctgctcggctgccgcccctgtgactgcgacgtgggtggtgctttggatccccagtgtgatgagggcacaggtcaatgccactgccgccagcacatggttgggcgacgctgtgagcaggtgcaacctggctacttccggcccttcctggaccacctaatttgggaggctgaggacacccgagggcaggtgctcgatgtggtggagcgcctggtgacccccggggaaactccatcctggactggctcaggcttcgtgcggctacaggaaggtcagaccctggagttcctggtggcctctgtgccgaaggctatggactatgacctgctgctgcgcttagagccccaggtccctgagcaatgggcagagttggaactgattgtgcagcgtccagggcctgtgcctgcccacagcctgtgtgggcatttggtgcccaaggatgatcgcatccaagggactctgcaaccacatgccaggtacttgatatttcctaatcctgtctgccttgagcctggtatctcctacaagctgcatctgaagctggtacggacagggggaagtgcccagcctgagactccctactctggacctggcctgctcattgactcgctggtgctgctgccccgtgtcctggtgctagagatgtttagtgggggtgatgctgctgccctggagcgccaggccacctttgaacgctaccaatgccatgaggagggtctggtgcccagcaagacttctccctctgaggcctgcgcacccctcctcatcagcctgtccaccctcatctacaatggtgccctgccatgtcagtgcaaccctcaaggttcactgagttctgagtgcaaccctcatggtggtcagtgcctgtgcaagcctggagtggttgggcgccgctgtgacctctgtgcccctggctactatggctttggccccacaggctgtcaagcctgccagtgcagccacgagggggcactcagcagtctctgtgaaaagaccagtgggcaatgtctctgtcgaactggtgcctttgggcttcgctgtgaccgctgccagcgtggccagtggggattccctagctgccggccatgtgtctgcaatgggcatgcagatgagtgcaacacccacacaggcgcttgcctgggctgccgtgatcacacagggggtgagcactgtgaaaggtgcattgctggtttccacggggacccacggctgccatatgggggccagtgccggccctgtccctgtcctgaaggccctgggagccaacggcactttgctacttcttgccaccaggatgaatattcccagcagattgtgtgccactgccgggcaggctatacggggctgcgatgtgaagcttgtgcccctgggcactttggggacccatcaaggccaggtggccggtgccaactgtgtgagtgcagtgggaacattgacccaatggatcctgatgcctgtgacccccacacggggcaatgcctgcgctgtttacaccacacagagggtccacactgtgcccactgcaagcctggcttccatgggcaggctgcccgacagagctgtcaccgctgcacatgcaacctgctgggcacaaatccgcagcagtgcccatctcctgaccagtgccactgtgatccaagcagtgggcagtgcccatgcctccccaatgtccagggccctagctgtgaccgctgtgcccccaacttctggaacctcaccagtggccatggttgccagccttgtgcctgccacccaagccgggccagaggccccacctgcaacgagttcacagggcagtgccactgccgtgccggctttggagggcggacttgttctgagtgccaagagctccactggggagaccctgggttgcagtgccatgcctgtgattgtgactctcgtggaatagatacacctcagtgtcaccgcttcacaggtcactgcagctgccgcccaggggtgtctggtgtgcgctgtgaccagtgtgcccgtggcttctcaggaatctttcctgcctgccatccctgccatgcatgcttcggggattgggaccgagtggtgcaggacttggcagcccgtacacagcgcctagagcagcgggcgcaggagttgcaacagacgggtgtgctgggtgcctttgagagcagcttctggcacatgcaggagaagctgggcattgtgcagggcatcgtaggtgcccgcaacacctcagccgcctccactgcacagcttgtggaggccacagaggagctgcggcgtgaaattggggaggccactgagcacctgactcagctcgaggcagacctgacagatgtgcaagatgagaacttcaatgccaaccatgcactaagtggtctggagcgagataggcttgcacttaatctcacactgcggcagctcgaccagcatcttgacttgctcaaacattcaaacttcctgggtgcctatgacagcatccggcatgcccatagccagtctgcagaggcagaacgtcgtgccaatacctcagccctggcagtacctagccctgtgagcaactcggcaagtgctcggcatcggacagaggcactgatggatgctcagaaggaggacttcaacagcaaacacatggccaaccagcgggcacttggcaagctctctgcccatacccacaccctgagcctgacagacataaatgagctggtgtgtggggcaccaggggatgcaccctgtgctacaagcccttgtgggggtgccggctgtcgagatgaggatgggcagccgcgctgtgggggcctcagctgcaatggggcagcggctacagcagacctagcactgggccgggcccggcacacacaggcagagctgcagcgggcactggcagaaggtggtagcatcctcagcagagtggctgagactcgtcggcaggcaagcgaggcacagcagcgggcccaggcagccctggacaaggctaatgcttccaggggacaggtggaacaggccaaccaggaacttcaagaacttatccagagtgtgaaggacttcctcaaccaggagggggctgatcctgatagcattgaaatggtggccacacgggtgctagagctctccatcccagcttcagctgagcagatccagcacctggcgggtgcgattgcagagcgagtccggagcctggcagatgtggatgcgatcctggcacgtactgtaggagatgtgcgtcgtgccgagcagctactgcaggatgcacggcgggcaaggagctgggctgaggatgagaaacagaaggcagagacagtacaggcagcactggaggaggcccagcgggcacagggtattgcccagggtgccatccggggggcagtggctgacacacgggacacagagcagaccctgtaccaggtacaggagaggatggcaggtgcagagcgggcactgagctctgcaggtgaaagggctcggcagttggatgctctcctggaggctctgaaattgaaacgggcaggaaatagtctggcagcctctacagcagaagaaacggcaggcagtgcccagggtcgtgcccaggaggctgagcagctgctacgcggtcctctgggtgatcagtaccagacggtgaaggccctagctgagcgcaaggcccaaggtgtgctggctgcacaggcaagggcagaacaactgcgggatgaggctcgggacctgttgcaagccgctcaggacaagctgcagcggctacagggtaagaaatggggcaccagagacacaagactgcgggaaaccccccctaaactgacacctgcccttcctagaattggaaggcacctatgaggaaaatgagcgggcactggagagtaaggcagcccagttggacgggttggaggccaggatgcgcagcgtgcttcaagccatcaacttgcaggtgcagatctacaacacctgccagtgacccctgcccaaggcctaccccagttcctagcactgccccacatgcatgtctgcctatgcactgaagagctcttggcccggcagggcccccaataaaccagtgtgaacccccaaaaaaaaaccacaaaacgaaccaagggaacctcataacggaaccca

SEQ ID NO: 640958 - DNA, 755 bp, Homo sapiens
  misc_feature (752)..(752): n is a, c, g, or t
aaacaatccctttgagaggaagaggggcctgtcccattcttttgtttaaaaaaataggttaaaaaaagcccaggttcttccatttgagggtttgaaaaagtggaacaaaaccaattgcggtccccattaaagtgctttttaaggtaagctaggtttcttaatattggaaaataaatccatctccaaccatgaaataggtcatatttttccaaggcagttaagtattcatccactcctataccatcaatattaatgacaaacttttatataaagcttacaacttaggcagtaccctaattgctgccaagcaggctgtaagcgctatatgaatattgctgtatgaatgttgcctgacgtaaagagttagacactgtagagtaattttccttatattgccttttgcttaatattgcccctcttttaaatcttcacaagagccacattaactaggtactgttgtcctcatttcatagttgaaggaggaaactgaagcacagagactttaaatatattcaccaaggaaatcgagccattaattggtaaagcctggatttgaacccaggcagtctgggtttctgagcttgtgcccttatccactatactgtgtattgttccaataatttttagttgcataaacgcttagaaatagcatttataagttctctgtgctccagaagaaccagtttcaagaaagaataaaatatatgtaaatagcagataaacccattatattcagataaggttgcaggaantgc

SEQ ID NO: 640959 - DNA, 5617 bp, Homo sapiens
  misc_feature (129)..(129): n is a, c, g, or t
gaaggcagtttccggagggaaggggtagggttggggtgggggcgctctccgcccggtgttgcgctccttcccagaatccgctccggcctttccttcctgccgcgattcccaactttgctcaaagtcgcnggactctaagctgtcggagggaccgctggacagacctgggaactgacagagggcctggagggaaacaggccaaagacccacaggcagagttgacacggaaccccaaagcaaggaggagggctcgggcccgagaccgttcacctccccttatccctgttcccctcttcaggatggagctgacctcaagggaaagagggaggggacagcctctgccctgggaacttcgactgggcctactgctaagcgtgctggctgccacactggcacaggcccctgccccggatgtgcctggctgttccaggggaagctgctaccccgccacgggcgacctgctggtgggccgagctgacagactgactgcctcatccacttgtggcctgaatggcccccagccctactgcatcgtcagtcacctgcaggacgaaaagaagtgcttcctttgtgactcccggcgccccttctctgctagagacaacccacacagccatcgcatccagaatgtagtcaccagctttgcaccacagcggcgggcagcctggtggcagtcagagaatggtatccctgcggtcaccatccagctggacctggaggctgagtttcatttcacacacctcattatgaccttcaagacatttcgccctgctgccatgctggtggaacgctcagcagactttggccgcacctggcatgtgtaccgatatttctcctatgactgtggggctgacttcccaggagtcccactagcacccccacggcactgggatgatgtagtctgtgagtcccgctactcagagattgagccatccactgaaggcgaggtcatctatcgtgtgctggaccctgccatccctatcccagacccctacagctcacggattcagaacctgttgaagatcaccaacctacgggtgaacctgactcgtctacacacgttgggagacaacctactcgacccacggagggagatccgagagaagtactactatgccctctatgagctggttgtacgtggcaactgcttctgctacggacacgcctcagagtgtgcacccgccccaggggcaccagcccatgctgagggcatggtgcacggagcttgcatctgcaaacacaacacacgtggcctcaactgcgagcagtgtcaggatttctatcgtgacctgccctggcgtccggctgaggacggccatagtcatgcctgtaggaagtgtgagtgccatgggcacacccacagctgccacttcgacatggccgtatacctggcatctggcaatgtgagtggaggtgtgtgtgatggatgtcagcataacacagctgggcgccactgtgagctctgtcggcccttcttctaccgtgacccaaccaaggacctgcgggatccggctgtgtgccgctcctgtgattgtgaccccatgggttctcaagacggtggtcgctgtgattcccatgatgaccctgcactgggactggtctccggccagtgtcgctgcaaagaacatgtggtgggcactcgctgccagcaatgccgtgatggcttctttgggctcagcatcagtgaccgtctgggctgccggcgatgtcaatgtaatgcacggggcacagtgcctgggagcactccttgtgaccccaacagtggatcctgttactgcaaacgtctagtgactggacgtggatgtgaccgctgcctgcctggccactggggcctgagccacgacctgctcggctgccgcccctgtgactgcgacgtgggtggtgctttggatccccagtgtgatgagggcacaggtcaatgccactgccgccagcacatggttgggcgacgctgtgagcaggtgcaacctggctacttccggcccttcctggaccacctaatttgggaggctgaggacacccgagggcaggtgctcgatgtggtggagcgcctggtgacccccggggaaactccatcctggactggctcaggcttcgtgcggctacaggaaggtcagaccctggagttcctggtggcctctgtgccgaaggctatggactatgacctgctgctgcgcttagagccccaggtccctgagcaatgggcagagttggaactgattgtgcagcgtccagggcctgtgcctgcccacagcctgtgtgggcatttggtgcccaaggatgatcgcatccaagggactctgcaaccacatgccaggtacttgatatttcctaatcctgtctgccttgagcctggtatctcctacaagctgcatctgaagctggtacggacagggggaagtgcccagcctgagactccctactctggacctggcctgctcattgactcgctggtgctgctgccccgtgtcctggtgctagagatgtttagtgggggtgatgctgctgccctggagcgccaggccacctttgaacgctaccaatgccatgaggagggtctggtgcccagcaagacttctccctctgaggcctgcgcacccctcctcatcagcctgtccaccctcatctacaatggtgccctgccatgtcagtgcaaccctcaaggttcactgagttctgagtgcaaccctcatggtggtcagtgcctgtgcaagcctggagtggttgggcgccgctgtgacctctgtgcccctggctactatggctttggccccacaggctgtcaagcctgccagtgcagccacgagggggcactcagcagtctctgtgaaaagaccagtgggcaatgtctctgtcgaactggtgcctttgggcttcgctgtgaccgctgccagcgtggccagtggggattccctagctgccggccatgtgtctgcaatgggcatgcagatgagtgcaacacccacacaggcgcttgcctgggctgccgtgatcacacagggggtgagcactgtgaaaggtgcattgctggtttccacggggacccacggctgccatatgggggccagtgccggccctgtccctgtcctgaaggccctgggagccaacggcactttgctacttcttgccaccaggatgaatattcccagcagattgtgtgccactgccgggcaggctatacggggctgcgatgtgaagcttgtgcccctgggcactttggggacccatcaaggccaggtggccggtgccaactgtgtgagtgcagtgggaacattgacccaatggatcctgatgcctgtgacccccacacggggcaatgcctgcgctgtttacaccacacagagggtccacactgtgcccactgcaagcctggcttccatgggcaggctgcccgacagagctgtcaccgctgcacatgcaacctgctgggcacaaatccgcagcagtgcccatctcctgaccagtgccactgtgatccaagcagtgggcagtgcccatgcctccccaatgtccagggccctagctgtgaccgctgtgcccccaacttctggaacctcaccagtggccatggttgccagccttgtgcctgccacccaagccgggccagaggccccacctgcaacgagttcacagggcagtgccactgccgtgccggctttggagggcggacttgttctgagtgccaagagctccactggggagaccctgggttgcagtgccatgcctgtgattgtgactctcgtggaatagatacacctcagtgtcaccgcttcacaggtcactgcagctgccgcccaggggtgtctggtgtgcgctgtgaccagtgtgcccgtggcttctcaggaatctttcctgcctgccatccctgccatgcatgcttcggggattgggaccgagtggtgcaggacttggcagcccgtacacagcgcctagagcagcgggcgcaggagttgcaacagacgggtgtgctgggtgcctttgagagcagcttctggcacatgcaggagaagctgggcattgtgcagggcatcgtaggtgcccgcaacacctcagccgcctccactgcacagcttgtggaggccacagaggagctgcggcgtgaaattggggaggccactgagcacctgactcagctcgaggcagacctgacagatgtgcaagatgagaacttcaatgccaaccatgcactaagtggtctggagcgagataggcttgcacttaatctcacactgcggcagctcgaccagcatcttgacttgctcaaacattcaaacttcctgggtgcctatgacagcatccggcatgcccatagccagtctgcagaggcagaacgtcgtgccaatacctcagccctggcagtacctagccctgtgagcaactcggcaagtgctcggcatcggacagaggcactgatggatgctcagaaggaggacttcaacagcaaacacatggccaaccagcgggcacttggcaagctctctgcccatacccacaccctgagcctgacagacataaatgagctggtgtgtggggcaccaggggatgcaccctgtgctacaagcccttgtgggggtgccggctgtcgagatgaggatgggcagccgcgctgtgggggcctcagctgcaatggggcagcggctacagcagacctagcactgggccgggcccggcacacacaggcagagctgcagcgggcactggcagaaggtggtagcatcctcagcagagtggctgagactcgtcggcaggcaagcgaggcacagcagcgggcccaggcagccctggacaaggctaatgcttccaggggacaggtggaacaggccaaccaggaacttcaagaacttatccagagtgtgaaggacttcctcaaccaggagggggctgatcctgatagcattgaaatggtggccacacgggtgctagagctctccatcccagcttcagctgagcagatccagcacctggcgggtgcgattgcagagcgagtccggagcctggcagatgtggatgcgatcctggcacgtactgtaggagatgtgcgtcgtgccgagcagctactgcaggatgcacggcgggcaaggagctgggctgaggatgagaaacagaaggcagagacagtacaggcagcactggaggaggcccagcgggcacagggtattgcccagggtgccatccggggggcagtggctgacacacgggacacagagcagaccctgtaccaggtacaggagaggatggcaggtgcagagcgggcactgagctctgcaggtgaaagggctcggcagttggatgctctcctggaggctctgaaattgaaacgggcaggaaatagtctggcagcctctacagcagaagaaacggcaggcagtgcccagggtcgtgcccaggaggctgagcagctgctacgcggtcctctgggtgatcagtaccagacggtgaaggccctagctgagcgcaaggcccaaggtgtgctggctgcacaggcaagggcagaacaactgcgggatgaggctcgggacctgttgcaagccgctcaggacaagctgcagcggctacaggaattggaaggcacctagaggcaacagcacagcaggcctccgccctgcctggccacagg

SEQ ID NO: 640960 - DNA, 5586 bp, Homo sapiens
  misc_feature (129)..(129): n is a, c, g, or t
gaaggcagtttccggagggaaggggtagggttggggtgggggcgctctccgcccggtgttgcgctccttcccagaatccgctccggcctttccttcctgccgcgattcccaactttgctcaaagtcgcnggactctaagctgtcggagggaccgctggacagacctgggaactgacagagggcctggagggaaacaggccaaagacccacaggcagagttgacacggaaccccaaagcaaggaggagggctcgggcccgagaccgttcacctccccttatccctgttcccctcttcaggatggagctgacctcaagggaaagagggaggggacagcctctgccctgggaacttcgactgggcctactgctaagcgtgctggctgccacactggcacaggcccctgccccggatgtgcctggctgttccaggggaagctgctaccccgccacgggcgacctgctggtgggccgagctgacagactgactgcctcatccacttgtggcctgaatggcccccagccctactgcatcgtcagtcacctgcaggacgaaaagaagtgcttcctttgtgactcccggcgccccttctctgctagagacaacccacacagccatcgcatccagaatgtagtcaccagctttgcaccacagcggcgggcagcctggtggcagtcagagaatggtatccctgcggtcaccatccagctggacctggaggctgagtttcatttcacacacctcattatgaccttcaagacatttcgccctgctgccatgctggtggaacgctcagcagactttggccgcacctggcatgtgtaccgatatttctcctatgactgtggggctgacttcccaggagtcccactagcacccccacggcactgggatgatgtagtctgtgagtcccgctactcagagattgagccatccactgaaggcgaggtcatctatcgtgtgctggaccctgccatccctatcccagacccctacagctcacggattcagaacctgttgaagatcaccaacctacgggtgaacctgactcgtctacacacgttgggagacaacctactcgacccacggagggagatccgagagaagtactactatgccctctatgagctggttgtacgtggcaactgcttctgctacggacacgcctcagagtgtgcacccgccccaggggcaccagcccatgctgagggcatggtgcacggagcttgcatctgcaaacacaacacacgtggcctcaactgcgagcagtgtcaggatttctatcgtgacctgccctggcgtccggctgaggacggccatagtcatgcctgtaggaagtgtgagtgccatgggcacacccacagctgccacttcgacatggccgtatacctggcatctggcaatgtgagtggaggtgtgtgtgatggatgtcagcataacacagctgggcgccactgtgagctctgtcggcccttcttctaccgtgacccaaccaaggacctgcgggatccggctgtgtgccgctcctgtgattgtgaccccatgggttctcaagacggtggtcgctgtgattcccatgatgaccctgcactgggactggtctccggccagtgtcgctgcaaagaacatgtggtgggcactcgctgccagcaatgccgtgatggcttctttgggctcagcatcagtgaccgtctgggctgccggcgatgtcaatgtaatgcacggggcacagtgcctgggagcactccttgtgaccccaacagtggatcctgttactgcaaacgtctagtgactggacgtggatgtgaccgctgcctgcctggccactggggcctgagccacgacctgctcggctgccgcccctgtgactgcgacgtgggtggtgctttggatccccagtgtgatgagggcacaggtcaatgccactgccgccagcacatggttgggcgacgctgtgagcaggtgcaacctggctacttccggcccttcctggaccacctaatttgggaggctgaggacacccgagggcaggtgctcgatgtggtggagcgcctggtgacccccggggaaactccatcctggactggctcaggcttcgtgcggctacaggaaggtcagaccctggagttcctggtggcctctgtgccgaaggctatggactatgacctgctgctgcgcttagagccccaggtccctgagcaatgggcagagttggaactgattgtgcagcgtccagggcctgtgcctgcccacagcctgtgtgggcatttggtgcccaaggatgatcgcatccaagggactctgcaaccacatgccaggtacttgatatttcctaatcctgtctgccttgagcctggtatctcctacaagctgcatctgaagctggtacggacagggggaagtgcccagcctgagactccctactctggacctggcctgctcattgactcgctggtgctgctgccccgtgtcctggtgctagagatgtttagtgggggtgatgctgctgccctggagcgccaggccacctttgaacgctaccaatgccatgaggagggtctggtgcccagcaagacttctccctctgaggcctgcgcacccctcctcatcagcctgtccaccctcatctacaatggtgccctgccatgtcagtgcaaccctcaaggttcactgagttctgagtgcaaccctcatggtggtcagtgcctgtgcaagcctggagtggttgggcgccgctgtgacctctgtgcccctggctactatggctttggccccacaggctgtcaagcctgccagtgcagccacgagggggcactcagcagtctctgtgaaaagaccagtgggcaatgtctctgtcgaactggtgcctttgggcttcgctgtgaccgctgccagcgtggccagtggggattccctagctgccggccatgtgtctgcaatgggcatgcagatgagtgcaacacccacacaggcgcttgcctgggctgccgtgatcacacagggggtgagcactgtgaaaggtgcattgctggtttccacggggacccacggctgccatatgggggccagtgccggccctgtccctgtcctgaaggccctgggagccaacggcactttgctacttcttgccaccaggatgaatattcccagcagattgtgtgccactgccgggcaggctatacggggctgcgatgtgaagcttgtgcccctgggcactttggggacccatcaaggccaggtggccggtgccaactgtgtgagtgcagtgggaacattgacccaatggatcctgatgcctgtgacccccacacggggcaatgcctgcgctgtttacaccacacagagggtccacactgtgcccactgcaagcctggcttccatgggcaggctgcccgacagagctgtcaccgctgcacatgcaacctgctgggcacaaatccgcagcagtgcccatctcctgaccagtgccactgtgatccaagcagtgggcagtgcccatgcctccccaatgtccagggccctagctgtgaccgctgtgcccccaacttctggaacctcaccagtggccatggttgccagccttgtgcctgccacccaagccgggccagaggccccacctgcaacgagttcacagggcagtgccactgccgtgccggctttggagggcggacttgttctgagtgccaagagctccactggggagaccctgggttgcagtgccatgcctgtgattgtgactctcgtggaatagatacacctcagtgtcaccgcttcacaggtcactgcagctgccgcccaggggtgtctggtgtgcgctgtgaccagtgtgcccgtggcttctcaggaatctttcctgcctgccatccctgccatgcatgcttcggggattgggaccgagtggtgcaggacttggcagcccgtacacagcgcctagagcagcgggcgcaggagttgcaacagacgggtgtgctgggtgcctttgagagcagcttctggcacatgcaggagaagctgggcattgtgcagggcatcgtaggtgcccgcaacacctcagccgcctccactgcacagcttgtggaggccacagaggagctgcggcgtgaaattggggaggccactgagcacctgactcagctcgaggcagacctgacagatgtgcaagatgagaacttcaatgccaaccatgcactaagtggtctggagcgagataggcttgcacttaatctcacactgcggcagctcgaccagcatcttgacttgctcaaacattcaaacttcctgggtgcctatgacagcatccggcatgcccatagccagtctgcagaggcagaacgtcgtgccaatacctcagccctggcagtacctagccctgtgagcaactcggcaagtgctcggcatcggacagaggcactgatggatgctcagaaggaggacttcaacagcaaacacatggccaaccagcgggcacttggcaagctctctgcccatacccacaccctgagcctgacagacataaatgagctggtgtgtggggcaccaggggatgcaccctgtgctacaagcccttgtgggggtgccggctgtcgagatgaggatgggcagccgcgctgtgggggcctcagctgcaatggggcagcggctacagcagacctagcactgggccgggcccggcacacacaggcagagctgcagcgggcactggcagaaggtggtagcatcctcagcagagtggctgagactcgtcggcaggcaagcgaggcacagcagcgggcccaggcagccctggacaaggctaatgcttccaggggacaggtggaacaggccaaccaggaacttcaagaacttatccagagtgtgaaggacttcctcaaccgtgagcctcccacgtgtcccaggccatgtggttgtcccctttggcaactcccggtgtctgtatctcccttggttcatacttgagcctcagggactacactggattagtgtttatgatcccttgactggctcctgagttattgcccatatgtggtcccaggtccatgttcttgagtctgagccccttgtatagtccctgtccttgtgattatatccttatgcctggtaacaaacccctatcccatgtacatgtcctgagtccataccccaaaactgtatcctcatgcccatgctggagaatctatgttcttaagttcttgctgtgtccctatagaggagggggctgatcctgatagcattgaaatggtggccacacgggtgctagagctctccatcccagcttcagctgagcagatccagcacctggcgggtgcgattgcagagcgagtccggagcctggcagatgtggatgcgatcctggcacgtactgtaggagatgtgcgtcgtgccgagcagctactgcaggatgcacggcgggcaaggagctgggctgaggatgagaaacagaaggcagagacagttcctagcactgccccacatgcatgtctgcctatgcactgaagagctcttggcccggcagggcccccaataaaccagtgtgaacccccaaaaaaaaaccacaaaacgaaccaagggaacctcataacggaaccca

SEQ ID NO: 640961 - DNA, 5540 bp, Homo sapiens
  misc_feature (129)..(129): n is a, c, g, or t
gaaggcagtttccggagggaaggggtagggttggggtgggggcgctctccgcccggtgttgcgctccttcccagaatccgctccggcctttccttcctgccgcgattcccaactttgctcaaagtcgcnggactctaagctgtcggagggaccgctggacagacctgggaactgacagagggcctggagggaaacaggccaaagacccacaggcagagttgacacggaaccccaaagcaaggaggagggctcgggcccgagaccgttcacctccccttatccctgttcccctcttcaggatggagctgacctcaagggaaagagggaggggacagcctctgccctgggaacttcgactgggcctactgctaagcgtgctggctgccacactggcacaggcccctgccccggatgtgcctggctgttccaggggaagctgctaccccgccacgggcgacctgctggtgggccgagctgacagactgactgcctcatccacttgtggcctgaatggcccccagccctactgcatcgtcagtcacctgcaggacgaaaagaagtgcttcctttgtgactcccggcgccccttctctgctagagacaacccacacagccatcgcatccagaatgtagtcaccagctttgcaccacagcggcgggcagcctggtggcagtcagagaatggtatccctgcggtcaccatccagctggacctggaggctgagtttcatttcacacacctcattatgaccttcaagacatttcgccctgctgccatgctggtggaacgctcagcagactttggccgcacctggcatgtgtaccgatatttctcctatgactgtggggctgacttcccaggagtcccactagcacccccacggcactgggatgatgtagtctgtgagtcccgctactcagagattgagccatccactgaaggcgaggtcatctatcgtgtgctggaccctgccatccctatcccagacccctacagctcacggattcagaacctgttgaagatcaccaacctacgggtgaacctgactcgtctacacacgttgggagacaacctactcgacccacggagggagatccgagagaagtactactatgccctctatgagctggttgtacgtggcaactgcttctgctacggacacgcctcagagtgtgcacccgccccaggggcaccagcccatgctgagggcatggtgcacggagcttgcatctgcaaacacaacacacgtggcctcaactgcgagcagtgtcaggatttctatcgtgacctgccctggcgtccggctgaggacggccatagtcatgcctgtaggaagtgtgagtgccatgggcacacccacagctgccacttcgacatggccgtatacctggcatctggcaatgtgagtggaggtgtgtgtgatggatgtcagcataacacagctgggcgccactgtgagctctgtcggcccttcttctaccgtgacccaaccaaggacctgcgggatccggctgtgtgccgctcctgtgattgtgaccccatgggttctcaagacggtggtcgctgtgattcccatgatgaccctgcactgggactggtctccggccagtgtcgctgcaaagaacatgtggtgggcactcgctgccagcaatgccgtgatggcttctttgggctcagcatcagtgaccgtctgggctgccggcgatgtcaatgtaatgcacggggcacagtgcctgggagcactccttgtgaccccaacagtggatcctgttactgcaaacgtctagtgactggacgtggatgtgaccgctgcctgcctggccactggggcctgagccacgacctgctcggctgccgcccctgtgactgcgacgtgggtggtgctttggatccccagtgtgatgagggcacaggtcaatgccactgccgccagcacatggttgggcgacgctgtgagcaggtgcaacctggctacttccggcccttcctggaccacctaatttgggaggctgaggacacccgagggcaggtgctcgatgtggtggagcgcctggtgacccccggggaaactccatcctggactggctcaggcttcgtgcggctacaggaaggtcagaccctggagttcctggtggcctctgtgccgaaggctatggactatgacctgctgctgcgcttagagccccaggtccctgagcaatgggcagagttggaactgattgtgcagcgtccagggcctgtgcctgcccacagcctgtgtgggcatttggtgcccaaggatgatcgcatccaagggactctgcaaccacatgccaggtacttgatatttcctaatcctgtctgccttgagcctggtatctcctacaagctgcatctgaagctggtacggacagggggaagtgcccagcctgagactccctactctggacctggcctgctcattgactcgctggtgctgctgccccgtgtcctggtgctagagatgtttagtgggggtgatgctgctgccctggagcgccaggccacctttgaacgctaccaatgccatgaggagggtctggtgcccagcaagacttctccctctgaggcctgcgcacccctcctcatcagcctgtccaccctcatctacaatggtgccctgccatgtcagtgcaaccctcaaggttcactgagttctgagtgcaaccctcatggtggtcagtgcctgtgcaagcctggagtggttgggcgccgctgtgacctctgtgcccctggctactatggctttggccccacaggctgtcaagcctgccagtgcagccacgagggggcactcagcagtctctgtgaaaagaccagtgggcaatgtctctgtcgaactggtgcctttgggcttcgctgtgaccgctgccagcgtggccagtggggattccctagctgccggccatgtgtctgcaatgggcatgcagatgagtgcaacacccacacaggcgcttgcctgggctgccgtgatcacacagggggtgagcactgtgaaaggtgcattgctggtttccacggggacccacggctgccatatgggggccagtgccggccctgtccctgtcctgaaggccctgggagccaacggcactttgctacttcttgccaccaggatgaatattcccagcagattgtgtgccactgccgggcaggctatacggggctgcgatgtgaagcttgtgcccctgggcactttggggacccatcaaggccaggtggccggtgccaactgtgtgagtgcagtgggaacattgacccaatggatcctgatgcctgtgacccccacacggggcaatgcctgcgctgtttacaccacacagagggtccacactgtgcccactgcaagcctggcttccatgggcaggctgcccgacagagctgtcaccgctgcacatgcaacctgctgggcacaaatccgcagcagtgcccatctcctgaccagtgccactgtgatccaagcagtgggcagtgcccatgcctccccaatgtccagggccctagctgtgaccgctgtgcccccaacttctggaacctcaccagtggccatggttgccagccttgtgcctgccacccaagccgggccagaggccccacctgcaacgagttcacagggcagtgccactgccgtgccggctttggagggcggacttgttctgagtgccaagagctccactggggagaccctgggttgcagtgccatgcctgtgattgtgactctcgtggaatagatacacctcagtgtcaccgcttcacaggtcactgcagctgccgcccaggggtgtctggtgtgcgctgtgaccagtgtgcccgtggcttctcaggaatctttcctgcctgccatccctgccatgcatgcttcggggattgggaccgagtggtgcaggacttggcagcccgtacacagcgcctagagcagcgggcgcaggagttgcaacagacgggtgtgctgggtgcctttgagagcagcttctggcacatgcaggagaagctgggcattgtgcagggcatcgtaggtgcccgcaacacctcagccgcctccactgcacagcttgtggaggccacagaggagctgcggcgtgaaattggggaggccactgagcacctgactcagctcgaggcagacctgacagatgtgcaagatgagaacttcaatgccaaccatgcactaagtggtctggagcgagataggcttgcacttaatctcacactgcggcagctcgaccagcatcttgacttgctcaaacattcaaacttcctgggtgcctatgacagcatccggcatgcccatagccagtctgcagaggcagaacgtcgtgccaatacctcagccctggcagtacctagccctgtgagcaactcggcaagtgctcggcatcggacagaggcactgatggatgctcagaaggaggacttcaacagcaaacacatggccaaccagcgggcacttggcaagctctctgcccatacccacaccctgagcctgacagacataaatgagctggtgtgtggggcaccaggggatgcaccctgtgctacaagcccttgtgggggtgccggctgtcgagatgaggatgggcagccgcgctgtgggggcctcagctgcaatggggcagcggctacagcagacctagcactgggccgggcccggcacacacaggcagagctgcagcgggcactggcagaaggtggtagcatcctcagcagagtggctgagactcgtcggcaggcaagcgaggcacagcagcgggcccaggcagccctggacaaggctaatgcttccaggggacaggtggaacaggccaaccaggaacttcaagaacttatccagagtgtgaaggacttcctcaaccgtgagcctcccacgtgtcccaggccatgtggttgtcccctttggcaactcccggtgtctgtatctcccttggttcatacttgagcctcagggactacactggattagtgtttatgatcccttgactggctcctgagttattgcccatatgtggtcccaggtccatgttcttgagtctgagccccttgtatagtccctgtccttgtgattatatccttatgcctggtaacaaacccctatcccatgtacatgtcctgagtccataccccaaaactgtatcctcatgcccatgctggagaatctatgttcttaagttcttgctgtgtccctatagaggagggggctgatcctgatagcattgaaatggtggccacacgggtgctagagctctccatcccagcttcagctgagcagatccagcacctggcgggtgcgattgcagagcgagtccggagcctggcagatgtggatgcgatcctggcacgtactgtaggagatgtgcgtcgtgccgagcagctactgcaggatgcacggcgggcaaggagctgggctgaggatgagaaacagaaggcagagacagttcctagcactgccccacatgcatgtctgcctatgcactgaagagctcttggcccggcagggcccccaataaaccagtgtgaaccccca

SEQ ID NO: 640962 - DNA, 300 bp, Homo sapiens
  misc_feature (42)..(42): n is a, c, g, or t
  misc_feature (89)..(89): n is a, c, g, or t
aaaaattaggaatatttttttttgagacagtcctcactgtgntgcaggctagagtgcagtggtgcgatccccggctcactgccaacttnttgcctctgcgtcaagcgattctccttgcctcagccttcccaagtagctgggactacaggtgtcccgtcaccaacagccagctaatttttgtatttttagaaaaaatggggtttcaccatattggccaggctggtctcgaacttctgactttgtgatccgcctgcctcagcctcccaaagtgctgggattacaggcgtgagccgtcgacgc

SEQ ID NO: 640963 - DNA, 162 bp, Homo sapiens
ctaagaaataatttgtgtataagctggaccatccagaaataatgcagctctgtgtgaacatctgtattcaccttcggataaagctacgattctagctctgggcctttcatgtgaggcaaatttgccttttaagttactccaaatagggcttgtgaaacccac

SEQ ID NO: 640964 - DNA, 5176 bp, Homo sapiens
  misc_feature (129)..(129): n is a, c, g, or t
gaaggcagtttccggagggaaggggtagggttggggtgggggcgctctccgcccggtgttgcgctccttcccagaatccgctccggcctttccttcctgccgcgattcccaactttgctcaaagtcgcnggactctaagctgtcggagggaccgctggacagacctgggaactgacagagggcctggagggaaacaggccaaagacccacaggcagagttgacacggaaccccaaagcaaggaggagggctcgggcccgagaccgttcacctccccttatccctgttcccctcttcaggatggagctgacctcaagggaaagagggaggggacagcctctgccctgggaacttcgactgggcctactgctaagcgtgctggctgccacactggcacaggcccctgccccggatgtgcctggctgttccaggggaagctgctaccccgccacgggcgacctgctggtgggccgagctgacagactgactgcctcatccacttgtggcctgaatggcccccagccctactgcatcgtcagtcacctgcaggacgaaaagaagtgcttcctttgtgactcccggcgccccttctctgctagagacaacccacacagccatcgcatccagaatgtagtcaccagctttgcaccacagcggcgggcagcctggtggcagtcagagaatggtatccctgcggtcaccatccagctggacctggaggctgagtttcatttcacacacctcattatgaccttcaagacatttcgccctgctgccatgctggtggaacgctcagcagactttggccgcacctggcatgtgtaccgatatttctcctatgactgtggggctgacttcccaggagtcccactagcacccccacggcactgggatgatgtagtctgtgagtcccgctactcagagattgagccatccactgaaggcgaggtcatctatcgtgtgctggaccctgccatccctatcccagacccctacagctcacggattcagaacctgttgaagatcaccaacctacgggtgaacctgactcgtctacacacgttgggagacaacctactcgacccacggagggagatccgagagaagtactactatgccctctatgagctggttgtacgtggcaactgcttctgctacggacacgcctcagagtgtgcacccgccccaggggcaccagcccatgctgagggcatggtgcacggagcttgcatctgcaaacacaacacacgtggcctcaactgcgagcagtgtcaggatttctatcgtgacctgccctggcgtccggctgaggacggccatagtcatgcctgtaggaagtgtgagtgccatgggcacacccacagctgccacttcgacatggccgtatacctggcatctggcaatgtgagtggaggtgtgtgtgatggatgtcagcataacacagctgggcgccactgtgagctctgtcggcccttcttctaccgtgacccaaccaaggacctgcgggatccggctgtgtgccgctcctgtgattgtgaccccatgggttctcaagacggtggtcgctgtgattcccatgatgaccctgcactgggactggtctccggccagtgtcgctgcaaagaacatgtggtgggcactcgctgccagcaatgccgtgatggcttctttgggctcagcatcagtgaccgtctgggctgccggcgatgtcaatgtaatgcacggggcacagtgcctgggagcactccttgtgaccccaacagtggatcctgttactgcaaacgtctagtgactggacgtggatgtgaccgctgcctgcctggccactggggcctgagccacgacctgctcggctgccgcccctgtgactgcgacgtgggtggtgctttggatccccagtgtgatgagggcacaggtcaatgccactgccgccagcacatggttgggcgacgctgtgagcaggtgcaacctggctacttccggcccttcctggaccacctaatttgggaggctgaggacacccgagggcaggtgctcgatgtggtggagcgcctggtgacccccggggaaactccatcctggactggctcaggcttcgtgcggctacaggaaggtcagaccctggagttcctggtggcctctgtgccgaaggctatggactatgacctgctgctgcgcttagagccccaggtccctgagcaatgggcagagttggaactgattgtgcagcgtccagggcctgtgcctgcccacagcctgtgtgggcatttggtgcccaaggatgatcgcatccaagggactctgcaaccacatgccaggtacttgatatttcctaatcctgtctgccttgagcctggtatctcctacaagctgcatctgaagctggtacggacagggggaagtgcccagcctgagactccctactctggacctggcctgctcattgactcgctggtgctgctgccccgtgtcctggtgctagagatgtttagtgggggtgatgctgctgccctggagcgccaggccacctttgaacgctaccaatgccatgaggagggtctggtgcccagcaagacttctccctctgaggcctgcgcacccctcctcatcagcctgtccaccctcatctacaatggtgccctgccatgtcagtgcaaccctcaaggttcactgagttctgagtgcaaccctcatggtggtcagtgcctgtgcaagcctggagtggttgggcgccgctgtgacctctgtgcccctggctactatggctttggccccacaggctgtcaagcctgccagtgcagccacgagggggcactcagcagtctctgtgaaaagaccagtgggcaatgtctctgtcgaactggtgcctttgggcttcgctgtgaccgctgccagcgtggccagtggggattccctagctgccggccatgtgtctgcaatgggcatgcagatgagtgcaacacccacacaggcgcttgcctgggctgccgtgatcacacagggggtgagcactgtgaaaggtgcattgctggtttccacggggacccacggctgccatatgggggccagtgccggccctgtccctgtcctgaaggccctgggagccaacggcactttgctacttcttgccaccaggatgaatattcccagcagattgtgtgccactgccgggcaggctatacggggctgcgatgtgaagcttgtgcccctgggcactttggggacccatcaaggccaggtggccggtgccaactgtgtgagtgcagtgggaacattgacccaatggatcctgatgcctgtgacccccacacggggcaatgcctgcgctgtttacaccacacagagggtccacactgtgcccactgcaagcctggcttccatgggcaggctgcccgacagagctgtcaccgctgcacatgcaacctgctgggcacaaatccgcagcagtgcccatctcctgaccagtgccactgtgatccaagcagtgggcagtgcccatgcctccccaatgtccagggccctagctgtgaccgctgtgcccccaacttctggaacctcaccagtggccatggttgccagccttgtgcctgccacccaagccgggccagaggccccacctgcaacgagttcacagggcagtgccactgccgtgccggctttggagggcggacttgttctgagtgccaagagctccactggggagaccctgggttgcagtgccatgcctgtgattgtgactctcgtggaatagatacacctcagtgtcaccgcttcacaggtcactgcagctgccgcccaggggtgtctggtgtgcgctgtgaccagtgtgcccgtggcttctcaggaatctttcctgcctgccatccctgccatgcatgcttcggggattgggaccgagtggtgcaggacttggcagcccgtacacagcgcctagagcagcgggcgcaggagttgcaacagacgggtgtgctgggtgcctttgagagcagcttctggcacatgcaggagaagctgggcattgtgcagggcatcgtaggtgcccgcaacacctcagccgcctccactgcacagcttgtggaggccacagaggagctgcggcgtgaaattggggaggccactgagcacctgactcagctcgaggcagacctgacagatgtgcaagatgagaacttcaatgccaaccatgcactaagtggtctggagcgagataggcttgcacttaatctcacactgcggcagctcgaccagcatcttgacttgctcaaacattcaaacttcctggaggagggggctgatcctgatagcattgaaatggtggccacacgggtgctagagctctccatcccagcttcagctgagcagatccagcacctggcgggtgcgattgcagagcgagtccggagcctggcagatgtggatgcgatcctggcacgtactgtaggagatgtgcgtcgtgccgagcagctactgcaggatgcacggcgggcaaggagctgggctgaggatgagaaacagaaggcagagacagtacaggcagcactggaggaggcccagcgggcacagggtattgcccagggtgccatccggggggcagtggctgacacacgggacacagagcagaccctgtaccaggtacaggagaggatggcaggtgcagagcgggcactgagctctgcaggtgaaagggctcggcagttggatgctctcctggaggctctgaaattgaaacgggcaggaaatagtctggcagcctctacagcagaagaaacggcaggcagtgcccagggtcgtgcccaggaggctgagcagctgctacgcggtcctctgggtgatcagtaccagacggtgaaggccctagctgagcgcaaggcccaaggtgtgctggctgcacaggcaagggcagaacaactgcgggatgaggctcgggacctgttgcaagccgctcaggacaagctgcagcggctacaggaattggaaggcacctatgaggaaaatgagcgggcactggagagtaaggcagcccagttggacgggttggaggccaggatgcgcagcgtgcttcaagccatcaacttgcaggtgcagatctacaacacctgccagtgacccctgcccaaggcctaccccagttcctagcacgtccccacatgcgggagtcgtctagagtcgacctcagc

SEQ ID NO: 640965 - DNA, 235 bp, Homo sapiens
ttcgtcccctacacagagactcttgcatgtagagaagcaggtcctttcgtagtagaggctgaggtaaggagcaatgggaggcggcgaggcctgagcccccttaggctcggtcctagaaggagctgagtgagatagctcttccaaggagcttgcatgaaactctgcctggaccccctaggagcttctagtgtaacaaggccgccaacagaacaggccaaccaaagcagcagatagg

SEQ ID NO: 640966 - DNA, 3905 bp, Homo sapiens
  misc_feature (129)..(129): n is a, c, g, or t
gaaggcagtttccggagggaaggggtagggttggggtgggggcgctctccgcccggtgttgcgctccttcccagaatccgctccggcctttccttcctgccgcgattcccaactttgctcaaagtcgcnggactctaagctgtcggagggaccgctggacagacctgggaactgacagagggcctggagggaaacaggccaaagacccacaggcagagttgacacggaaccccaaagcaaggaggagggctcgggcccgagaccgttcacctccccttatccctgttcccctcttcaggatggagctgacctcaagggaaagagggaggggacagcctctgccctgggaacttcgactgggcctactgctaagcgtgctggctgccacactggcacaggcccctgccccggatgtgcctggctgttccaggggaagctgctaccccgccacgggcgacctgctggtgggccgagctgacagactgactgcctcatccacttgtggcctgaatggcccccagccctactgcatcgtcagtcacctgcaggacgaaaagaagtgcttcctttgtgactcccggcgccccttctctgctagagacaacccacacagccatcgcatccagaatgtagtcaccagctttgcaccacagcggcgggcagcctggtggcagtcagagaatggtatccctgcggtcaccatccagctggacctggaggctgagtttcatttcacacacctcattatgaccttcaagacatttcgccctgctgccatgctggtggaacgctcagcagactttggccgcacctggcatgtgtaccgatatttctcctatgactgtggggctgacttcccaggagtcccactagcacccccacggcactgggatgatgtagtctgtgagtcccgctactcagagattgagccatccactgaaggcgaggtcatctatcgtgtgctggaccctgccatccctatcccagacccctacagctcacggattcagaacctgttgaagatcaccaacctacgggtgaacctgactcgtctacacacgttgggagacaacctactcgacccacggagggagatccgagagaagtactactatgccctctatgagctggttgtacgtggcaactgcttctgctacggacacgcctcagagtgtgcacccgccccaggggcaccagcccatgctgagggcatggtgcacggagcttgcatctgcaaacacaacacacgtggcctcaactgcgagcagtgtcaggatttctatcgtgacctgccctggcgtccggctgaggacggccatagtcatgcctgtaggaagtgtgagtgccatgggcacacccacagctgccacttcgacatggccgtatacctggcatctggcaatgtgagtggaggtgtgtgtgatggatgtcagcataacacagctgggcgccactgtgagctctgtcggcccttcttctaccgtgacccaaccaaggacctgcgggatccggctgtgtgccgctcctgtgattgtgaccccatgggttctcaagacggtggtcgctgtgattcccatgatgaccctgcactgggactggtctccggccagtgtcgctgcaaagaacatgtggtgggcactcgctgccagcaatgccgtgatggcttctttgggctcagcatcagtgaccgtctgggctgccggcgatgtcaatgtaatgcacggggcacagtgcctgggagcactccttgtgaccccaacagtggatcctgttactgcaaacgtctagtgactggacgtggatgtgaccgctgcctgcctggccactggggcctgagccacgacctgctcggctgccgcccctgtgactgcgacgtgggtggtgctttggatccccagtgtgatgagggcacaggtcaatgccactgccgccagcacatggttgggcgacgctgtgagcaggtgcaacctggctacttccggcccttcctggaccacctaatttgggaggctgaggacacccgagggcaggtgctcgatgtggtggagcgcctggtgacccccggggaaactccatcctggactggctcaggcttcgtgcggctacaggaaggtcagaccctggagttcctggtggcctctgtgccgaaggctatggactatgacctgctgctgcgcttagagccccaggtccctgagcaatgggcagagttggaactgattgtgcagcgtccagggcctgtgcctgcccacagcctgtgtgggcatttggtgcccaaggatgatcgcatccaagggactctgcaaccacatgccaggtacttgatatttcctaatcctgtctgccttgagcctggtatctcctacaagctgcatctgaagctggtacggacagggggaagtgcccagcctgagactccctactctggacctggcctgctcattgactcgctggtgctgctgccccgtgtcctggtgctagagatgtttagtgggggtgatgctgctgccctggagcgccaggccacctttgaacgctaccaatgccatgaggagggtctggtgcccagcaagacttctccctctgaggcctgcgcacccctcctcatcagcctgtccaccctcatctacaatggtgccctgccatgtcagtgcaaccctcaaggttcactgagttctgagtgcaaccctcatggtggtcagtgcctgtgcaagcctggagtggttgggcgccgctgtgacctctgtgcccctggctactatggctttggccccacaggctgtcaagcctgccagtgcagccacgagggggcactcagcagtctctgtgaaaagaccagtgggcaatgtctctgtcgaactggtgcctttgggcttcgctgtgaccgctgccagcgtggccagtggggattccctagctgccggccatgtgtctgcaatgggcatgcagatgagtgcaacacccacacaggcgcttgcctgggctgccgtgatcacacagggggtgagcactgtgaaaggtgcattgctggtttccacggggacccacggctgccatatgggggccagtgccggccctgtccctgtcctgaaggccctgggagccaacggcactttgctacttcttgccaccaggatgaatattcccagcagattgtgtgccactgccgggcaggctatacggggctgcgatgtgaagcttgtgcccctgggcactttggggacccatcaaggccaggtggccggtgccaactgtgtgagtgcagtgggaacattgacccaatggatcctgatgcctgtgacccccacacggggcaatgcctgcgctgtttacaccacacagagggtccacactgtgcccactgcaagcctggcttccatgggcaggctgcccgacagagctgtcaccgctgcacatgcaacctgctgggcacaaatccgcagcagtgcccatctcctgaccagtgccactgtgatccaagcagtgggcagtgcccatgcctccccaatgtccagggccctagctgtgaccgctgtgcccccaacttctggaacctcaccagtggccatggttgccagccttgtgcctgccacccaagccgggccagaggccccacctgcaacgagttcacagggcagtgccactgccgtgccggcaattggaaggcacctatgaggaaaatgagcgggcactggagagtaaggcagcccagttggacgggttggaggccaggatgcgcagcgtgcttcaagccatcaacttgcaggtgcagatctacaacacctgccagtgacccctgcccaaggcctaccccagttcctagcactgccccacatgcatgtctgcctatgcactgaagagctcttggcccggcagggcccccaataaaccagtgtgaaccccca

SEQ ID NO: 640967 - DNA, 303 bp, Homo sapiens
  misc_feature (188)..(188): n is a, c, g, or t
tggtctcaaccgacgaagaatccctaccgagactctgccctaacttctcagacctcgaggctgaggccgaggccgacctcaggcccagagaagaagtgcggcggggaccgagcccctcggttcctagagctgggcctctgcgcgaagcactgtggcagcccgtactgaggtcggggttcttgtctcanggcctggcggtttcgcggggtatggcactaaggtctctgggccccggtgtgacggttgcttgccccccatcttgccttgcaggctttgaaggggtccttccccaggagcccaagc

SEQ ID NO: 640968 - DNA, 329 bp, Homo sapiens
aggtatggagagggggttcagcgagcctgacaactttcttctgccctctcttgccccagaaacagcagaggcaggagagagactccctctggctcctatcccacctctttgcatgggaccctgtgccaaacacccaagtttaagagaagagtagagctgtggcatctccagaccaggcctttccacctaccctccccgagatacccttcgagccacctgctgcacatgttcctgactgatgccctaggatcagggaactgcctggcaccactggatatctgctctactttccggcctctgctcctgcagttaaggcaccaaagcttgct

SEQ ID NO: 640969 - DNA, 801 bp, Homo sapiens
  misc_feature (305)..(305): n is a, c, g, or t
gttcgtgtactgcgcgtccgctgaccctggaaaatgtgttatccgcgaggggttcccgggaccccgctttgggagcagtgctttcccgcggaagagactattttctggcgtttgttgcccccccccagccagagttccccccccttgggcgccgccgcccaccatattcgggggattgttggtccttcccccagtaggttgccgcccgtgatgactggtgttctccccgctcacacgcgacctcgtggggggcattgctccccacctactgtggggctgttgcgggggagcacccccccacactngtcctctactccatggggggtttccccaaagtggcaatgcgcttcccagcgctcttgtcaagtgagtcagagagaagaagccccccacaaggtttcgtgtctccccgggtagtgtaccccggatatctgtcggtgacgagacccctgttgcaccacgtcctgtgcaagaatgtcttcggtcttgtggcgtctctactgaggcgaatttggcccctgtttgcggctggattcccgcagacaaaatatgtcgcccactctcgggaccacctactctatggcgggtatgctggtcgaccccgttttgtctgaagcacgatgcacaacttgtccaacgacttggatgatttttgagatgacgactctctgtgtaccttctcagatggtggttcgtcgcccaccttcaaatagtcatgttgccactacgttggggaccttggagatatcccgcagcagcaagaaaatatcaacaaaccaaaaagaacggaccacaatgaca

SEQ ID NO: 640970 - DNA, 102 bp, Homo sapiens
  misc_feature (38)..(38): n is a, c, g, or t
ggccaaaaaaaaaagccttttttttccttaggccaggnctccattgaaagatgaagaatggaggttgtttccaaaagaaataaagagaaccttagaagttga

SEQ ID NO: 640971 - DNA, 251 bp, Homo sapiens
agagacgagatgaaagttctgtggttagctgggcatggtggtgtgcacctgtagtcccagctactaaggaggttgaggtggggatagtgcttgagcccaggagcttgaggctgcagtgagccgtgactgcaccactgcactccaggctgggcaacagagcaagaccctgtttcaagggggggaaaaaaagtttctttggagttgcaaggccttgtcttcactaagattttagatggtccccccgacgatgt

SEQ ID NO: 640972 - DNA, 779 bp, Homo sapiens
  misc_feature (269)..(269): n is a, c, g, or t
  misc_feature (542)..(542): n is a, c, g, or t
  misc_feature (636)..(636): n is a, c, g, or t
  misc_feature (683)..(683): n is a, c, g, or t
  misc_feature (687)..(687): n is a, c, g, or t
  misc_feature (692)..(692): n is a, c, g, or t
gaatcccttacagccctctctaccctaagacccctgactaattcaaggggtatcaaggtaaggccaaggtaagcagttccactgcaaagaactgttattcatgaaactttcaaagacctaacaacaatctggcagctgaggaaaaaaaaaccctatgatacagtagaaagagtacaggctttaaggctggaaaactggtccagctatttacaaacttcatgaccctgagcatgggatttaacctctctgagcttcatctataaaatgcngtctcattagaaaagtattcactgagcactaagtacacgtcaggcaatgtgttaggtactgaaaattcaaagatgagtaagatgcggtccctacctcctaggaatttccagcatggtgagaaatgaagatagtgatgcctatcctgtagggccatcttgaagatgaagtgcagggtgcattctaagtgctgcataaatggcagttctctttctttttacaacccattatttaaacagaatgtgacactggttaattcacagaacagggttttngaagaacatagctgcttatacttttgaaattgatttctcaagattactacaataaatatgtcaactataattcttatactttctgttgtaattngttttatgatatttatatatactacatacttttagttagaaaaaacnaacnattcnaaactatagaaatgataatagtttagtcgcttcatataagctttatacttgagttttgaggctaaaacttttttttctgagaccgca

SEQ ID NO: 640973 - DNA, 340 bp, Homo sapiens
  misc_feature (340)..(340): n is a, c, g, or t
cccgctgccacctcggccagccatcaagccctccgataccttcggctaaaatatctttcatattttagaatttgtcctcggaaaccttttcggttggggtggtctctctcactcttgccccttctcacggagctcttggaagtcaacaggcggttgcggcttgggctgcccatgccatccaagtccaaggttccaatccggggcttgtgtttggggggaagacctcacctcgggatattcctgtttcttcatcagtggagttttctcgccccgctgagatcaaagagagggggaggtggtttataatataataatttgggggatcgtcgaagaagtaacn

SEQ ID NO: 640974 - DNA, 114 bp, Homo sapiens
ttagctcatgttgtgtttcacagcaaagagggtacagagccagcattggtgcaggttaatgtacaaaattgtctggcaatgcctgagtaaaaaaataaagttggcttgttgaga

SEQ ID NO: 640975 - DNA, 238 bp, Homo sapiens
tctgtgataccaggtaaacctttatttatgttgtactatatattatatttatgtatatatatttatatttatgtatatgatttcgtgtacatattttatatatttatatacatagtttatgtttatatatttatctataatgtgtatatatttttattaatatttatgtatattatgtatatactgtatatatatttatattcttccatctatattcacttaagtgggtagtcacaga

SEQ ID NO: 640976 - DNA, 164 bp, Homo sapiens
tatgtcgtggaggaccatacacacctgctcgctgtaagcacgggaatggccattaccggcctggacctcctccttcccccagcactccactcagggaaaagcaattccatgcacaagagacacattgatcttacccaccatacaaatagggcgagcatctacac

SEQ ID NO: 640977 - DNA, 186 bp, Homo sapiens
ctgggtagggcgggaagacagagcatacatactggaaagggtgtgtactgatatactcgtatggcaagttctgacaggttttctccctaggaagtgcagcacataccccaacacactggctctgcaattgtgccaatcccagatggtgcttgttttgtgcgcaccctcacccaaacccttgcccta

SEQ ID NO: 640978 - DNA, 89 bp, Homo sapiens
tcatctgttttctaaatcttaaatatcctgagcttaacatcagcctggatcactagcaaaggcattaagtaattagtgttgaatgaggt

SEQ ID NO: 640979 - DNA, 359 bp, Homo sapiens
cacgagggggatcgaggtgctgtcgcaccactgcgactcgcggatcacgatcccggacgacattctgctcaccgtgcacgtgcgcatggccaccatcatcaagcggatcagggacgtgaacaacttgctgctcggggcgatccaggtcatctgccgcatgatcatgcgctcgggcctgatcaacatccttttccgcaagctgcggatcgtgatggtctagatggtgctgggcatgatggtgacctgttccgaccgcagcctgcacatcgcacagggttagctcggtggcccgatcgaacatctactgcaccgccatctgaccctattggcagccagcggtatccttgtttacatcaacg

SEQ ID NO: 640980 - DNA, 253 bp, Homo sapiens
ggtgacctagaggatccctctgggtcctcatggatagtggtgggaagagggcagcatggacggccgtccggcccagtacatgcagtctgaactcggtgtgacgaccgttgcttaacagtttgttctcacgtggactgtgcaggggagtagagtgccacgatcggctgagttgcagtgacgggagcaacatagccctgatcttgtgcgcaggaaagcggtcctctagcacgaaattctctcgggcggccggtca

SEQ ID NO: 640981 - DNA, 523 bp, Homo sapiens
  misc_feature (18)..(18): n is a, c, g, or t
  misc_feature (50)..(50): n is a, c, g, or t
ggagggaaggagcccggntgccctggagaggatgcagacgccaggctcgntgcctcggagcagcagggctccgctgcctctgctgctgtcacgccacccaggctcttgccccgggagttactgttactgctgtattgccaccactgttgctcctgagtggatgctaggccttccgggcagccagttacagtcagttttcctttcctggtgctcaggaggattaggagagtggtctcatggcctgaacgccctgaaggcagaactgagagactggggaggaatgaaatcctcccgctcagaggaaatgcagagaagtagaatacccagcccctctcccacacccacacagactcagcccacaaactggagagtaaaaataaagaaatcgtacaggaagcatggagcaaatgactgtgagatgtttcgctttagagaagtgaggagcagagggggagcagaggctggagttggctgagaggggaaatccgcaggtacagcctgcggggctcttagagcccagagg

SEQ ID NO: 640982 - DNA, 550 bp, Homo sapiens
cccgtgctggtgaactaaatcaagaagttaacagactcatggttgccatgagggacatgttggctaacatccagtttcatgaacctcagtgggaggacaaccaagaaagagacgaggaggaatgggactaacagattaacaaggttgtgatttttcaaatgaagttgaatgacaaattgaaaaagcacaaaagaggaatttgtatgatctgctcaccttaattttgaataaatccaaattattcataccttgtggacaactgaattgtgctctacatatttttaatatgaagggccaaacatactgatgtatgtcttaaatgtcttaaaggttcgtttttttattattattattattaaaaaccttttaacctatgctttcctgataaatttcctgaaatttataagcatctatagtaagttgagccaccatgcttattacacaaacagtcaacacggaatattagtaaaaaaaaaaaatcatattcaatgctttatcaaactatattgactctaaattttcaataaactgctgaaaatgctgcccaata

SEQ ID NO: 640983 - DNA, 132 bp, Homo sapiens
gactctacagatcctataccactgttcgtcatgggtgcgaacgatgtagaagtatgacaacagcctcaagatcatcagcaatgcctcctgcaacaccaactgtcttagcacccctgtgcaaggtcatccatg

SEQ ID NO: 640984 - DNA, 341 bp, Homo sapiens
tcgtgtacctgtgggtatgcatcaataaggaacggtcccaggttggggacgagccccaagttgagaactaagtaagtgaacaattgttttactgaaccacttgttacgatacacgctgatcataaacaacctgtgtgtaatatgtatttctcctaaaaacgtagcacccttcagcaggaccctataaaactttcctccagcccttgcctctttgcaggtagccccttctctgctgagctgcccactgcaacatattttcacaatttctctaataaatctgcccttctttacctacaactatcttggtaaatggctttaccacctgcaaaactgaccctagg

SEQ ID NO: 640985 - DNA, 1208 bp, Homo sapiens
  misc_feature (40)..(41): n is a, c, g, or t
  misc_feature (154)..(154): n is a, c, g, or t
  misc_feature (209)..(209): n is a, c, g, or t
  misc_feature (399)..(399): n is a, c, g, or t
  misc_feature (402)..(403): n is a, c, g, or t
  misc_feature (407)..(407): n is a, c, g, or t
  misc_feature (414)..(414): n is a, c, g, or t
  misc_feature (451)..(451): n is a, c, g, or t
  misc_feature (489)..(489): n is a, c, g, or t
  misc_feature (505)..(505): n is a, c, g, or t
  misc_feature (514)..(514): n is a, c, g, or t
  misc_feature (538)..(538): n is a, c, g, or t
gggccgcggcaaatcggagccgctcttgctgcgacgcggnntcggaagcggcgaaggtcgaggccgggttggcgccggagccggggcgcttggagctcgtgtggggtctccggtccagggcgcggcatgggcgtcctggccgcagcgggcgctncctgtgtccggggtgcggaccgaatgagcaagtggacgagcaagcggggcccgcnacgttcaggggccgcaaggcgagggcgccaagggcatcggcttcctcacctcgggctggaggttcgtgcagatcaaggagatggtcccggagttcgtcgtcccggatctgaccggcttcaagctcaagccctacgtgagctacctcgcccctgagagcgaggagacgcccctgacggccgcgcagctttncanngaanccgtggngcctgccatcgaaaaggacttcaaggacggtaccttngaccctgacaacctggaaaagtacggcttcgagccccnacaggagggaaagctnttccagctntaccccaggaacttcctgcgctanctgggcgggggaggggcggcctgccctcatttcatttttattattttaaaactgcacttttggcccaggctaaggagagagaagaagaaggaaggaggaagaggacaaggtcgctagcaaaggtgaagaagagaataagagcggagacatattataaagcggagtgtgggagagaaaaagagggagatatagaaggacgggcaggcgggaagaagagggggggagaccgcggaggcgcagcggaaaagttagagaagaaacgaggggggggagcagagcaggcgggggcagagaccaccaacaagaagaggggcggcagaagaagggacgggcgggacagcggcgcgaggaactcggcgcggaaacaaggcggcggaggagaaaagcagggaagaaacaaggagcacaccgagaaacgagagaggaggggggaggaaaagagcagcgtagagagagcaacgggggaaggggggaggacaggggaggagccagaggcgagagaagaagccaagcacgaggaaggcacacaccggccgcagcggagaagcaagtgggaaagagaggcgaaggaggacgactagaaaggacggagcacaggaacaaaaaagaaggggagaggaaagaggggagcaggcgcagcgacggcagagcaggaaggagcaggggggcg

SEQ ID NO: 640986 - DNA, 234 bp, Homo sapiens
  misc_feature (14)..(14): n is a, c, g, or t
  misc_feature (68)..(68): n is a, c, g, or t
  misc_feature (143)..(143): n is a, c, g, or t
  misc_feature (152)..(152): n is a, c, g, or t
  misc_feature (183)..(183): n is a, c, g, or t
  misc_feature (213)..(213): n is a, c, g, or t
gtgacagctgcggntccccagcccattttcataggtgccaccaaattagcggctgttggtgaggccgnagaaacgagtctgaagaaatgttctgtgtgaaattggactagattggctctggtatcaacacaggcacaggctgngggaggctngacagccataaacaaaggctaacggcagatntcagcgtatcgggcaggcgggggcatctcntgggaggcctcctaggccact

SEQ ID NO: 640987 - DNA, 1323 bp, Homo sapiens
acttctgttttgtctatcctatgcaaccactattataataatgaacatacgtattaagtaggcgtgttctgcccactaccctatattaacaatctgcacgtctgcctgcgccggtcatgttgtataaattagtcacacccctccacctctacctctcttcctcttgtttggtgatcgacgagcttggctccaacaccaccttcatgccttctttttctctctttcccactgccgctttgtcgagatctactattatgcatcgagttgtgtagttagatagatcagaattgtgtagggggcggtcggggctgtgtggtggccgcccgcccaccacaccggcgctggctgttgtctgtctctttcctctgctgcgtcccttctcatatgtgttgcgcttccaccctccccgcagctgatggagttcgcacacatccattcctcgggcgtgcctccgttgtctgtgttttcttctctcctcctccccccctgcaccccgtctcgcgtgccgtccaaacgtgctcttgtcttctctcccctctaatatcggggagttgtcgtctcccccgccaccgtctttcctgtctctctcgttttgttttactcgcacagtgagagggctccctccctgtctttgtcacccctcgcctatatgttagttcgccccccttgtttgtgctccgcgcaccacactcgctttgtctgcgtcattttgctgtccctcccccctccctctgtcgcctcacaacacgactcttttgtctcgtggagaaaaactagctttctctgcccccgccccgctcgctcgcactcgcccgactctgttgcggcctctgctcacgcacctccagcccaccgccctggtcggtgttgttgtgacgacccccccccccgcacgcgtgttcgcggtttgcatcaccatctttctctccgcgcgagtagatttctcctctccgcgcgccctctcttcttcttttccccacctctcttctctctcactctcttctttctttgttcccaccctcggaggggtcttctttagtatacccgccctcctcctccttctctctgagtgctgtctctcttgtggggcccactgctttctcacctcttggggcggtctccccccgtctcgtcttcgttgtctctccctgctcccacaccgccctcggggaggatttctccacgaaggggatccgtctgcaccgctgcccacggccacacgccgtgcgccactacgcacgtgttttttttttcctatacccaaaagttttttaaaaattttttttttgtggtggtgggggggtttcttccacccccccccca

SEQ ID NO: 640988 - DNA, 148 bp, Homo sapiens
  misc_feature (107)..(107): n is a, c, g, or t
gagtagtctgtggtatagtactatatgactcgattttcagatactacaaataacttagaaaaattgagtcagactgaatagcatccttaaacacggcatttacaatngctagaaattagtaatgtagtctatcatgtgcgtttgaata

SEQ ID NO: 640989 - DNA, 200 bp, Homo sapiens
cgtgtttcaacatgttagccaggatggtcatctcctgacctcgtgatccgcctgcctcggcctcccaaaatgctgggattacaggcgtgacccaccatgcccagcctggatatttaaattgttctgtgctctcctcctttccttccctctctcacgttctctctttagcatctttgcttctgtcaacagagtcccccttt

SEQ ID NO: 640990 - DNA, 244 bp, Homo sapiens
  misc_feature (244)..(244): n is a, c, g, or t
gaattgctgacagccctctcaacgattctagaatttttgttacttcttctctggaaatacaatataaagaatttttatatggtttcccaagtagatatgaagctttttaaattaaaattcttgtgtctctgataagagcaaatgaaccatcttcatacattttaaagaagtagacaaatatattatagacaaagcactaacagaaaataaaaacaacattagaaagtaaaaagtgacaagcccn

SEQ ID NO: 640991 - DNA, 244 bp, Homo sapiens
tggaacaggtggaaatgcagatccagatgctggcagaggagctccagggtcagcgccagaccaatggcgcctgcgttgcccgcatccaggccatgcggcaggccctgtggtagagtgattcgcaccaggaacgcaggtgctgggctgtcggggaggcatcaggccacctccaggaacagaacacagtgttaagtttgattttttttatttcaaaatggtttgcaaataaatgaattactgttca

SEQ ID NO: 640992 - DNA, 3016 bp, Homo sapiens
  misc_feature (129)..(129): n is a, c, g, or t
  misc_feature (2839)..(2839): n is a, c, g, or t
gaaggcagtttccggagggaaggggtagggttggggtgggggcgctctccgcccggtgttgcgctccttcccagaatccgctccggcctttccttcctgccgcgattcccaactttgctcaaagtcgcnggactctaagctgtcggagggaccgctggacagacctgggaactgacagagggcctggagggaaacaggccaaagacccacaggcagagttgacacggaaccccaaagcaaggaggagggctcgggcccgagaccgttcacctccccttatccctgttcccctcttcaggatggagctgacctcaagggaaagagggaggggacagcctctgccctgggaacttcgactgggcctactgctaagcgtgctggctgccacactggcacaggcccctgccccggatgtgcctggctgttccaggggaagctgctaccccgccacgggcgacctgctggtgggccgagctgacagactgactgcctcatccacttgtggcctgaatggcccccagccctactgcatcgtcagtcacctgcaggacgaaaagaagtgcttcctttgtgactcccggcgccccttctctgctagagacaacccacacagccatcgcatccagaatgtagtcaccagctttgcaccacagcggcgggcagcctggtggcagtcagagaatggtatccctgcggtcaccatccagctggacctggaggctgagtttcatttcacacacctcattatgaccttcaagacatttcgccctgctgccatgctggtggaacgctcagcagactttggccgcacctggcatgtgtaccgatatttctcctatgactgtggggctgacttcccaggagtcccactagcacccccacggcactgggatgatgtagtctgtgagtcccgctactcagagattgagccatccactgaaggcgaggtcatctatcgtgtgctggaccctgccatccctatcccagacccctacagctcacggattcagaacctgttgaagatcaccaacctacgggtgaacctgactcgtctacacacgttgggagacaacctactcgacccacggagggagatccgagagaagtactactatgccctctatgagctggttgtacgtggcaactgcttctgctacggacacgcctcagagtgtgcacccgccccaggggcaccagcccatgctgagggcatggtgcacggagcttgcatctgcaaacacaacacacgtggcctcaactgcgagcagtgtcaggatttctatcgtgacctgccctggcgtccggctgaggacggccatagtcatgcctgtaggaagtgtgagtgccatgggcacacccacagctgccacttcgacatggccgtatacctggcatctggcaatgtgagtggaggtgtgtgtgatggatgtcagcataacacagctgggcgccactgtgagctctgtcggcccttcttctaccgtgacccaaccaaggacctgcgggatccggctgtgtgccgctcctgtgattgtgaccccatgggttctcaagacggtggtcgctgtgattcccatgatgaccctgcactgggactggtctccggccagtgtcgctgcaaagaacatgtggtgggcactcgctgccagcaatgccgtgatggcttctttgggctcagcatcagtgaccgtctgggctgccggcgatgtcaatgtaatgcacggggcacagtgcctgggagcactccttgtgaccccaacagtggatcctgttactgcaaacgtctagtgactggacgtggatgtgaccgctgcctgcctggccactggggcctgagccacgacctgctcggctgccgcccctgtgactgcgacgtgggtggtgctttggatccccagtgtgatgagggcacaggtcaatgccactgccgccagcacatggttgggcgacgctgtgagcaggtgcaacctggctacttccggcccttcctggaccacctaatttgggaggctgaggacacccgagggcaggtgctcgatgtggtggagcgcctggtgacccccggggaaactccatcctggactggctcaggcttcgtgcggctacaggaaggtcagaccctggagttcctggtggcctctgtgccgaaggctatggactatgacctgctgctgcgcttagagccccaggtccctgagcaatgggcagagttggaactgattgtgcagcgtccagggcctgtgcctgcccacagcctgtgtgggcatttggtgcccaaggatgatcgcatccaagggactctgcaaccacatgccaggtacttgatatttcctaatcctgtctgccttgagcctggtatctcctacaagctgcatctgaagctggtacggacagggggaagtgcccagcctgagactccctactctggacctggcctgctcattgactcgctggtgctgctgccccgtgtcctggtgctagagatgtttagtgggggtgatgctgctgccctggagcgccaggccacctttgaacgctaccaatgccatgaggagggtctggtgcccagcaagacttctccctctgaggcctgcgcacccctcctcatcagcctgtccaccctcatctacaatggtgccctgccatgtcagtgcaaccctcaaggttcactgagttctgagtgcaaccctcatggtggtcagtgcctgtgcaagcctggagtggttgggcgccgctgtgacctctgtgcccctggctactatggctttggccccacaggctgtcaaggtactcttctgccccttgttccctcctatgcttctctctccttcccattacngttctctctcctccttctggacctgctgctggtttcctcaaactaagtcttggaccctctactctcaacctgggtcagttgtagttctcttccatttcctgaccttcccacctagactcccactactcacactccctatgagaccctcccccacccggacctcaattaaggatcctg

SEQ ID NO: 640993 - DNA, 261 bp, Homo sapiens
  misc_feature (185)..(185): n is a, c, g, or t
  misc_feature (253)..(253): n is a, c, g, or t
catttttcaacttatctgcagaagatgaaggccagctttagtctataatacacagaggacttactacatgcgaggcacttatttcaagcatgttacatatctcttttagtcttcacagaaactttacgaggtagttattacatatcatcccttacttaacggggtaacgaaaacgtggaggcacnagaaaggtgtcaagtaacttgtgcccaagggttattcagtcactggagtggttccaaccttaagctgncgtgaggt

SEQ ID NO: 640994 - DNA, 3103 bp, Homo sapiens
  misc_feature (129)..(129): n is a, c, g, or t
  misc_feature (2707)..(2707): n is a, c, g, or t
  misc_feature (2732)..(2732): n is a, c, g, or t
  misc_feature (2926)..(2926): n is a, c, g, or t
gaaggcagtttccggagggaaggggtagggttggggtgggggcgctctccgcccggtgttgcgctccttcccagaatccgctccggcctttccttcctgccgcgattcccaactttgctcaaagtcgcnggactctaagctgtcggagggaccgctggacagacctgggaactgacagagggcctggagggaaacaggccaaagacccacaggcagagttgacacggaaccccaaagcaaggaggagggctcgggcccgagaccgttcacctccccttatccctgttcccctcttcaggatggagctgacctcaagggaaagagggaggggacagcctctgccctgggaacttcgactgggcctactgctaagcgtgctggctgccacactggcacaggcccctgccccggatgtgcctggctgttccaggggaagctgctaccccgccacgggcgacctgctggtgggccgagctgacagactgactgcctcatccacttgtggcctgaatggcccccagccctactgcatcgtcagtcacctgcaggacgaaaagaagtgcttcctttgtgactcccggcgccccttctctgctagagacaacccacacagccatcgcatccagaatgtagtcaccagctttgcaccacagcggcgggcagcctggtggcagtcagagaatggtatccctgcggtcaccatccagctggacctggaggctgagtttcatttcacacacctcattatgaccttcaagacatttcgccctgctgccatgctggtggaacgctcagcagactttggccgcacctggcatgtgtaccgatatttctcctatgactgtggggctgacttcccaggagtcccactagcacccccacggcactgggatgatgtagtctgtgagtcccgctactcagagattgagccatccactgaaggcgaggtcatctatcgtgtgctggaccctgccatccctatcccagacccctacagctcacggattcagaacctgttgaagatcaccaacctacgggtgaacctgactcgtctacacacgttgggagacaacctactcgacccacggagggagatccgagagaagtactactatgccctctatgagctggttgtacgtggcaactgcttctgctacggacacgcctcagagtgtgcacccgccccaggggcaccagcccatgctgagggcatggtgcacggagcttgcatctgcaaacacaacacacgtggcctcaactgcgagcagtgtcaggatttctatcgtgacctgccctggcgtccggctgaggacggccatagtcatgcctgtaggaagtgtgagtgccatgggcacacccacagctgccacttcgacatggccgtatacctggcatctggcaatgtgagtggaggtgtgtgtgatggatgtcagcataacacagctgggcgccactgtgagctctgtcggcccttcttctaccgtgacccaaccaaggacctgcgggatccggctgtgtgccgctcctgtgattgtgaccccatgggttctcaagacggtggtcgctgtgattcccatgatgaccctgcactgggactggtctccggccagtgtcgctgcaaagaacatgtggtgggcactcgctgccagcaatgccgtgatggcttctttgggctcagcatcagtgaccgtctgggctgccggcgatgtcaatgtaatgcacggggcacagtgcctgggagcactccttgtgaccccaacagtggatcctgttactgcaaacgtctagtgactggacgtggatgtgaccgctgcctgcctggccactggggcctgagccacgacctgctcggctgccgcccctgtgactgcgacgtgggtggtgctttggatccccagtgtgatgagggcacaggtcaatgccactgccgccagcacatggttgggcgacgctgtgagcaggtgcaacctggctacttccggcccttcctggaccacctaatttgggaggctgaggacacccgagggcaggtgctcgatgtggtggagcgcctggtgacccccggggaaactccatcctggactggctcaggcttcgtgcggctacaggaaggtcagaccctggagttcctggtggcctctgtgccgaaggctatggactatgacctgctgctgcgcttagagccccaggtccctgagcaatgggcagagttggaactgattgtgcagcgtccagggcctgtgcctgcccacagcctgtgtgggcatttggtgcccaaggatgatcgcatccaagggactctgcaaccacatgccaggtacttgatatttcctaatcctgtctgccttgagcctggtatctcctacaagctgcatctgaagctggtacggacagggggaagtgcccagcctgagactccctactctggacctggcctgctcattgactcgctggtgctgctgccccgtgtcctggtgctagagatgtttagtgggggtgatgctgctgccctggagcgccaggccacctttgaacgctaccaatgccatgaggagggtctggtgcccagcaagacttctccctctgaggcctgcgcacccctcctcatcagcctgtccaccctcatctacaatggtgccctgccatgtcagtgcaaccctgtgagtgtctgtgatgtgggttgatggggcagaggtggggacccagnctgattggcaacctcctccccacancatgtcagtgcacctcaaggttcactgagttctgagtgcaaccctcatggtggtcagtgcctgtgcaagcctggagtggttgggcgccgctgtgacctctgtgcccctggctactatggctttggccccacaggctgtcaaggtactcttctgccccttgttccctcctatgcttctctctccttcccattacngttctctctcctccttctggacctgctgctggtttcctcaaactaagtcttggaccctctactctcaacctgggtcagttgtagttctcttccatttcctgaccttcccacctagactcccactactcacactccctatgagaccctcccccacccggacctcaattaaggatcctg

SEQ ID NO: 640995 - DNA, 137 bp, Homo sapiens
atacagcactaggccatcctcccatttcactcagaagaaaagctctgacagcagctgaaaacccgagcctccttctcgggcccctctgtgagtcactgtagtgtgggctggacacgccaggcccctgccctgtcgcg

SEQ ID NO: 640996 - DNA, 391 bp, Homo sapiens
  misc_feature (16)..(16): n is a, c, g, or t
  misc_feature (37)..(37): n is a, c, g, or t
  misc_feature (65)..(65): n is a, c, g, or t
  misc_feature (102)..(102): n is a, c, g, or t
  misc_feature (154)..(154): n is a, c, g, or t
  misc_feature (174)..(174): n is a, c, g, or t
  misc_feature (194)..(194): n is a, c, g, or t
  misc_feature (209)..(209): n is a, c, g, or t
  misc_feature (228)..(228): n is a, c, g, or t
  misc_feature (244)..(244): n is a, c, g, or t
  misc_feature (281)..(281): n is a, c, g, or t
ggactttgtgctcccnagacggccgcgtcattccccnaaaggcattgtctgcctcatcaatattntcggggatcccattacaaccccaactgtgtggccaanacccctggaggctacgaccccttccgtttcaacccaagagaacatcaagganaggtcacctctggcttttantcccttctcgcagggcccanaaactgcatcgggcnagcgttcgccatggctganatgaaggtggtccctnggctcacgctgctgcacttccgatcctgccgacccanactgaaccccgcaggaaacccgagctgatattgcgcgcagagggtggactttggctgcgggtggagcccctgggtgcgaactcacagtgactgccctacccacccaccca

SEQ ID NO: 640997 - DNA, 2278 bp, Homo sapiens
  misc_feature (129)..(129): n is a, c, g, or t
gaaggcagtttccggagggaaggggtagggttggggtgggggcgctctccgcccggtgttgcgctccttcccagaatccgctccggcctttccttcctgccgcgattcccaactttgctcaaagtcgcnggactctaagctgtcggagggaccgctggacagacctgggaactgacagagggcctggagggaaacaggccaaagacccacaggcagagttgacacggaaccccaaagcaaggaggagggctcgggcccgagaccgttcacctccccttatccctgttcccctcttcaggatggagctgacctcaagggaaagagggaggggacagcctctgccctgggaacttcgactgggcctactgctaagcgtgctggctgccacactggcacaggcccctgccccggatgtgcctggctgttccaggggaagctgctaccccgccacgggcgacctgctggtgggccgagctgacagactgactgcctcatccacttgtggcctgaatggcccccagccctactgcatcgtcagtcacctgcaggacgaaaagaagtgcttcctttgtgactcccggcgccccttctctgctagagacaacccacacagccatcgcatccagaatgtagtcaccagctttgcaccacagcggcgggcagcctggtggcagtcagagaatggtatccctgcggtcaccatccagctggacctggaggctgagtttcatttcacacacctcattatgaccttcaagacatttcgccctgctgccatgctggtggaacgctcagcagactttggccgcacctggcatgtgtaccgatatttctcctatgactgtggggctgacttcccaggagtcccactagcacccccacggcactgggatgatgtagtctgtgagtcccgctactcagagattgagccatccactgaaggcgaggtcatctatcgtgtgctggaccctgccatccctatcccagacccctacagctcacggattcagaacctgttgaagatcaccaacctacgggtgaacctgactcgtctacacacgttgggagacaacctactcgacccacggagggagatccgagagaagtactactatgccctctatgagctggttgtacgtggcaactgcttctgctacggacacgcctcagagtgtgcacccgccccaggggcaccagcccatgctgagggcatggtgcacggagcttgcatctgcaaacacaacacacgtggcctcaactgcgagcagtgtcaggatttctatcgtgacctgccctggcgtccggctgaggacggccatagtcatgcctgtaggaagtgtgagtgccatgggcacacccacagctgccacttcgacatggccgtatacctggcatctggcaatgtgagtggaggtgtgtgtgatggatgtcagcataacacagctgggcgccactgtgagctctgtcggcccttcttctaccgtgacccaaccaaggacctgcgggatccggctgtgtgccgctcctgtgattgtgaccccatgggttctcaagacggtggtcgctgtgattcccatgatgaccctgcactgggactggtctccggccagtgtcgctgcaaagaacatgtggtgggcactcgctgccagcaatgccgtgatggcttctttgggctcagcatcagtgaccgtctgggctgccggcgatgtcaatgtaatgcacggggcacagtgcctgggagcactccttgtgaccccaacagtggatcctgttactgcaaacgtctagtgactggacgtggatgtgaccgctgcctgcctggccactggggcctgagccacgacctgctcggctgccgcccctgtgactgcgacgtgggtggtgctttggatccccagtgtgatgagggcacaggtcaatgccactgccgccagcacatggttgggcgacgctgtgagcaggtgcaacctggctacttccggcccttcctggaccacctaatttgggaggctgaggacacccgagggcaggtgctcgatgtggtggagcgcctggtgacccccggggaaactccatcctggactggctcaggcttcgtgcggctacaggaaggtcagaccctggagttcctggtggcctctgtgccgaaggctatggactatgacctgctgctgcgcttagagccccaggttagaccctgttatctaatctggagctgaacctctgggtgtgggagcatctcctccatcatcccgttttcccaggtccctgagcaata

SEQ ID NO: 640998 - DNA, 203 bp, Homo sapiens
  misc_feature (50)..(50): n is a, c, g, or t
agtcgacatagtggatcaaagaattcggcacgagtgaatatctctatcangaacagtatttgtatcctttcgtctgatatacccattagcacttaaaattagacttcttatagataaagtgttgctaactctatatgatcattctctgggatactaggaggatgtgttattgcttcagagatatgcactcctcacgcatatag

SEQ ID NO: 640999 - DNA, 3000 bp, Homo sapiens
  misc_feature (129)..(129): n is a, c, g, or t
  misc_feature (2707)..(2707): n is a, c, g, or t
  misc_feature (2732)..(2732): n is a, c, g, or t
gaaggcagtttccggagggaaggggtagggttggggtgggggcgctctccgcccggtgttgcgctccttcccagaatccgctccggcctttccttcctgccgcgattcccaactttgctcaaagtcgcnggactctaagctgtcggagggaccgctggacagacctgggaactgacagagggcctggagggaaacaggccaaagacccacaggcagagttgacacggaaccccaaagcaaggaggagggctcgggcccgagaccgttcacctccccttatccctgttcccctcttcaggatggagctgacctcaagggaaagagggaggggacagcctctgccctgggaacttcgactgggcctactgctaagcgtgctggctgccacactggcacaggcccctgccccggatgtgcctggctgttccaggggaagctgctaccccgccacgggcgacctgctggtgggccgagctgacagactgactgcctcatccacttgtggcctgaatggcccccagccctactgcatcgtcagtcacctgcaggacgaaaagaagtgcttcctttgtgactcccggcgccccttctctgctagagacaacccacacagccatcgcatccagaatgtagtcaccagctttgcaccacagcggcgggcagcctggtggcagtcagagaatggtatccctgcggtcaccatccagctggacctggaggctgagtttcatttcacacacctcattatgaccttcaagacatttcgccctgctgccatgctggtggaacgctcagcagactttggccgcacctggcatgtgtaccgatatttctcctatgactgtggggctgacttcccaggagtcccactagcacccccacggcactgggatgatgtagtctgtgagtcccgctactcagagattgagccatccactgaaggcgaggtcatctatcgtgtgctggaccctgccatccctatcccagacccctacagctcacggattcagaacctgttgaagatcaccaacctacgggtgaacctgactcgtctacacacgttgggagacaacctactcgacccacggagggagatccgagagaagtactactatgccctctatgagctggttgtacgtggcaactgcttctgctacggacacgcctcagagtgtgcacccgccccaggggcaccagcccatgctgagggcatggtgcacggagcttgcatctgcaaacacaacacacgtggcctcaactgcgagcagtgtcaggatttctatcgtgacctgccctggcgtccggctgaggacggccatagtcatgcctgtaggaagtgtgagtgccatgggcacacccacagctgccacttcgacatggccgtatacctggcatctggcaatgtgagtggaggtgtgtgtgatggatgtcagcataacacagctgggcgccactgtgagctctgtcggcccttcttctaccgtgacccaaccaaggacctgcgggatccggctgtgtgccgctcctgtgattgtgaccccatgggttctcaagacggtggtcgctgtgattcccatgatgaccctgcactgggactggtctccggccagtgtcgctgcaaagaacatgtggtgggcactcgctgccagcaatgccgtgatggcttctttgggctcagcatcagtgaccgtctgggctgccggcgatgtcaatgtaatgcacggggcacagtgcctgggagcactccttgtgaccccaacagtggatcctgttactgcaaacgtctagtgactggacgtggatgtgaccgctgcctgcctggccactggggcctgagccacgacctgctcggctgccgcccctgtgactgcgacgtgggtggtgctttggatccccagtgtgatgagggcacaggtcaatgccactgccgccagcacatggttgggcgacgctgtgagcaggtgcaacctggctacttccggcccttcctggaccacctaatttgggaggctgaggacacccgagggcaggtgctcgatgtggtggagcgcctggtgacccccggggaaactccatcctggactggctcaggcttcgtgcggctacaggaaggtcagaccctggagttcctggtggcctctgtgccgaaggctatggactatgacctgctgctgcgcttagagccccaggtccctgagcaatgggcagagttggaactgattgtgcagcgtccagggcctgtgcctgcccacagcctgtgtgggcatttggtgcccaaggatgatcgcatccaagggactctgcaaccacatgccaggtacttgatatttcctaatcctgtctgccttgagcctggtatctcctacaagctgcatctgaagctggtacggacagggggaagtgcccagcctgagactccctactctggacctggcctgctcattgactcgctggtgctgctgccccgtgtcctggtgctagagatgtttagtgggggtgatgctgctgccctggagcgccaggccacctttgaacgctaccaatgccatgaggagggtctggtgcccagcaagacttctccctctgaggcctgcgcacccctcctcatcagcctgtccaccctcatctacaatggtgccctgccatgtcagtgcaaccctgtgagtgtctgtgatgtgggttgatggggcagaggtggggacccagnctgattggcaacctcctccccacancatgtcagtgcacctcaaggttcactgagttctgagtgcaaccctcatggtggtcagtgcctgtgcaagcctggagtggttgggcgccgctgtgacctctgtgcccctggctactatggctttggccccacaggctgtcaagctctgcatctgccgcgggatgggctgagatagtggtttctgtcccctgatatccgcttgttctcctccctttgttttctccctctcctcccttccactcacttttgctacctttactttcttcctg

SEQ ID NO: 641000 - DNA, 995 bp, Homo sapiens
agttggtatgcgagtcttatatgtgtcacgctccaaagatattggccagcttatggtgtctgtgcttgttgcgtccttgcattaaattcggggtgcggtgggagaattgcttgaacctggaaggcagaagttgcagtgagctgagatcacaccatgcactccagcctgggtgacagagagactctgtctcaaaaaaaaaataaaattcccaatcttaatgtctgtttcagaatttcagtgattaaagacgtgatagtagaaaataccaagcatatgaggtattccaatatgataggcttcttacatttataatagtaacacatcttggttccaggacccttgacatgatgctcggggaaacggataaagcagtagaataccaggccagttgggcctctgatttgagtacatatataataaaggttggggagataatcatagacatactcaatattcattagctgataatgtagtcaataaatggcatcggggagaagacaaacaacacattgatgcataaaccttctgtaacacgatagcagacattacacacgcgcattgtgactttcacactctgatgtgaatgcccacctgtaagaacacacacaagagggagatagaactcaagaattgaaggaaacccttatgctgcaaaataaggtacctacacctaaaacatatagacctggcacacccacacactccatacatcaagtgagaggaggacaaccgaaataccacggcgacagggaaaggacgccgacaaaacacacagggagcacgcaaatacagggcgaagcagaggccacgcgacaaacagcaacacgacaacacacagcaacacgaacaggaaacgacaaaagaggaacagagaacccgcaccagccagcccggcagcgcaaacgctggaccagaaaccagaaaccgcaacaaagaacaagagcagccacacacaaacagaacaaccccaccacaccgcgaggcgcagaacacta

SEQ ID NO: 641001 - DNA, 259 bp, Homo sapiens
acactataggagaccccattttccaaagtagcagttgtaccgaacaaccctaacctaaccgatcttaattgaactatttatattatcctaactactaccgcattcttagctctcagctgaaactcgagcaccacgaccctgctactatctcgcagttctaccgtacaaccgtaacttaaccattcttaatctaactatttatatgatcctaactactaccgcattcctactactcaacttaaactccagcaccacgacc

SEQ ID NO: 641002 - DNA, 203 bp, Homo sapiens
attcgcggccgcgtcgaccaaaaaatacaagaaattagctggatgtggtggtggtgcacacctgtagtcctagctacttcgggaaggctgaggtgggaggatggcttctagctgggaagcggagggtcagtgagctgggatcatgccactgcactttagcctggaaaaataaagggacattgtctctaaaaaaaaagttaaaa

SEQ ID NO: 641003 - DNA, 793 bp, Homo sapiens
gacaggttgcccacctcccccaagccaccccgttcgcagtagacggacagaggagtcgtagcggtcgaggcttgggcggctccggtgtgccggaaaagtatgttatgcataaaagtggatacattcacttgataccatgaaaatggccaaatttctttaagaggagaagtactaaaatttataaaaatcggggtgtatctgtggacagagattatcccaaaaggagcagactatttaaaaaagcgttggaagacacatttttctctttaagagaacaacggagtgtgaaagaaatccaaggagaaagatccaagcgaacttttattgtgcaccaggggcgcgaatttgtgggtaatgggaaaagaggcaggctaaggaaaggtttgggtaactatccctttaagggaaaattaagaaggatgctaattggaaacaagagggtctaattagtccagattaaccaagaaaaactaatgagacagcattacatagtttaaattataggcttaattcagtgcccaggctgggttaattgttataccccaagcagtgttgcggtaaaaacataattccctaacgctttaaacatggggcacagatattcccttggttgtgtaacaacaattcccttgaagctggcccatagtgacataaacagaggggttccaacttcctgtgcattaccggacgaatgtatcaggcaacttagattgctcatggtgtaacagaccttggcaatgtggcaatactaccgtcataaattagggcgaaccaatttgatggacacttctcg

SEQ ID NO: 641004 - DNA, 149 bp, Homo sapiens
cacacgctgatggcaggtccaaagcactgctctcctctgacaggctgcctgaagtggcgtccctggctgccatagtcctctcgaattccaccacactggcggccgcaaggagaggacagcgattctcgtacgaacggttacgattcgaa

SEQ ID NO: 641005 - DNA, 187 bp, Homo sapiens
acattagcccagtgcagaacctgctcagcatcagcagatccaaaagaccagcgcaagttaatccactcattaagatacaattcactccttcctaaaatgtcagaatagtcggtaaccagagatgaataaaatcttatccaaaagagtaggtcttataacataaaagttttttttaggaagtatatgt

SEQ ID NO: 641006 - DNA, 233 bp, Homo sapiens
ggggccaatttttttttaaaaaaacagggtttttttgccccaaactgttccgtttttaaaaatttttaaaccccctcaaggggttttttggggggtgaaacaaaaggggaaaattttaattggtccccccctttaaaggtttgaaattaagtttcctttttttttcaagttttgtttcccccccgtttttttaaatttgtttttttcaaaaaaccttttgttattttttttta

SEQ ID NO: 641007 - DNA, 354 bp, Homo sapiens
  misc_feature (125)..(125): n is a, c, g, or t
  misc_feature (184)..(184): n is a, c, g, or t
  misc_feature (186)..(186): n is a, c, g, or t
  misc_feature (333)..(333): n is a, c, g, or t
tttttttgagacagagactcactctgtcacccaggctggagtgcagtggcatgattttggctcactgcaacctccacctcctgagttcaaacaattatcctgcctcatccttcggagtacctggnattacaggtgcgtgccaccgtgcccggctcatttttgtattcttagtagagacggcatntnaccatgttggccaggctggtctcaaactcctggcctcaaccgatccactctcattggccttccaaggtgctgggattacaggcgcgagcaccacaaactggctcagtaaatacattttttattatcaaaaaaggagtagtgtatggntggcgtattctgtgtagaatg

SEQ ID NO: 641008 - DNA, 509 bp, Homo sapiens
  misc_feature (509)..(509): n is a, c, g, or t
tcgagctcggtaccatctagtcaggagcagagggggccagtcgatggaaatgactaatgcgaggaaacatcaggggtaaagggggatggttactaaactgacctgacaagattctgctgaaggcaggtgagggtgatcaaatattacgtgggggatagtacaagatgaggaatttgatcagatattaagggtgatcagatattgaggctgggagattctagctaaactgacttatcaggaatctggctaaaattgggcaatgccaggattcccctgggtaatcatgatcagttaccccagccaaaaccatagctcccttgtttgccagttgattcaggagcatgagggacccgaagtggtcgggtgggagttttcacttttagtttaggggaatcatggtgtgtctcctggtggaagtatttctcccttgggaattaagacctctagaacagcagagcataaggtcacagagacaggtagcaaaaattttgctagtggactagaggggn

SEQ ID NO: 641009 - DNA, 934 bp, Homo sapiens
caccttacaaaaaaagcacttgaagttttgtgttgttgtttttttttcctgagccagagtcttgctttgtcacccagactggaatgcagtggcatgatctcggcttactgcaacctccgcctcctgggttcaagcggttctgctgtctcggcctcccaagtggctgggattgcaggcacgtgccaccgtgtccggctaatttttgttattttttttttttttggagagtggagttctggactccgtgttgggaattgcaggtggtgtgactctcagtctcacgtgcaaccctccaccctccgcgggttcaacgcaattctccgtggcctcagcccttcccgagttagctggaattaagaggcctcccgccaccaggcccagcctaattgtggtatccttggctagagatgtggggttcaccatgtgtttggccagggtgggtctccctgacctcatggatccatctggcctcggcctcccagggtggcggggatgaatggggcggtgagccacacaggcccagttgatagaaattttcaagggttacaaaggatttataacctggtcatcctggtaaccgaaagtactatataatttaccttctcaaaccgagtttgtctattcttttaaaacagtttttttatttttcccacctgatcttttttaaaaccaaacgtgtgagtctctatcaggtcccacgggttgagaatttcccccggtgaaccaagggggcttttttcccccctagagattcgcgcataggtcccattgaccccttgggagggtttcagcctccagaactttttggcacaccaattttcgtgtttgtttggcgcccctaacttgtcttggtacgcgcgtccaggaactatccccttttctagctttggttccccttcgttagttaccccccttgatttggacacggctctta

SEQ ID NO: 641010 - DNA, 129 bp, Homo sapiens
tgcggctgtggcggatgtcgcgggtcgaggcgctgattgccggcaccacgctgctggtcacgctggcagcagctgcggccctgtacatggggcgtgctggcgggcgtgctgatgtcgctcagccactta

SEQ ID NO: 641011 - DNA, 220 bp, Homo sapiens
  misc_feature (105)..(105): n is a, c, g, or t
gataggcactatgaatcacgctgagcagacactggcatgctgcacctccctcaagtcaaacagacacaggcgtcccatacaaagaatcttgtccctcactcacangacaccttgtaggcacccgggccacacccgaaacacatcgagtgcggcattacacacttcaggggacgtgcatgtggagtgcagacacacgggtacacggcgcagtcacacgaat

SEQ ID NO: 641012 - DNA, 726 bp, Homo sapiens
agcggggcgggggaggagacggtggtgtactcgcggtcgcaactgtctgctggttgacagcaccaatggcgctgggctgatgccttcaagctctttcatgccctgcagcagaaggttcattgatgctctggatgttgggaagcatattgggaagtttaatacatcttgcaattgccgtaaagcagcaaagttttaccgccaggatagaattgcacgcatatttgtgaaaggaacaggcaaggaaaagaaaaattaaatatagaatagaagaaatatagaaaaagaagtaaagataaagggaagaatagaatagaataattagcaatgagaagagagacaaaataggcgaaagttgagagagaaaggaaagataaagtaggataaaagacatggaagacaaaaacgagagatagaacatagcggaatacgactatacacagaacacagtagttattagaaaacatagaaataggacggaatagatgagaagcaaacaggaataacgaacacacgatgagaagagatacagagtggaaccgaataacaactaacaacacggaacacacagagacgaacgcaccgcgaaccaagggagacgaagagggcaacgaacacaagcagacacaaaagaacacaaaaccacgacaagcgcagccagaacgaaaaacgagaagaccgagagaaaagtaagaaacgagaacgaaacgcaacgacaagcagggaacc

SEQ ID NO: 641013 - DNA, 691 bp, Homo sapiens
tatttctgaaacggagtctcaatctgtcgcccaggctggagtgcaggtggcgcgatctcggttcactgcaatttccgcctcccggtttcaacgattctcctagcctcggccatcctgaagttaagctggatctacagatgcccaccacacacgcccggctaatttctcattttaagtaaagacggggatttcactattttggccaagctgttctcgaactcctaggctcaaatgatccgcccgccttaggcctcccaaagtgctgggattacaggcgttgagccaccgtgcccggcccgattggcgttttaaagtcgctcgtgaacagataaaatccgaaaggactgaagggaaaggctccgacattctcccgtgatctgggcaggtgtagcagactgccgggcagagaacggtagccttgggacagcctggccccggaccttgacaacaggcccccggggagccttcagtcaataatccccggtggcgcgtagtccaaatagtcctattatcccccaaacagaagagcggcgagatacctcatttagggggcgttgacctgcatattgtgtgggaatgaagttcggcaagtgagggtgaaaacatcagggccaagtttatcagaaaccggcgcgagaaaaacgcttccttgggacacaaaagagcgaggatataaatgggacccccaagt

SEQ ID NO: 641014 - DNA, 1103 bp, Homo sapiens
tggaaagggatttcactcttgctgcccaggtctggagtgcaggggctcaatctcgggtcctgcaaccctccgcctcttcccgggtttcaagttgatcgtccgtgccttataggcctccgtgagatagcgggggatttacagggtgccataccagcattgctcggcataattttttggatattttaagatagaagaggggattttcaccagtgtgggccgggcgggtctcaaactcctagggtcttccaccttgccttcggcctcccagagttgctgagatttacggggcgttgagcctccgcgccgcggccccctttgcagttctctcgtgattgggttggtccgtgtcctcaggcttcgtgtggcaggatgtggcccagggtaggaaggaagccaggagccacacctggggagaattggggtggctccccggccgggagaggttgggcctctggggcagacctcgtcctgtatggtcaggtaaggaagagatggtattataaagggttaaaccctcctgggccgcagatggcaaaggggatgtgccttgggcctgtttaccccaggggttgggattccacaccctgtgtggacgccctgtgggcccaagtgccgtggttgtctgttgctcaccttggcctctggagggttgccctgaagttggggccttgcagacaaggtcgggttgtagggacgagtctcattacccctcccataaggcatccagggtgggtctccggaacattgaagcccctgcacctctcggagggcagaacaccccaggcaagggagaacacgacacgggtccctacacaccacagttccctgtaaaaccgcatgggccaagaccaaccccttccccgggttcgttgcacacagagccacagcaagaaatttgcgcctcacaaggttatcaacccacacaccaatatgtggcccggccccacctgtggtcatgtgtgcccaaagcacaaattgttcaccaaatttccaccatctaggcctcaacaaattggctggtaagcggattaaacacaggccaataacttccgggcaaatgttcctcctgcatggtggtttgcctcggaaccaagatttccccg

SEQ ID NO: 641015 - DNA, 696 bp, Homo sapiens
  misc_feature (15)..(15): n is a, c, g, or t
  misc_feature (212)..(212): n is a, c, g, or t
aaattaataaggtanataatttctgaaaaatatacaacttaacatgaaaatctatattatcgcataaatacaggccagattttggcctaagtgatacatacaaagtgttacactttttttaaaggcatcacgcttttctttttatctaggctattaatgtatcttgtcctttttacctacattatctgatagtgagctggtttattagcagntacagctccgcaacaattactttatattgtattacacactaaccatgcctctcactttaaaatagtatggagcatatgtttctactttgaccatcaaggcatagaaataatactaccaagggtgcatccatttagtataaaatattatagatgcatagacttatgcgttaaggccctcgccagaaaagaattgttggatttcgtaagtgacgagcctggacatcttaaaaattacctgttaatgaaataaagccgtgatagctcgctgcaccaatgtattgatgttcgaattacgtggtccactttttgaccttcataaagtcaaaagagtcaccactctctaagaatttgagaccgcttaatcaatactttgtttaaatgtgcaagacattgaatgttttcctgaaaatgttgttcttgcccaattaataccattttttaccagtgttcgcgaactaaaagtatacttagcccaaaataacct

SEQ ID NO: 641016 - DNA, 301 bp, Homo sapiens
gtcgattcagacatatgaagcatacatatccaatcatcaggtgaccttgacaacgctgtagctttcattttcttctatgcaaccttatgaaaacccagcaggggtggcaggtcacacacggggccatatgtggatagacggacattgctgtctatccccccgaccgtgtgtgtgtgtgtgtgtgtgtgtgttgcgtgtgtgtgtgtacagcgtgtgtttatactatccctgtgtgacgggacacgtgtgtaccactactactgtacgcgacttgtacacccagaccggaaacacgacactg

SEQ ID NO: 641017 - DNA, 224 bp, Homo sapiens
aggacccggaagtgtgtggtgttatggttggcttcaatcagatcagtaattcctagagttaaaatcggagccaacgaatatcatcatttgtgtcatgccatacttttcaaaatacgaaaatacaggcatgtgactgaggcacagcaggcaacacaagagagctaaagccctcaatttgcccaaagctgtctggaacaagtactcatgcataacaccacacaatt

SEQ ID NO: 641018 - DNA, 326 bp, Homo sapiens
gacggaacacacttcccgacagcccctatcgtggtgcctgtggcttctccgtctggcgacgcccgccgcctcactgtttctagccttcaagagtcagggcaaaaggtcaaccagccatccccttttgcatgtcagcccgaccggggcccatcggggcaatcgatgccaacgtgctccgcccctcaggagccctggaggagtgctatgtcacagtaattgaccgacatacgtatgctgtgcgcttcatccctcgggatactggcgttcacctcatttacgtctagttcaacggcacccacctcccttgaagcccctccaagatccga

SEQ ID NO: 641019 - DNA, 323 bp, Homo sapiens
tgttttgccaccaagtttggttttttaaaaaagaagtctgggccgggcacggtggctcacgtctgtaatcccaaccaatttgggaggccgaggtgggtggatcacctgaggtaaggagttcgagaccagcttgaccaatatgggaaaccccgtctctactaaaaatacaaaaatttgccgggtgtgttagcaggcgcctgtagtcccaactactcaggaggctgagacagaagaatcacttgaacccgggaaggagaaagttgcagtgagccgagactgagtcactgcactccatcctgggtaaaagcagtgagtccgtctca

SEQ ID NO: 641020 - DNA, 796 bp, Homo sapiens
tgtactgaggctggtttaattggcacggaggggacccggctgcgttggttgtgctgggcgctgttgccttgttggtgcgcctttgcctggaggctgggaggccgcccccagccgctgctacccacgcatgagcctgggctggcttctgctggtggtgctgtgctgggcgtgcccgagccccgtggctgcagctcgtaaggggagccctgctggcgtcgctcgtgtgatgcttgctgtgctgcttggccctggtggggatgccctgtgggcttgtaccacacggctgcggtgttgcacctgcgcgcccagtgacctccatctgcatgatgcgctcatgcctgcgcatgctctccctgtccatgcctgccttgcagcttgaccctgtaccagtacaagacgtgtcccttctgcagcaaaggtccgagccttcctcgacttccattgccctgcactaccaggtggtggaggtgaaccctgtgcgcagggcttgaagatcaagttctcctcctacagacggtgcccatcttgcttgcccaggaagggagaaggctcgccaacaactacatgaatcctcctgtcgatcgatcagcgcctcaagacctacctggtgtcggggacggcacgctgcgaacgcatccctcacctactacccagcccatgagggctgtgcacgagccgcgccagcgagtgaccgagcttcggccctaggttctggctcatctcacggacacgagcccagccagtttgctgccgcgcccgagccggcatcctgccccttcgccaccctgtctccctc

SEQ ID NO: 641021 - DNA, 746 bp, Homo sapiens
ggccccaggagcccgttgggtacggcactcccgttcgtgccggtgcgtgcgccggcttgtggctgtgggatgaccagcggcggcctcctgggctcctttctcgcttcctgctgctagttctgctgcgtggtgacgcgtcagcacctgtgtcaattgcctgcctctcatcacgcgtgcgagcactctttctgttcgaactgcgctgtcttcagctttgagcctggttccttctcttgcacggccctgcacgtgctcaagccccgggaccgcatatcgtgccatcgcccaccgttgcggcagccacgacgcgcccgattaacactgctggacggtcacttcgcgcatagcatctaagcaagtggagcaaacacggcgtggatgtataggacattgatcttttacttctgacgcggacttccttgtcgttagattgcaactgataacgactaggtaggataggagacggacgtgactcggcgaccttgagacgagttggtgttcacttatgacgagtattgacacacaccgtttaccgaaagccatgaatccctgtaggcgcatagcgacggatagatcgaggaaatcgagtgttccccgtgattgaccaacgaatcccataggccatagacgggaaaagcttgtttgctgcaggtagcactagagcacatatggtctcagcaactccttcttgtgatcgttcaaagtgccattgcaccacggagggtacatgacggctctaaagagcc

SEQ ID NO: 641022 - DNA, 764 bp, Homo sapiens
agagagggggttagagagagagagagcgagacagacctatgggatctgagccggagtggatattcgcatgggatggaggctaccttggagcagcacttggaagactcaatgaagaaatcctccattggtgtagtactgtgcacagattcacaaggacttaatctgtgttgccgaggtaccctgacagatgagcatgctgtagtgatatctggtctagctcattaagcatctaagctaacctctgaccacactgatattcctgtcgtgtgcctataatcagataatgggaacattaatgatccagaaacacgatgtcatcacggtggcagatgacaaattggccttttgatgctcatatcttgttttcatgaggctgtcatagtaactggatcctacctaggctaattaccttatataactactaaagtttcagtaagtaggccaatgcatttaatgtgcattaggcacttttctgtttatttaagagtcaaattgttttctaatgctctatggaccgactatcacgatattactaagataggatcatgttttgaagcagctggtccacgtcaccttgtatatagaactctggctgcattaaatgaatcttgtttgtacactaaaaatcacttgtcttctcttccatgttgccgggttttcccatctatttcttaatcaactttatgataccggcctattttggctccattggccatctagccttaggggatgttttaatacatggccttctttcgttcctgtgt

SEQ ID NO: 641023 - DNA, 490 bp, Homo sapiens
ggatccctccgctctggtggaggaatgacagctgccgccgcgcaccgcagcgacccccgccgcagagtcccaccgccacatggcctcgggccagcggccagtgagctgcctcccccagggggggggggaacgagcggccgacgagcggggagagcggaggagagaccccggagcgctgcgcggacgcggcaggaagaggtgaggaggaaaggatgtggtgatgtagaggtcgcgggagagaggatggaggggagagagcgacagggaaggagaacaagtgacggtgtagaggtggactctagagaatatatgataacaagaagtacagaacagtgtgggagggatggagaacagatagaagggacggaagaagatacacaagacatggaggggagcgagtggatacggaacatcgtccgtgattagtgcaggcatagtaaaagaggacggcatcttgagactattgagacatagggagggaagcggagtt

SEQ ID NO: 641024 - DNA, 1645 bp, Homo sapiens
atttgctttctctttttcctttcttccggatgagaggctaagccataatagaaagaatggagaattattgattgaccgtctttattctgtgggctctgattctccaatgggaataccaagggatggttttccatactggaacccaaaggtaaagacactcaaggacagacatttttggcagagcatagatgaaaatggcaagttccctggctttccttctgctcaactttcatgtctccctcctcttggtccagctgctcactccttgctcagctcagttttctgtgcttggaccctctgggcccatcctggccatggtgggtgaagacgctgatctgccctgtcacctgttcccgaccatgagtgcagagaccatggagctgaagtgggtaagttccagcctaaggcaggtggtgaacgtgtatgcagatggaaaggaagtggaagacaggcagagtgcaccgtatcgagggagaacttcgattctgcgggatggcatcactgcagggaaggctgctctccgaatacacaacgtcacagcctctgacagtggaaagtacttgtgttatttccaagatggtgacttctatgaaaaagccctggtggagctgaaggttgcagcactgggttctaatcttcacgtcgaagtgaagggttatgaggatggagggatccatctggagtgcaggtccaccggctggtacccccaaccccaaatacagtggagcaacgccaagggagagaacatcccagctgtggaagcacctgtggttgcagatggagtgggcctatatgaagtagcagcatctgtgatcatgagaggcggctccggggagggtgtatcctgcatcatcagaaattccctcctcggcctggaaaagacagccagcatttccatcgcagaccccttcttcaggagcgcccagccctggatcgcagccctggcagggaccctgcctatcttgctgctgcttctcgccggagccagttacttcttgtggagacaacagaaggaaataactgctctgtccagtgagatagaaagtgagcaagagatgaaagaaatgggatatgctgcaacagagcgggaaataagcctaagagagagcctccaggaggaactcaagaggaaaaaatccagtacttgactcgtggagaggagtcttcgtccgataccaataagtcagcctgatgctctaatggaaaaatggccctcttcaagcctggtgaggaaatgcttcagatgaggctccaccttgttaaataaattggatgtatggaaaaatagactgcagaaaaggggaactcatttagctcacgagtggtcgagtgaagattgaaaattaacctctgagggccagcacagcagctcatgcctgtaatcctagcactttggaaggctgaggagggcggatcacaaggtcaggagatcaagaccatcctggctaacacggtgaaaccccgtctctactaaaaatacaaaaaataaaaaattagccgggcatggtgacgggcacctgtagtcccagctactcgggaggctgaggcaggagaatggcatgaacccggaaggcagagcttgcagtgagccgagatcacgccactgcactccagcctgggagacagagcgagactctgtctcaag

SEQ ID NO: 641025 - DNA, 691 bp, Homo sapiens
atttgctttctctttttcctttcttccggatgagaggctaagccataatagaaagaatggagaattattgattgaccgtctttattctgtgggctctgattctccaatgggaataccaagggatggttttccatactggaacccaaaggtaaagacactcaaggacagacatttttggcagagcatagatgaaaatggcaagttccctggctttccttctgctcaactttcatgtctccctcctcttggtccagctgctcactccttgctcagctcagttttctgtgcttggaccctctgggcccatcctggccatggtgggtgaagacgctgatctgccctgtcacctgttcccgaccatgagtgcagagaccatggagctgaagtgggtaagttccagcctaaggcaggtggtgaacgtgtatgcagatggaaaggaagtggaagacaggcagagtgcaccgtatcgagggagaacttcgattctgcgggatggcatcactgcagggaaggctgctctccgaatacacaacgtcacagcctctgacagtggaaagtacttgtgttatttccaaatgtaattctttaaacccgtggagctaaagttgcacacttggttttaattttacatcaaagggggtttaagatgaaggatcaacctgagtgaagtccaccgtggtgcccccaccct

SEQ ID NO: 641026 - DNA, 289 bp, Homo sapiens
ccaatgatggcactgagcctggctagttttgtttttttgtatgtgacatttttagtgtaagcacatacacacacgcatgcatgcacgtacattcatactatcccccttctttgtttctttgtacgtattatatgtgcactttttccacctaacactgtcttgtggagatcaccggatggctagcctcctatttagataacctgcctgggaggcaggctggggtgccctgcagctgctttcagagtttgctgatcagagtctgaaactgcaggctatgcatgggtaacag

SEQ ID NO: 641027 - DNA, 1132 bp, Homo sapiens
tgctgcagctgtgaggccaacaagaaagatcgagaagcagcatgcatgaagtgacacatgcatgtgtctacctggtgccacgcacctgccatgctgctgctggtgtgctggagaatctggtaaaagcaccattgtgaagcagatgagtgatcctgcatgttaatgtgtgtttaatggagagtggcggcgaagaggaccctgcaggctgcaatggagcaacagcgatggtgagaatggcaaccaaatgtgcagtgacatcaaaaacaacctgaaagaggcgatttgaaaccattgtggcctgcatgagcaacctggtgcccacaccgtggagctggccaaaccccagagaaccagttcagagtggactacatccatgagtgtgatgaaatgtgccttgactattgacttccctcccgaattctatgagcatgccaaggctctgatgggaggatgaatggagtgcgtgcctgctacgaacgctccaacgagtaccagctgattgactgtgaccaggtaccttcctggacaagatcgacgatgatcaagcaggctgactaatgttccgaggcgatacaaggacctgccatcagactgacctgtgtacttgagtatctggaaatactaagaggaccaagtaccacggtggacacacagtcaacttccacatgtatgacagtgggtggacaagcgcgactgaacgccgccacagaggactccggtgcaatcacgaaatgtactgcgaacatcatcaagtgaggcaacaggaaatacaccaaggaaccacaggtagagcaaaccagaacaatgcgccagcaggagacacgaaatcttaagcacgaaatggcaacaacagaggcaggaacagaaatgggcaatgagcctaaagagcaaacggaagcgaaaaagcagcagagagtacacagataggcgaaaagtagagaaagagcaaccataaagaggacgtacagaaccggccgcaaaagagagagaaagagaagacgagaagacgagaacgagagaggacaaggaaggagggaaagaagggctaaggcgaacacgcagccgagtgcagagaaacgaatagagtagaaaataagagaatataaaaagcgccacgagaaagtagcgaaaa

SEQ ID NO: 641028 - DNA, 130 bp, Homo sapiens
aagtctgagaaggtgaagggggggctgcactgagccacaggaacaatgatggagattcagctaagcccagaccccgtggattctagaagtagattttagaggcagcagacagaattactgaggaattgag

SEQ ID NO: 641029 - DNA, 775 bp, Homo sapiens
  misc_feature (14)..(14): n is a, c, g, or t
  misc_feature (100)..(100): n is a, c, g, or t
  misc_feature (103)..(103): n is a, c, g, or t
  misc_feature (148)..(148): n is a, c, g, or t
  misc_feature (160)..(160): n is a, c, g, or t
  misc_feature (163)..(163): n is a, c, g, or t
  misc_feature (170)..(170): n is a, c, g, or t
  misc_feature (177)..(177): n is a, c, g, or t
  misc_feature (186)..(186): n is a, c, g, or t
  misc_feature (188)..(188): n is a, c, g, or t
  misc_feature (200)..(200): n is a, c, g, or t
  misc_feature (209)..(209): n is a, c, g, or t
  misc_feature (211)..(211): n is a, c, g, or t
  misc_feature (214)..(215): n is a, c, g, or t
  misc_feature (217)..(217): n is a, c, g, or t
  misc_feature (235)..(235): n is a, c, g, or t
  misc_feature (253)..(253): n is a, c, g, or t
  misc_feature (257)..(257): n is a, c, g, or t
  misc_feature (263)..(263): n is a, c, g, or t
  misc_feature (267)..(267): n is a, c, g, or t
  misc_feature (279)..(280): n is a, c, g, or t
  misc_feature (282)..(282): n is a, c, g, or t
  misc_feature (284)..(285): n is a, c, g, or t
  misc_feature (319)..(319): n is a, c, g, or t
  misc_feature (322)..(322): n is a, c, g, or t
  misc_feature (325)..(325): n is a, c, g, or t
  misc_feature (330)..(330): n is a, c, g, or t
  misc_feature (333)..(333): n is a, c, g, or t
  misc_feature (335)..(335): n is a, c, g, or t
  misc_feature (338)..(338): n is a, c, g, or t
  misc_feature (341)..(341): n is a, c, g, or t
  misc_feature (346)..(346): n is a, c, g, or t
  misc_feature (353)..(353): n is a, c, g, or t
  misc_feature (368)..(368): n is a, c, g, or t
  misc_feature (383)..(383): n is a, c, g, or t
  misc_feature (388)..(388): n is a, c, g, or t
  misc_feature (393)..(393): n is a, c, g, or t
  misc_feature (396)..(396): n is a, c, g, or t
  misc_feature (402)..(402): n is a, c, g, or t
  misc_feature (411)..(411): n is a, c, g, or t
  misc_feature (416)..(416): n is a, c, g, or t
  misc_feature (418)..(418): n is a, c, g, or t
  misc_feature (428)..(428): n is a, c, g, or t
  misc_feature (433)..(433): n is a, c, g, or t
  misc_feature (438)..(438): n is a, c, g, or t
  misc_feature (489)..(489): n is a, c, g, or t
  misc_feature (506)..(506): n is a, c, g, or t
  misc_feature (547)..(547): n is a, c, g, or t
  misc_feature (553)..(553): n is a, c, g, or t
  misc_feature (559)..(559): n is a, c, g, or t
  misc_feature (565)..(565): n is a, c, g, or t
  misc_feature (675)..(675): n is a, c, g, or t
  misc_feature (769)..(769): n is a, c, g, or t
tggggggggatagngaagcaactcatttattctgaaaacaagaaaataaggggaaagaaacaaagtattttattctaactttcctatacaaattgtaccnccncatataaaataactgaggagcaaaaacaaatttttcagaattccngcaataaatgcnganggggggnggggggngggggcccncncctgtaatcccngccctttgngnggnngnggggggggggtcacttgngcccaggggtttgagacnagcntgggcnacanagggaaaccccnncncnncaacaaatacaaaaaaattatctgggcatggggntgngcncctgnggngntgngcncctgngatcccngccacttagggggcnggggggggggggtcncttgngcccnggngagggnagttgcagngagcngngatcatgccnctgcnttccngcctgggggacagagtgagactctgtctcaaaaaaaataagtacagaaggnataatatccccattacncagcccttaaacaacgggtttgggggataatcatcaatacnaccccnaaaccnttaggngaaaagctgacagggaactttataatggaaagttccgactagcaacatagcacatgtacagaagaagagaggatatcctacctgcttgaaaattcttttctttacagggnggaaaggtcaattagaaatacaaagggaagaagaaattcaccagtttacaccataactactcttttacattaaccactgttgtagatgaaagtntgcagt

SEQ ID NO: 641030 - DNA, 586 bp, Homo sapiens
  misc_feature (492)..(492): n is a, c, g, or t
tcaggcgactgtacactggctttatcttctcagctgccctgaaggtgatttcatttgagccagccccacactgagggttccgttactcaaacaagtttgcagaagcagcccaggagtcttgggctggctcaaatgagccccttgttttcatttccttatcaaccatcttgtgtacagtaggtgcatcaaggtcccaaaggccaaagcgtcccaaataatgctagactcattgcttaccatggaccaaagggaacataaaaggaaactgttaaaaataagctttgggaatgtttttaggaaaaggatatattttggctttagctagaagtttagtatttgctatggagataagatatgccagactttcactcagtaaacactgactgagcactaattaagaactgtgagatatgcaggcacgacagacatggcttctgctctggggcacccagcctggcacatggatgaatgaccatgactggcttaactgangacgtgacaggggtctgtacacatcctttggaaccctggggctttgcaggagctctgcggaataacggatattggtgaagactgtctttagttg

SEQ ID NO: 641031 - DNA, 122 bp, Homo sapiens
cacgaggtggaacgccacagggcactagagctactggcatcccggtagacgctcaaggtgcgaccctcgaagtctaaaccaacactgcgggtcgatgaagctcaactgttcaatacaacaca

SEQ ID NO: 641032 - DNA, 84 bp, Homo sapiens
  misc_feature (52)..(52): n is a, c, g, or t
  misc_feature (76)..(76): n is a, c, g, or t
gtttttttttgttttgctaccatttatttgctgtatggtatgtactcaaggnatgagtcagggcttctgtactacnctctgatc

SEQ ID NO: 641033 - DNA, 823 bp, Homo sapiens
ccattctggatcagtggctttcagaagcctggtgggagaagtgaggtattcctaaaagattggcaaggacagggtctccttgaccccttgccacaactgggaacacacttgaaagggggaccccaggccagctgttaacagcggcgttcactgggagccacccactggcgttctcccacaagcccgtgatgcgctgacattcccttagcaccagttgtcccacactcgcagggtcctgaccaggtcagagatgtccccggccattgcagagccaggaagccatcaagcggggccgtggaggtgctcccgtggctccagacccgtgccaggggacaggttttctcccgtggaatacttctgaggcccacgcgcagaactctgtagccagttcagaggaggaggaaaagggagcccccttcagcagaacggggtgccagtatcgcgcctcagaagctggcaccaccgtggggcttccaacgcccagaaatagtgccgtgacagggccctataaggctttccaggggcccggggcccgcgtgggagagaccaccccatacccttcaccaccgcacacacaattaaacacaaagcttgggcctctgggattcccgagtctctatgtggattgggcccccaatctcagggggaccccttaggatggtcatccacgtacacttaccaaaaggcatcccccaacaggggccaacccgtgggggcaaaagggtcagtggtctaggaggcccccccaaacattgcccagggcaccattgcgcccacacagcccgggtggtgacccaaatggacacacaccctgggactccca

SEQ ID NO: 641034 - DNA, 188 bp, Homo sapiens
atcatccaggatcttatctacttgcgaaaaatcacagtggcactgctaacatcattgcagcacctttactccttcggctgtgatccaatctccagctcactttttgccagcaactaacattgtgctttgcagtccccctgactttcttcattctgttcttgcgtacctttcgttggggtaccgagctc

SEQ ID NO: 641035 - DNA, 102 bp, Homo sapiens
  misc_feature (1)..(1): n is a, c, g, or t
ngttttagtttccatgttccatccacagccagtgttcattctcccaggcagcacatcatcagcagcagctccaacgggccacatctccagggtgccatttca

SEQ ID NO: 641036 - DNA, 158 bp, Homo sapiens
tcaagcttctaacgatgcacggggacatggtggtacatacctgttagtcttagctactcgggaggctgaggcaggaggactgattgatcccaggagttcaaggctgcagtaagctgtgcctgggtgacagagcaagaccctgtctctcaagaaaaaaa

SEQ ID NO: 641037 - DNA, 367 bp, Homo sapiens
agcggatcccttacccgtacgcccaaaaaagatgggtaataggaatttttttttaaagacagatttttgttctgtcactgcaggctggagtgcagtggcatgatcatagctcactgtaacctcgaacttctgggctcaagggagcctcctgcctcagcctcctgaatagccgggactgcaggcatgtgccactatgccctgctattttttttttaattttggtagagacgaggtcttgctatgttgcctcaaactagaggctaatcttgaactcctgacctcaagtgatctgcccatcttggtctcccaaagtgttggggttacaggcgtgagcccctgcgttggggcgtacggggagggtaccgag

SEQ ID NO: 641038 - DNA, 102 bp, Homo sapiens
taggtttggtctagaggtgtagcctagagaataggggaaatcagtagaatgaagcctcctataatggacaactacagctcctattgatcaggaccatagtag

SEQ ID NO: 641039 - DNA, 159 bp, Homo sapiens
cctcataggcacaagtcatagtcgtctcccaggaccctggctagcccctgcagaagctcccgacttcctcttcttggagcgaagccggaacttctgccaccagccctttagcttcgggatgaggacctcctgcatgtggttgatgacctgcttgccaag

SEQ ID NO: 641040 - DNA, 126 bp, Homo sapiens
ttactatacaattcagctcggtaccctcgaatagacagcacagcaaaaatgggactcagagtggatcaaacatgatttagagcttgtttatggaaaagtgcttatttctgcatttcaatgtttcaa

SEQ ID NO: 641041 - DNA, 114 bp, Homo sapiens
ctgtggcggagctgaggacgagaatagtctgcacctgggaggtggaagttgcaatgcagccaagatcacctcattacactccagcctgagcgacagagcgagaccgtctcaaac

SEQ ID NO: 641042 - DNA, 238 bp, Homo sapiens
ccttggccataatatgatttatctccacactagcagagaccaaccgaacccccttcgaccttgccgaaggggagtccgactagtctcaggcttcaacatcggaatacgccgcagcccctttcgccctattttttattagccgagtacacaaacattttttttattaacaccctcaccactacaattttcctagggacaaccatatggcggggctcttcccctgaacctctaccaaaac

SEQ ID NO: 641043 - DNA, 390 bp, Homo sapiens
agcggggaacatcacttcagttcggctcacaggaagccacatccataggaaacggaggagcatactacatcaatgggaacaccccgtgggacaaaagaatctgaacaacagtcttcacccctagaccttccctctgacagagcctacccaaatgagaaggaaccagaaaaccaaccctggtaatatgacaaaacaaggctcttcaacacccccccaaaatttctctagttcaccagcaatagatccaaaccaagaagaaatccctgatttacctgacaaagaattcaggaggttagatattaagctaatcagggagggaccagagaaaggtgaagcccagtgcaaggaaatccaaaaaatgatataagaagtgacgggagacatattcaa

SEQ ID NO: 641044 - DNA, 404 bp, Homo sapiens
ccccgggttgggttttgttggcccattaccggtcttttgctccccaattcccccgggcttagcaatccttccccccttttggttggggttccgcttccccccccccttggttaaaatttttttttttttgggcgggttttttttttttccccgggttgttttcgggtttttgggtccggttgtcccccttcccttggttcccaaggccccggcccagtttttggttttttcccttccctttttgccccccagggggttttttcccttttatggaatggcctttctaaaatgggtttttttgtgggccaatttttttagcttggaaatttaaattccccctggaatttttttttttgccggttcccttgaatttttttccccttaagggttgtttttgggttcca

SEQ ID NO: 641045 - DNA, 257 bp, Homo sapiens
ccaggttcaagcaattatcttgcttcagcctcccgagtagctgggactacaggtgagcatcatcatgcccggctggtctcgaactcctgacctcaagtgatttgcctgacttggcctcccaaaatcctgggcttataggcgtaagccactgtgtctggccagaataccaggatttttgatggtacacttgaagaaacgaaaagatccaaaacaataccagaaaagtcatcaatactactcactttcctagattcact

SEQ ID NO: 641046 - DNA, 108 bp, Homo sapiens
ggaatcgtggtgctgctgggacttcgtggtgctgctgttacggctcatcttcatgattgcctgcgcttcttattgcccccacagcggaatcttctgctgaggaggatg

SEQ ID NO: 641047 - DNA, 344 bp, Homo sapiens
tggcgactctgcacagcgacacctttatgtaccacgtctggagtaagtccctgctgatgtacggatgtagtccgcgcaatttcttccttctggtgcgtacgtggtctcgctggctcaggagtgaagctgcagaccttcacagtgagtgtaacagctcttaaggcagcgcgtccggagttgttcgttcctcccggtgggctacgtggtctcactggcttcaggagtgaagctgcagaccttcgtggtagagtgtcacagctcataaaagcagcgtgcacccaaagagtgagcagtagcaagatttattgcaaagagcgaaagaacaaagcttccacagtgtgaaa

SEQ ID NO: 641048 - DNA, 455 bp, Homo sapiens
ctatctccagccatctataattcagatcagttcaatagctatagttatgtatactctatttcctcctgtatttggaacacacgcaggtgtgtacctatctccagccatctataattcagatcagttcaataactacagttatgtacgctactttctcacttcatgtattataagtatttctaaaatctcctgtaatcccagcactttgggaggccgaggcgggcggatcatgaggtcaggagatcgagaccatcctggctaacacggtgaaaccacgtctctactaaaaatacaaaaattagccgggcgtggtggcaggcgcctgtagtcccagctacccgggaggctgaggcagaagaatggcgtgaacccgggaggcggtgcttgcagtgagctgagatcgcacccctgcactccagcctgggcgacagagtgagaccctgtcttggggaaaa

SEQ ID NO: 641049 - DNA, 900 bp, Homo sapiens
  misc_feature (11)..(11): n is a, c, g, or t
  misc_feature (58)..(58): n is a, c, g, or t
  misc_feature (66)..(66): n is a, c, g, or t
  misc_feature (152)..(153): n is a, c, g, or t
  misc_feature (176)..(176): n is a, c, g, or t
  misc_feature (178)..(178): n is a, c, g, or t
  misc_feature (187)..(187): n is a, c, g, or t
  misc_feature (206)..(206): n is a, c, g, or t
  misc_feature (274)..(274): n is a, c, g, or t
  misc_feature (299)..(299): n is a, c, g, or t
  misc_feature (301)..(302): n is a, c, g, or t
  misc_feature (514)..(514): n is a, c, g, or t
  misc_feature (535)..(535): n is a, c, g, or t
gcggcgcccangtcctaattcgggaaacgtgcaccttgactaattcggttttctgtgngctacgangagcaggcttggctgggcggaggcgccagcggatgtctcatgcaaggatcgtctctgtggctaagcctcactttccgctccgcccnngtgtgctctctagagcccggttntntcgagtgtncagtctccatgggctgccngaatacagcatgcgatggagaacggcaccggtgccctacggagaagaacgtccactgtgaagtccagnagacgacagtcaccgagggggctgncnnaatcgcctttcccagtgccaacgaggtcttttataacccggtgcaggaattcaatcgggacctgacatgtgctgtgatcaccgagtttgctcgcattcagcttggggccaaaggaatccagatcaaggttccaggagagaaggacacgcaaaaagtggtcgtggacttgtcagagcaagaggaggacaaggttgaactgaaagagagtgaanacctggcctcaggagaccaanctcgcacagcggccgtgggggagatctgtgaggaaggcctgcattgttgctggaaggcctggcagcttcaggcctacgtttccattcgatttgccctagaggtgcctgggctcagatctgtggttgcaaacgatgcctccacccgggctgtggaatctcatacgccgggaatgtccagctcaatgactgttggccactggtacagccgagccaagcagattgcccggattgctgatgtaccagcaccagaggggtgtcggagaaggtttgacgtcatcgatctggacccctatggcaagcccagcacctttcctgtgatgcagtggtgcaggctgttagtgaatgacagggtgctgtgtgttacc

SEQ ID NO: 641050 - DNA, 681 bp, Homo sapiens
ggatcactggagctcaggaattcaaggccagcttgggcaacatggcaaaacctggtctctacaaaaaatacaaaaattagctgggcatgggggcatgcacctgtagtcccagctactcaggaggctgaggtagaagaatctcttgagcctgggagactgaggctgcagtgagccatgatcaggccactgcactccagcctgggtaacagagtgagatcctgtctctaaacaaataaattccaacaaaagtatcattaggtcccacttttcaattccccggatccggtggcaatggctcgagggcttcatcataattatttcccagaagtcctttccaagaagacacaagtatatggatcagaaataagaatcctctcatgagtggtaaccactggcaaaagtcaaaaccaaatgggctaaaatgagtaaccaaattgggtttactctttcagacgacacaacaactgcaatattctcaaaatgtccacgggtagcccattgcccgtacatcagtaaaaaactttagaatagtacgttaatcacgctactaaaccggttacccaaatcaaacgcaccagtaagattcctggggtatggtgtacaaacaacaggattgcgaacagtaacttcctaaaggatcatctacttagattcaaggattggcaggattaattctaacag

SEQ ID NO: 641051 - DNA, 167 bp, Homo sapiens
  misc_feature (34)..(34): n is a, c, g, or t
  misc_feature (42)..(42): n is a, c, g, or t
  misc_feature (49)..(49): n is a, c, g, or t
  misc_feature (51)..(52): n is a, c, g, or t
  misc_feature (64)..(64): n is a, c, g, or t
  misc_feature (71)..(71): n is a, c, g, or t
  misc_feature (103)..(103): n is a, c, g, or t
taagctccactgctggcctcaagtgatctcctgnctcagccncctgagnanntgggattacagngccaccnccacaccgggctcaattatcattgtttacttngtagtttgtttaccgtttgaggtctctcttttccatgagggcagggaccttgggcgtacgggga

SEQ ID NO: 641052 - DNA, 560 bp, Homo sapiens
tcagcaggtaagccttgttgtgatcttggctcactgcgacctccaccttccagttttaagtttttttgacccggggggggaaaaatttgttttaaaaaaaaagtgccccaccaaagaggggtgagtgcttgtataaatgcaaaaaaagcgcctctacgtcttgggcctgctgacctggggacacctcccctttggaaaccttcaggccaaaacctcccacaaagatataaagtcgttactttgggaagaaaatcctttctttaagaaacggccgtgtaaacctccaaagcttcctccttggtggggggggccacctgagctacacaggggaattccctggccccaaaaaaaacaggggggggggcccaaaacttaaaaatcccctttttggccgggtggggggaaaaaacctgttaccccctttttttggagcccccggccaaaattattttacccccttttttaaaaatcccgccgtgcgaatatgggccaccccctctcccacaaaaggggaacccggggatccccccccctttttcttttagccaaaaacaaatttt

SEQ ID NO: 641053 - DNA, 296 bp, Homo sapiens
agagtcccagaagcgtgtatcggcttcctggaagaagagggccaatcagtgtgtgatggcctcctgtaggtaagagtggcccagcattctgtgagggcttcctggaggaatagggcccaataaagtttgacggcttcctggaggaagaggatgttcatgagctacgattcacagcagggactgtgcaggaaatcttgtaaacttgaatctcaattctctgacctaaattaagcagaatgcaccatcatccaccggtgacacctgagcgtgtaatgggcctctgctgggtaccgagc

SEQ ID NO: 641054 - DNA, 447 bp, Homo sapiens
  misc_feature (435)..(435): n is a, c, g, or t
ggccgcgatatccacacacgagaaccaacctttattttattgagaggtaccccctcttcctcctatactcgagcgggcggaatttaaccaaacgggcctgtccgcctataaatcagatatattaatattacggaacacatactgttgtctcgcttaacctgggcatgtcgatgcccaggcgcagcgatgcataaccggaaacacaacatcacattttgatagatacttactgcaaactgggtagaaaaacctttcaggggagaaccctatcctccttttttacacggaactggattcccgtcttttggactaagtcaagcccccagcatggaaggatgaaattgtctgggagagacaagggacttcggccaaaaaggatttttttcgagcccgtcaaaatgagaggttcttatctaaagggatactcataggatngaaggcacaacg

SEQ ID NO: 641055 - DNA, 352 bp, Homo sapiens
gctcgactttattatttttttttttgagatggagtctcgctctgttgcccaggctggagtgcagtggcgcgatcttggctcactgcaaactccgcctcccgggttcacgccattctcctgcctcagcctcccgagtagctgggaccacaggtgcccaccaccacgcccgcctaattttgtttttttttgtatttttagtagagacggggtttcaccgtgttagccaggatggtctcgatctcctgaccttgtgatccgcctgcctctgcctcccaaagtgctgggattgcaggcgtgacgaccgcgctcggcccttcaaagttttattaatatattttctaaaaagtcgacg

SEQ ID NO: 641056 - DNA, 283 bp, Homo sapiens
taaattccccccccctcccttaaaggaaatgggccttcccgaaaatagatggggttatagtttttaaccaatttttatttaaccccatgattgctgaaaacccgggaggcctttgttataaaggataacccctcgtttcccggatgttttagttggccggttcaaccctaaatggggaaaaacaaattccccgttaatttttaaaacagtgaaaaatttcctgccctttggggggccttttttaagggccttttttatccccaaaaaaattttttttctttta

SEQ ID NO: 641057 - DNA, 363 bp, Homo sapiens
taatttttactaggtctctgcttccgtacctgtagaggtcaatattgttaagatacaaaatacatggtaccaaggcatactagaaaaactttaaaaattggttatttggatttggcctacccacttgattgttatctgtaaacgatgttgatatgatttggaatttgactatgcattcaaaacaatgtttttgtcaaatgggttgggtcattctagagaaagaaagaaaaaaaacagacattaacaattagtcatgaggctggtctggaaatcctgggctcaagtgatcctcccaccctggcttcccaaagcccaaagtgctgggattacaggcgtgagaaaagcatttacatttaaaaaaaa

SEQ ID NO: 641058 - DNA, 206 bp, Homo sapiens
  misc_feature (78)..(78): n is a, c, g, or t
cagaatcagacaggtatgagctagtcacagcaagtctttgttggattcgagtagctcaggatctgctgaaggtcgganagttagtccccgcatcacgagcctgtcttcactgaagcccttagtgatatttagacactcagccgagaatgagaatgcattcttcagattctctatatgccgaacatggaacccatccacgccagtcc

SEQ ID NO: 641059 - DNA, 665 bp, Homo sapiens
tatttttcccaggtatttatttacctgggttgacaagttcatcttcaggcaagtagggaaggtgttccttggtagaaacaagtgttggctaaagcaaggtgaataacgccaatacacaatggtgggcagagatcccagcctcacagaaggggccagggaagctctcagttaaattcactgagatcttattgatggggaggatggaagccacctcagcttccctgccaggccagcaggaaagcaatctacctcccaggcacactcttgacccagagttctggctattcagaccagacaggcacctattttcatctgcagaaatgttgatgttccaagtagagaggaattgtgaccctatctcccatgcaagcctgaacctgaagagtgctcctcctgtgtgaatgcagtcaccttaaagtgttccagaaaggctgtctatatgtgcacccatcctgagtgcccatgggagaaccctcagctatgtctgcagtggtggatgggggaaaaataagtccccttctccaagattcttcaggagtaccaggactgcctgactgttggagtagagctgcagactttccccactgagcccagcactacactgtgcctctgctgaaaggaacttcccaccaatggaaagatttaggactcaaggccttccatcc

SEQ ID NO: 641060 - DNA, 586 bp, Homo sapiens
atgcaaagaattcacacctgtgtcccactgtgaatctaggggcctttcatgtagaggaaccacaccaggagttctaggctgtgacctgcaggcaagtgagtggcccaaggcagaatggaagtcagtgtcaagcagaagacttgagggaaaggcatgagacaaaccttgcctcccatcccacttcttcaaatatactcaagaaaagtaacccttaaaatggaggaaaatgctgacacctggattttatatacattatctcacttaacacaaaaacctcaagagtaggcattagccccattttacaaataaggaaatgatggcttaaagaggctaatttgcccaacattatataccagtaagtgaccatgccgagatctcaacctgtatctgtgggtctgacctgatcacatctcccactttttcctatggaaatggaggtggctgtagacattggcagtcacggcagtccatatgctgcctgtcgatagctgggacgtttgttattctctattctacggaactttgtattgtttagtgctttcaagcgtatattgcttttgtattccacagaaataataaagatatc

SEQ ID NO: 641061 - DNA, 113 bp, Homo sapiens
tccggtgttatgatgcacactgctggccctgagagtctctacaaggtgcatagacctgtgtctgtatagccaagtcccacattctcagagtgcctcacagcatggtagaaatg

SEQ ID NO: 641062 - DNA, 599 bp, Homo sapiens
  misc_feature (38)..(38): n is a, c, g, or t
aaaagtgacaacttcgtcaacaagcagacgaggccggncttcccccccctcattggggcctccgcctttggagagattgagcccgttcgcttcctgctggagtggggtgccgaccccaccatcctggcaaaagagcgagagagcgccctgtcgctggccagcacaggcggctacacagacattgtggggctgctgctggagcgtgacgtggacatcaacatctatgattggaatggagggacgccactgctgtacgctgtgcgcgggaaccacgtgaaatgcgttgaggccttgctggaccgaggcgctgacctcaccactgaagccgactctggatacaccccgatggaccttgccatggcctgtggataccggaaagtgcaacaggtgatcgaaacccacatcgtcaagattttccaaagcaagctggtgcccggtgcccctgagtgaaggccgcaggctggggagtcagacactcaaggaacaaaatggtcagccacagctggggaaacccaaacctgacttcaaaggcagcttgtgaacaggtggtgggaggggacccttcccaataggaaccaatgaaccttctgggcataaaa

SEQ ID NO: 641063 - DNA, 189 bp, Homo sapiens
taaaaagcccaattccacctctgatcattgctatacctttgagatggtatttctggaggaaccaggggaatcaggtgagaggcaggctctgtatttatttatacaactatgctcagatctcgctaagaagagcctcatgttctatctctatcctcctgagatggagatcaaagatggtgctcagacccc

SEQ ID NO: 641064 - DNA, 137 bp, Homo sapiens
agaattggcattgctgtccttttttctgtgactgtgatgtattgctgcttttactgcttgaagctggctcgtccttggctgacaccttctgtttcttgttcatccctgagtaaccaaatgatatgcttgacattgga

SEQ ID NO: 641065 - DNA, 882 bp, Homo sapiens
aacgaataacgtctgttgcctctttacattagatatgaagcctagcagtcttgtctaaaaccagtatttgtgtggtcatgttataacgctaccttgtgctcgatgcgcgcgccaaaagtgcacgcatttacctgttgacattcagcatcttccgagagcactgatggtgatagagagagatacagaaccctagcgaactattgttatcgccggccgattaactgactctacatgtagaccttctctagcttatgctggatgtttcgacaccagaggatactttgacttagttatgtgcaagaatagaaggattcttaatctccattactttgagaataggttcactaatacatgtaacataaacttgccatttgtgccttctgttctctatcgagtaactgtttattcctaggagttaacagtgacagaaatccctgagtgcggaagtagatttctccatatgagaagagtactgattctctcccaaactggtagctttttgctgctgatccattgccgttctatcctgattgacttactgagtttcttacagaacaaattgtcagctgtaaggtggttatcgcatgttagaattctcagacgtaatgattcgacactggggaagggcatccctagtgtattggccatgtctagccccacggaaacatccttgttcttgcctaaaggtttcccctttcccccgaaggtatgagagaggcttggcttataagtctggaacgagtctagagtgagagatagaatatagccaggtggggtgatgttcgtagcgttagagaaatgccctttgcgtgccaggacatatcttgggtgggaccccgtattccttggtttccaagtatgccagtttgtggaccattaaag

SEQ ID NO: 641066 - DNA, 316 bp, Homo sapiens
tagcaacactaggaaggctccccaggttggggagagccccaagattgagaacaataatgaacaattattgtatgaacaattgttagagacagctaatcacaaacaacctgcgggcacaatgacctcattccacacgtagcacccttcagcaggaccctataaaactttcctccagcccttgcctctttgcaggtagccccttctctgctgagctgcccactgcaacatattttcacaatttctctaataaatctgaccttctttacctacaactatcttgataaatggctttaccacctgcaaaactgaccctagg

SEQ ID NO: 641067 - DNA, 1571 bp, Homo sapiens
agcggagtctgactgcagtgtgcccgacatggcgagtgtacgtgctgctgagctggcatcccagtgtgctgcgctggcagcgtgcgagcggctggggccatctcggggctccgtgcgtccggctttgctcggtgttgctacttactccgacgcgcgtgaactgatcccccacatggttgaattgcgcgagcaatcgtgttatcactgacacagacggtgacagttgatccgaagcgagagagcgtttgcagacaactccagttggccaacgcgttcacactacacggagttggagccgacatcataggtgactgccagggctacctcgacactccctaaggcatgggccaggaaccaagtgtctactatgccccaaggggtggagctttccaggctgcccctatttgagacgggcacgaggccgacgcggttgtcaacaatttgtgcgttcgcaaatttgtcctacgtaagccaacgttggaaacacgttccacaacaaggttagttcattttgcagcagaaaacggtttcctacaaagaaagtctgcctgggacttgacgacggggcaacggaaattacacctttttctgggacaccaaacgcctttccgttaattaggccctggaatttcccacccccaaactaaggtgcaacaggtgtcttaacgagcaccgagcacgaattccaacgcaagactctcgctagggggtcctcacaacacccaaactgggttttacaattccgctgggaacttgcactttccggaacgttacatcgcccacgggaaacacaggcaagcaagtcgtggccgtcggttgcaggaacaaagcggcgttgacagagcgtcgacggcaacttgttgccacacacttttgcaaaagtttatggccgagcctttgatcttacagtgtagtctccccatgttcacattgtcacgaagggcgcaaaccgcaacgcgtttaattccgcagctgcctgtgggttccccacagcaatgtgctggcaaaaaccgaacaaaggcaaatggccatctacaacacgaccggcgtgcccatagaaaaatccggagacaagcggtgactgcaccacacccaaccgactgtggtgaacgctagtaacccgagtttgcttatcaccaccgttggttgggtcagaccccagatgactcacagctcccttgtgcaattgctcactgtgctacagacgggtgcatgtcccaaccacacacagttgcaacgagacaccaaactgggagggaagatccccccgagatccaatgtacattatcctatgtgcccaaagtgacagcgaggacacgcccacccagcccacattgcactgtgggcacgccaccctgttgtcaataaacaccgcttggacctagcaaacccgcaccaatgccagtgtcgatacatttgttgacgcacacgctcacgacgggtaaatcataaagcggcacgtgagccaggtttctacacacgcattaccccagtgattcgaacatactacatcgcagtacctacagaaacagggtgcacatgatagcgcacaccgtggtgacgacacaggg

SEQ ID NO: 641068 - DNA, 318 bp, Homo sapiens
gagtcagtatctactattacaagtactatgttcggtgctaggaaaaactgttacataattgtttttaattagaattactttttagtttgtcaaaaattctgtaaaatgtgtatctctaccatgattaatagtgacattccttaaacaacaaaaaacatgccgaataaaataatctacccataagatcattgccaaaggagtcaggaatctagcaacatttggtgctcttaccttgtggacaaagtcaaagtgtatctcacaattggtaatcatcacaaggtactgaatgcgatccgggaatccatctaaagtcgacct

SEQ ID NO: 641069 - DNA, 1657 bp, Homo sapiens
  misc_feature (751)..(751): n is a, c, g, or t
taagaccctcatcaatagatggagacatacagaaatagtcaaaccacatctacaaaatgccagtatcaggcgggggtcttcgaagccaaaggtgagtgtttgggattgttaaaggtgaaaatattagtgtggcggagtgaagcagattaggtgaggaaagtttgacccaataagtgacggtgaagctccggtggaagccgtggtggctacaaaaaagtgttgagccgtaaattgccgctcggaacaagtgggtgagagggagaactctcgaaagtatacctcgtgagaggcttgtgttaggagagggctaacaattaaaagacaacccagttaacaatgtggtcaattaacgcaggtgcttgtgaaatttatttggggttctcggagtgtggtatttctatatatataagacatatgtgtgtgtgacgcctccaggggtgattgtgatatactctcctgtggagtgcgagagtataaataacgggaagtgtgtgttaacagagaggtggagcacttctataagggggattttaacgcgggaggggtgagtgcccgtgtgtgggcggcgccacggtgcccccctcccataaaatgtggagaaggcatagaggggccatagagccgtgggcacgtgtggcctaacagagggggctccagcaaaaaactccgtggcgcaaagcaaacacacaaaaacctctcgtgaaaggcgtacatacacacactcagagaatctaataccccggtaatatcngaacaaagcgcactatatatatgggcaccagacgggggggggtccaaaaaaaacaccccaaaaattggtgcgcgcgaataggaccgcccggtgtcgacaacgcggggggggggggcccccctgtgggtgtgccccccttggggtgggggccccttgtggagtcattcggcgggcgaaaccccgaaggggggggagactacaccccgacagagaaaagattctaccgcagccccagtggggcgcaatactccggaggcgacccacgaagggatccagcagggctcagttaggcaccactgatggtgcctcgtgcggcggctcccaaaagtggcccacgggggaaaaccctccgcgggagagggcacaacaggccacaagggagacacaaacgcgaagcagtggggaatatggcccggataacaccacaaaacatttgcgcgccgcgttgagggcaacacagggaacatgtgatcaaagacacaaagctcccgtggagaggaagaaaaaacataacaccatattcatcccgcggcgaccaataagaaaggagaccgacgagcaccactgaactaacatccggagggggggcccccacaaagaagagagagggtatgcaagaaaaatatcgtcgaggcacagaacaacacaccgcacggtcacgacacaccaacacgatgaacgaacgaaatttgtagactaacggtagaaaaacacacgccgcacgagacggtaatagagatcaacacaagtagaagcagacaaacagaaggaagaatcaaaggaacaaaccacagcgagacgagatgaggaagagataacaccacaacgaaagagcaggcaagagagaccaaagcacaaccagcagacagcaactagatacacgtagtgaaggacacacccacacaa

SEQ ID NO: 641070 - DNA, 251 bp, Homo sapiens
tctgcaggatctccaataaattgttggtcattgatgtattcatcgtcaaagcgccgtataagctgcggatcaaacaggtcgtgccttgcggctcgatggaccaatccgcttttgccgcagctgcttccaatgctccgctcgtgatgtaccggtaattatcgtctaccgagacgtaatgaccggttacgcgattgcggatgcggtacgatccgttatcttcttcaagcagatcaatgaccaacaatttattg

SEQ ID NO: 641071 - DNA, 459 bp, Homo sapiens
catgatggcgcgctatattcccagctactcggaaggctgaggcatgagaatcgcttgagctggggaggcagaggttgcaatgaagctgagatcaccgccactgcattccaagcttggactacagagggcctccacctcaaaaaaaaaaaaaaaaaaaaaaaaaaaatttttgggggcgccgccttggcgcctgggaaaaatgtttttataaccctttctcgtgggggcgcggcggggcacccagtagggtgtatgtccgcaccctgggccccttaacacggttcccaaagggaaacatcgcgggccagagaatagaggtgctgtggttttctcccaccaaataaaaaaggccgcggggaacccgcacgtttgtggaacaaatcccgagaggagtccgggaggacctaacggatcttaccaaggggtccaaggggagcgattcaataccgcctgtgggaa

SEQ ID NO: 641072 - DNA, 720 bp, Homo sapiens
gggcagtttactgagaggtgctttacgtgtgcaccgtgcatctttcagcagctcccctcctgtcctcacctggtcttttccctctttatcccaagcctttatgcttgagtcccttccccaggggctgcccacccgacagttccaggcattccctacctgaccttcttgtctgcttttccttctcccactgcaagcggctgcttgtggcggcctgggatgacgtcccgtctactgtccctcatccggtgcctctcgttgccgaagccattcctgtggtgacgttcgagtgcctgacgggagaccacaacattcgatctccagcctcggacactgtgatgcctgcatggccagatcccctcccatcctgactgctgagtcgaggtcgagcttcgtgatattgtcaaaatgaaatgccttctggatgctgttaaggatgtaccgcttcaggtgaacctggtatcagacccacagtacttgctgttggagaataaaaattaacgaaccagataaatgcgtcatccgctggttgcgtccagtcgcccttttcgtcttagcctggtacttctcccttccttttgctccctccgcccacccgcaaaataagaaaacacaagaaaacaactagcacataaattcatactgtattgaatgttcgtaggtctaggtgaaacaaaactgagaagatagatgttccactgctctattactatataatgtcga

SEQ ID NO: 641073 - DNA, 115 bp, Homo sapiens
cgcatctaggcggcgtcttgcgggggctgccccgccagttatagttagtgaagaagccgtcgcaggaatcaaagaagaccctgttgtgctggttgagttcgtcttgcgggggctg

SEQ ID NO: 641074 - DNA, 299 bp, Homo sapiens
  misc_feature (2)..(2): n is a, c, g, or t
  misc_feature (208)..(208): n is a, c, g, or t
  misc_feature (236)..(236): n is a, c, g, or t
  misc_feature (249)..(249): n is a, c, g, or t
  misc_feature (272)..(272): n is a, c, g, or t
  misc_feature (281)..(281): n is a, c, g, or t
gntcaaagcggtcctgcaccggtgcttggacgagttcgagaaggaccccgtccccgaccggttcctgaaggacctggacgagaaggtcgacctcgactcagcgtggtcactctggttgtgggacaaggcctcgttgagagaccggagtttcaggcacctcagaaaagacttccaccggccctacgtcatggacgtgccccaggacccngggtagtatttgttcccacaaaaatccncttcttcatgcancccgaccgggggtcgtttcaccntcaattccnacattcccacgaggccga

SEQ ID NO: 641075 - DNA, 249 bp, Homo sapiens
gatgatgcgctgggccaggccttccacgatcgcggtcttgcccacgccaggctcgccgatcagcaccgggttgttcttggtccggcgctgcagcacctggatggtgcgacggatttcctcgtcacggccgatcaccggatcgagcttgccgctctcggcacgagcggtcaggtcgatggtgtacttctccagcgcctgccgctgttcctcggcattctccgactgcacgttctcgccgccacgcagctt

SEQ ID NO: 641076 - DNA, 155 bp, Homo sapiens
gagcatgttgtggtcttgctgaaagataatccagagctgggccctgattataggaggcagagcagaggacgctgggcttgagaggttgtctaggaagcagaatggactgagcttggtgaccagttggatttgaggactgtgcataggaaacacag

SEQ ID NO: 641077 - DNA, 417 bp, Homo sapiens
gaactttatttacccattcaatgaataaattactcaatattgccaatggaatcttgatataactctgctaggatctggagatacaaaggtggttctgtctctggtcttgtgtaatatcctcacatacaaggctaatcagagctggaatgaggagtctaggaagcccttagaagatttgtgagatcaggaaaaatgaatcccagaaacattaagtgacttgcttacaacttaacaaccaatttaaggcccgaaagcattttggaagtctagaaatgttcacaatgataaactacttccaactcattacagtggctaaaatcagaaaagctgccaataccaattatggatgaagatgggaagcaactggaatactcatgccctgctggtggaaatgtaatttaatacaactattttgca

SEQ ID NO: 641078 - DNA, 622 bp, Homo sapiens
ctagaggttcccccgggagacgaccttttccaaaaacattgtgcaatttttaaaaattgttgtaaaaatatgtcacataaaatgtactatcttacccatttttgagtctacaattcagtagtgttaagtatgttcacactgttgtaaaatccagacctttcattttacagaactggaactttatacccattaggccatcaacaacggtttaagaattcctcacttcccctccccaggctctggcaactggcagtctactttctgcctatgaatttgactagtctaggtacctcacctaagtggaatcatacagtatttgtctttttgtgactagcttatttcacttagcattatgtcctcaagtttcttctatgttgtagcatgtctcagaattttcttcctttttaaggctgaataatatttgattatttggatatgccacatttggtttattcatccatcagcatgcaattatttaatggtcagcttttcatgtttatctgcctcctcctcctgcaggtactgtctatctagtatcactgggtccccagtgtgagcatcataatcagcatataataggagctagaaggtcggctcaagggggtacgagctcgattcgcat

SEQ ID NO: 641079 - DNA, 124 bp, Homo sapiens
ttgtttttaataaaaaaaacctttttggccttgccttatcttattaaggagttgtatgtcagggtataaaacaaactgtgtgggataaccggcttaataaatttttttaaaggaaagaactgga

SEQ ID NO: 641080 - DNA, 819 bp, Homo sapiens
  misc_feature (106)..(106): n is a, c, g, or t
  misc_feature (385)..(385): n is a, c, g, or t
  misc_feature (450)..(450): n is a, c, g, or t
ggacgtctcagcctccagatcataaagagtacaatcaaagctatagatgtaaggaaaatctgatgccaggaaccgaggcctgtgagggacaagggttaggtccttntgacaaacacatgagagtaagaatagggttgggagatatgaccttaaccttataggtaggtaaaagccctgtaccctgcataaagcccaacagccaagtgctcctttccttgatcacagatgctcaaagaagcctggagaggccacaaagaggtttgccatctatcatggcaatgttgagaggtgggcaagttgctaccaaaatattaaaagcacaagtcagaagagcacataaatgtaagatccataatcaaactacctacatgcataaggaaatganaacccaagaaattaacctaaaaattagtgtagaaacactgaaaccccaagaaacaggtagaaacnagactgaatagtattgggagaagctttcacagttctgaatccacagcctgctgccagtacacaccgataactcttccccctaactctgaagtagacaaattcatcattttataaactacagacttcatgtaaaaagaaagtatcaacaactcaaaataataaacaaatatggctgggcgcggtggctcacatctgtaattccagcactttgggaggccaaggtgggtgtatcatcgaggtcacggagttggagacccgcctgaccaccatggagagatcccgtctctgctaaaaatacgcaaattagccgggcgtggtggcacgcacctgtatcccagttactcaggagcctgagccagtagactctct

SEQ ID NO: 641081 - DNA, 156 bp, Homo sapiens
cccccccccccccccccccggggtagggggggggttcccaaaaaaaaaaggggttttgggggtttccccttggttaattttttcccaacccccggggggggggggccccccccccctttaaaaacccccgggagggaaggtttttccaagggttta

SEQ ID NO: 641082 - DNA, 116 bp, Homo sapiens
tgtactggatgtgtgtgatatcatcaaggtctctgtcccattcttcagggttcgattaagctgtaattccagctatgcgggaggctgaggagggagactcgcttgaacccaggagg

SEQ ID NO: 641083 - DNA, 368 bp, Homo sapiens
cccctgctgctgcggcgactctaccggatctctgggagcaaaagcttttttcgagatcttactgcaatatatgagtcctgtcgattaggtcaacatagacctgtttctcgactgttaacagatgggatcatgagagttggatctactgcatcaaatgaaacttatccagaaaaagtttggtacgccagaactggttattctacaggcagctgcatggtaaccaatgaagcatatttcttaaaactccaagcctttattaggcaccaagtcttgcaagataattgaccctaagggtccccctttcatactttgctttcccatggccatttgggacaagcttcctacttaactttttccccagaccaaaa

SEQ ID NO: 641084 - DNA, 334 bp, Homo sapiens
tgctactgggcgtatggtgaaacctcactgctacaaaaaacaaaaaattagccaggaatggtggcgcatacctgtagtcccagctacttgggaggctgaggcaggagaatggtgtgaatccaggaggtggagcttacagtgagccgagatcgcaccattgcactccagcctgggcgacagagtgagactccatctcaaaaaaaaaaaaaaaaaaaagaaaaagagggagatacagaggagatcccagttgaccattttgtttttatcccagcaaaattgtccagggtctgtttaagggagggctggtttccctttattgtgacttatttttttt

SEQ ID NO: 641085 - DNA, 824 bp, Homo sapiens
gaggtagaggctgcagtgagctgtgatcgtgccactgcactcagcctgggtgacactgagaccctgtctggaaaaaaaaaaaggtttcactaaatttcatgtcatcatcattacaattttaggattaaaggtaagcaactcgggacattctttttggctctatccagaaatttacacaaattattgccggttttaagctcaggccaggggtcaatttacttactcaagctttggaccttcaagtagttatgaggggctagctagcttttatcccttaagaaccaacccaacaatttttaagtggccacaaattgataaacacagaatagagcaactaaagctaacaattaggaactgtaaaactaaaaattttctcaaaacaacatattattagttggaccggacagtcatacctggctcttaagagtggacctctcaacccaaaaagacttacccagaagtctgtgcaaaaagattaggtaaaacattcttaaatctagtgtaaatcagttacccctttgtagcaatgcctttgtgaatcagaagcgttctccaacttgaattggaaacactagcaccatctgtgcgtggaacgaccaaactgttttcaacactttcctcacataacagctaaacgccatagaatgttaaatttttccggaaaggaggtggggtgcgtatttctaagaacattaaaggcggagaccagaaattgtcccatggtgggctggaagtcaacctgagtctagagggaaaacgaaccaaaaccgggcagtctatacggattatacagcaccgagattttataactataggcattttgg

SEQ ID NO: 641086 - DNA, 345 bp, Homo sapiens
tagctcgatcctagagtatccacccccaaggaatcccccaaatggaagtctccatattcgtatccactttaccatatatttgaatagttactatgatcgctcattgtattctggactatcttatttgaagttctaaaacaattatagctaaggatttattattttgggcctccatccagattctttttccaagatcattgactagaatcatctgtcgtctgtttccagataacatactttccgttctataggaatcttcactgccaatcatagtatctaccagtggctttcttagactattcactccaaagctgggactgatgtcctgccagtagagaatctaca

SEQ ID NO: 641087 - DNA, 341 bp, Homo sapiens
agacacatgagagcagtcctacagagagcaagatgcaccccaggatttcttcattttctaatagctgtgggagtgcacagtattccccgacagcgaatttcccctgagacaagatactagaacctgggttagcccaccttgtaactcttccttaatctcctccttaaacatccctaattcatcctccctctggcatggaattgacgcccgagcagtacatttgccaagtggcaccttctttcaatttatgtttaatttatgctatggtaggtgattctttatttagctggttgtcttaaactcacacatctttctctctgtctctctctttcctgctcttt

SEQ ID NO: 641088 - DNA, 392 bp, Homo sapiens
gtaatcagtaccctgatacgaaccaggatgcccagtattggaagctcatatgcacactctttccctacaccagactggagtctgatgcacactgtgccgactcataccaactgactaaggaggctttatatgaaacatgtgctgcaacctgtggaataacgagctattcactgaactcaaggaatgttagacctcgttataccacatatgccggtcgttagcccacaatcattgcaaggctgcatggacagcaacaagctgcaagtcatgcacgcgagtgacagtgacgcacgctatgtttatgatgcactatacttggtccgagtgcctcatgagctgttcgacagcgtcacaccgtggttcacgaccttgttggtgatcacatggatcag

SEQ ID NO: 641089 - DNA, 345 bp, Homo sapiens
cagacttgaaccgcataggaagtcatactgtgccagaggcgctgtcaagaagaacgttgcgctttttgccctcgagaagctcctgcatttaggttctatctttccaggcgaaacacatgggtatactttacatacagccatcttcaaatgaaccttagaatgaactcgcagtggagttcgagtaaagataatgactgatgtgctagacccagtcagaattgttggtgctagaggtccgcatgacctaattgagactctacatatagcttagatttcctatacgcttacagtatttgctagatcacatggagcactgacactgatatattccgactcggtcatctg

SEQ ID NO: 641090 - DNA, 133 bp, Homo sapiens
attctagctcggtacccatcagtcggccgtgtatcacgcaaggtatggtggtatatgcatatcacgctgactgcctgaacttgtacagaacggtccgagcctacacgcacgcgagagcctacacgtacgcgag

SEQ ID NO: 641091 - DNA, 268 bp, Homo sapiens
tacccgtatatttttcttcttccgtgaccttcatggcggctgccagaatctcgtcccctttgaactccttgtagagctcccgcagtgcctctccgttctcggcatttgtatttttcagataataagacggctcctgtttggccttctcttcatctgggtctattattttcatgttattcttcacatgatagaagttagagacattgaacttgtccaaattggtggggtcctggagggtgatgatgtcctgccggaagaagaaaatgat

SEQ ID NO: 641092 - DNA, 341 bp, Homo sapiens
ccattgttggccagcacgggtcggattacttgaggtcaggagtttgagaccagcctagccaacatggtaaaaccctgtctctactaaaaatacaaaaattagctgggtgtgttggtgcatgcctatagtcccagctactcaggaggctgagtcaggactgcttgaacccgggaggcggaggtgcagtgagctgagattgtgccactgtactccagcctgggcgacaaaaactcagactcaaaaaaaaaaaaggaaacttaatttaatttaaaaggaaaaaaggattccattcccagcatttgggaaggccgaggccggtgtttcacaagatcgggaaatcg

SEQ ID NO: 641093 - DNA, 138 bp, Homo sapiens
cgatggaggttgtggcaggaagaggttgaacagacgacctctcttagcagggaactactcccatcctggagcctccgtagacctaaccgatcgttctccttacacgctagcaggtgtctcctctatcttaggggccat

SEQ ID NO: 641094 - DNA, 109 bp, Homo sapiens
tagtccattttggccggtcagtaggtaatgcagtctttcccagggtaaaaatttccatattggtatggagctggaatataatggaagtaaaaataattaattgttttta

SEQ ID NO: 641095 - DNA, 221 bp, Homo sapiens
tttgtggtattcctgtgagggataattatgacagatgctccatcgtgcctacgacaaacagacctaaaatcgctcattgcatacgcggcaatcggccacatggccctcgtagtaacaggcatgctgatccagagccccgtgaggcttcaccggcgcaggcaattctcagtaattcggccaggggcttacatcctcattactatgctgcctcaggtagagca

SEQ ID NO: 641096 - DNA, 107 bp, Homo sapiens
aggactaatagatgcttactggaaaagaaagaggaggggaccatgcagactggcttaagggatatgagaagactcctggagatctattaatagcagtgagatgtgct

SEQ ID NO: 641097 - DNA, 244 bp, Homo sapiens
  misc_feature (147)..(147): n is a, c, g, or t
  misc_feature (211)..(211): n is a, c, g, or t
ctagtgagaagatataggaatgggaacccaggtaacagtctggccacttttccatagggctgctgcagtatgcccagggcccgctccagtctctagtagcctcagattttccagtacctggagttatcatcagtgaagcctgtgaanaccaaagatggcagcctaccgctccctttggaagctttgccctagggaggtatgaatgaacttnttgctggcccaaacacacctgtaggaggtggct

SEQ ID NO: 641098 - DNA, 255 bp, Homo sapiens
ggagagcccagcggagtttactgggcactagttaaaatctcaggagaatgttgcatttgcctcaccacctgcccccttttcctggtgccttctcccctttaaagaaatgggtaaataccgagcaacctctttgggagctccagccacagaggattctgtgatttgtgtgtttctcagcagcccctcaagctctggcttaattattccccattgagactcttgcctcagtctctcatttgggcacacattatggag

SEQ ID NO: 641099 - DNA, 184 bp, Homo sapiens
tccgagagattctgagcccctctactagaaatttcttgatacccatgttggcagactaatacagtcagcatgttgttagggaagttcagtaaaaatgatctctcagttacaggggagtgtatgttggtaatgtgacatatctagtaggttagagatgtgagctctagcatgtgtgttttgtgca

SEQ ID NO: 641100 - DNA, 268 bp, Homo sapiens
ctgtggtgtaccgcctgtgcgggtatgtgtatgagtttttgtttgaacacctgtgttcaggctttgggggcatctacctaggagtggaatttctgggttaaatgggaatttaactttttctccttttttttaaaatttgaagtatacctgatttgcagtggcaggttagtttcaggtgtacagcacagccattcggttgtgtgtgtgtgtgtattctttttcagattattttcccttatattttattataaagtattgagtgtagttc

SEQ ID NO: 641101 - DNA, 730 bp, Homo sapiens
  misc_feature (399)..(399): n is a, c, g, or t
ggatacgggagttcctccttgctctcgcccctactctttctggtgttagatcgagctaccctctaaaagcagtttagagtggtaaaaaaaaaaaaaaacacaccaaacgctcgcagccacaaaggggatgaaatttcttcgggacattcctccgtgcttctcccgttactgatcgtcttgctccctagagttccttcgtgaagcttttatattcctaagaggagaaaatcagtcaccggcgaaatcgctgctgattacaggagctgggcattggaaatgggagactgactgcctatgaattttggctaaactttaaaagcaagctgggttctcggggatataaaataagcttggactggagggaaacagtctgccaaattgcaagggactggcgtgccnaggttcatacctttgtgggtagactgcagcaacccgagaagatttttacaggctctgcaaagaagcactacaaaggcatttcttcctgcaatgacgaagaataaccatggccatattggtcactgtgggcttcggcagtgggacatgtttcggtccccttcttacgggcttactgtccaacgcaagttggctgctgtggatttcataaaatttgacagatgaactgctgccttacaaataactggggtcaaaacaacatgtcctgtgtcctaattccgtaaacatggttcatcaaaatccagtacaagttggggaccaattctggaacctg

SEQ ID NO: 641102 - DNA, 250 bp, Homo sapiens
  misc_feature (42)..(42): n is a, c, g, or t
  misc_feature (87)..(87): n is a, c, g, or t
tgtcagcatcgctaatgtggtgtaccgtagagccaagctgantgaaagggcacaggcagagatagctgagagctcagtgtttccaantggtataaataccaaggatatgtatcctcttacccttcttagacccacaaattaacccggtacttcacctaaggtgagatcagattatcagatgatttccaaattaaacttaatgccattacaactaagaaaaatcattttaccagcacaatacaaagaatag

SEQ ID NO: 641103 - DNA, 746 bp, Homo sapiens
cctttctctggtgcctccctgattagcttagtaactaacctcctgaattctttttcaggtaaatcagggatttcttcttagtttgggtccattgctggtgagctagtgtgattttttggaggtgttaaagaaccttgttttgtcatattaccagagttggttttctagttccttctcatttgggtaggctctgtcagagggaaggtctagggctgaaggctgttattcagattcttttgtcccacagggtgttcccttgatgtagtactctcccctttttcctaaggatgtggcttcttgagagccgagatgtagtgattgttatctctcttctggatctagccatccagcaagtctaccaggctctgggctggtagtgggggttatctgcacagagtactgtgatgtgaactgtctgtgggtctctcagccatggataccagcacagtatttggggtgtctcctgagtcctgcaaaagcaatccacttccatcagggggtctgccggtcctctcaggtttcctgattcattcctgcagtcattctggagcaaaaattcacaatgtgagcttcacatgctgctctgtccatccgagttggagctgaaatctagtcctgcctcctatctgccaatgacttcttttttctatttaaatggcttttatttatttctcttggctgaatgctctggcttggaactccagtactatgttgaatcttaaacattttaatctaatcataccact

SEQ ID NO: 641104 - DNA, 1384 bp, Homo sapiens
  misc_feature (194)..(194): n is a, c, g, or t
  misc_feature (273)..(273): n is a, c, g, or t
  misc_feature (882)..(882): n is a, c, g, or t
gcaaatacatggaagtgtaactctctgcagcttgtactaatgtggcgcatgctaagtaggtctctagtatcgggggatccctgacagctagtcttccggtagctcctctccgtgggcacgtgggttccgagctatctcgcgctttgtcttgcgcacaacgccgcatcgcgtcggccactgctctctctcattcngtcggatagtatatgcgtgtgtgtgtggtttgcgtccactctatcgtccgtcgttgcgcattttgtggcgtaactctcngagtcgttggcgtctcttcgcaaccaatggcatgtctccacaaaaagcaaccatctgtgcaccgcattggcgtttccttgcgcatgcagtggtatggccacctattgtgtggcctgctccgcgtataagcccaccaagtaatagtttccgctcgaggcccctagtagatagaagcggatcctaggaattttcccattttgtgcaaaccccctttcctgaacccttcgcttgcccagcaaagagaccatctcgtcgaggtgatattagaatacctactcattacatttcgctttcgatgtaaatcagcccctatttaatctctcagagacccctcttggttctagcgactagcatagctatacaaagatctgtggaaacgtaggtttttctattcctagcatggagacaaattcacccctgagatacttcctgaacgtcgcatctttccccattattgtaaaagaacgttactcaagcgcaacgaataccaacgcattaggaatttttggcatcctttctttgaacgtttgcctcttagagaccttactgcccagtttgaccctttaagcgctctcttaaagttcgcatagagaagccacgaagagcctnggacgccaggttgtgggattcccaatttggcacaaggctctggccaaagaaaggcggcataccgagggggttagagagtaaggctccgagtgaccgtatcgcaccatttgttcgccttaattggggtctccgattcggagggcaacacactccttgtgaatagagtttcgagccagtatcgtgaattggcccgccggactctttaaccctcaaacgctcaacatttagttggaatctgtcccactatccagagagtctcttggttgggccgcaaaaggtctccctcaagagggtagttaactgtggtgtatcccagccccccacgcatgtacgcaaggttgggcgcacttaggttgggaacaaccttatatgcacaacctggatcggccttcaacaggggtcacccgtcgtcacacttggactccccccaagctcgtctaaaggagactcatttgcacgcccgttgcatcaagagttcgcgcaaatacaatacgtgcgcggc

SEQ ID NO: 641105 - DNA, 150 bp, Homo sapiens
cgtggggcgtgaccacccctccacctggaccgcggctggtgtcactcactcatgttttctaccgttttttttggtttggtttggtttggttggttggttggttttggcgccagaacctctccctggggggccagctggaggggtcccgag

SEQ ID NO: 641106 - DNA, 246 bp, Homo sapiens
  misc_feature (214)..(214): n is a, c, g, or t
agagacagggtttctccatgttgtccaggctggtctggaactcctgagctgaagaaacctacctgcctcagccccacaaaatattgggattacaggtgtgagccaccacatgcagccaaaaaaatttttaatagggaagaagctagtaggaataaggatataagggaaagaaaccattttgtgtacagctgtacacaaaatgtgtttttaaggntaagtgttactacaaaagagttcaaaaagctt

SEQ ID NO: 641107 - DNA, 401 bp, Homo sapiens
ctttagggccgggagacagcccccaggccaaagttgggccctagctcctggggctgttcccgcattcaaccactggccttttccacccttgctcaccctactgttccccccatcaaaacagttttgccctgtgaaaaaatccacccttcccccccggcaagggggggtcttacccgggattcctcctgttgttgtggccctgggtaaaagcccccccttaaaacacaagacaggcctgcttacaagggtgagtttaccttggcaaaaaccaaaatatttttcctgggcccctggggaattttaggggtgatgggaaaaaaagaacccggagtggaaggaacacagtttccaattaaccacctgccaattaggtgccaataaaatgccgatgattgggcggg

SEQ ID NO: 641108 - DNA, 259 bp, Homo sapiens
aaggctaggtagcgaggctgggtggttggatctcttcccactccctccccagccttccccgcgagcggacgcggcagcggcctctgtctcgctttttcttatttttcccccctttcccctttctttttttttttttcttttcttttctcccctccccccttttacacacttttcccctgcggaggcgctttccccgggcaggggcagagcgggtctaaccccggctctcgggccgggctatggaaggaccctcaacggg

SEQ ID NO: 641109 - DNA, 323 bp, Homo sapiens
gtcctgtcaaactcagttctccacactcacaaagaaggcctgctggccgggcatagtggctcacacctataatcccagcattttgggaggccaaggtgggcggatcacgaggtcaggagttcgagaccagcctggccaacatggtgaaaccccatctctactaaaatacaaaaattagctgggtgtggtgatgcgtgcctgtaatcccagctacttaggaggctgaggcagcagaatggcttgaacctgggaggtggaggttgcagagagccgagatcgtgccactgcactccagcctgggcaatagagtaagactctgtcta

SEQ ID NO: 641110 - DNA, 128 bp, Homo sapiens
tctagaggtatcacccccatgtactttatgttgcctagtcatgaaatgcgttatactcttcttagacgtcttggttgtgggccgtgggtcacccctgtaatcccagtgctttgggacggctgaggtgg

SEQ ID NO: 641111 - DNA, 488 bp, Homo sapiens
  misc_feature (13)..(13): n is a, c, g, or t
  misc_feature (167)..(167): n is a, c, g, or t
  misc_feature (190)..(192): n is a, c, g, or t
ataatacatacanatgtatgattctgtgtggcttggagaagttggcatgtgttacagcaagtcttagtattgtgaatcatatctgtaattgtaagaagtgtctgtatgtccagcgattctatgcacagggaggtaagtgttggtgttatggagcaagaaagtgtttngtgggattagtcgttatgttgtnnnaaggatttgtatatgtagggttatgtccatatactgtggctcctatttgggtgttctggagctagtctggtttctggggggtcattctaggtgtggcataatgtatctctatgtttcagatgagtctcagtgttacaagacaaggctagttgaagtggggtatgtccaggccttgttgagtctatgtgtatttttgagcatttcttctgattttaaactaagttttgaagagacaaggaagtgttttatggagacagtttgtgtgttaaaggtagagcctgtgtagttccatgtgt

SEQ ID NO: 641112 - DNA, 1122 bp, Homo sapiens
  misc_feature (833)..(833): n is a, c, g, or t
  misc_feature (1049)..(1049): n is a, c, g, or t
gggagaatccagaatgaggacccggaggagcctccgttgggcacctggacagaagatctatgccatgtcgacgtgggggaccgactctaaggctgctggtcaggcgccttcccaggattgggaagctcatctatctgggacagcgtacagcgcatcacaatcaaggtccatcgccatccgcgctgcgctcctcctgggtaatgacctgtgcctacgcgccctcgagggaacttggtaggcctgtggggggttggacaacatctgcttccatctacgagcgctcgaagagcccgtcgagggcgaacgtcagggtcagtccggggagctgactggccacactgggtacctgtcgtgttgccgtgttcctggatgacaatcgcaagagtcatcaccaggctctggggagtaccacctgtgccctgtgggacgattgagatcgaggccagcagacaggtgggttattggctggacacatgtggggatgtgatgtccactgtccactgagcccccgtatggccgcacgtcggtgtcaggcgcctgtgatgcctctatcaagctgtgggacgtgcggggattccatgtgccgacagaccttcatcggccatgaatccgacatcaatgcagtggctttcttccccaagggctacgccttcacgacggctctgacgacgccacgtgccgctcttcgactgcgggccgatcaggagctcctcatgtactcccatggacaacatcatctggtggcatcagctctgttgcctctcgcgcagcggacgggtgctggtcgctgggtacgaggacttcaagtgggacatctggggatgccatgaaanggcgaccgtggcggagatctcgtgggcacgagaaccgcgtgagctgcctcggggtcagccgacgatgggatgggtggtgcccacgggtcccgggaagccttcctcagaaccggagagaaaggtgccaccccccacggtgccgcgacgagaggggcgtcgcatggccacaagaggacaggggggggcgcgggacaacacccctccgcgaggacgagngggcagcgcccaccgagtgtcgcgcccgcgaaagagagagagacacagagagacagacacagccgcagaacag

SEQ ID NO: 641113 - DNA, 377 bp, Homo sapiens
ctgtctctatgtcttctactctgttcatcgctgtgtctcgctcgatgcatgtctctctgtctgcttgctgtgtctgattaggcgactgtctgtgcttgtgtgcttctatgtgtgtgtgcttgctgtgcgtgtggcctcatggtctgttgtgcgtcgagttgattcatgtcggtctgttttttcctgtctctgttcctctctgtcatgtgttctcttctctttcttctgttcatatctctctcttctctccctctttgtccttgatccctcggctgtgcttctcacatggatccctcctactggtttggggggttgggttcctgaatgcaccataatcgctgtatgaatattcaagtctaagtgacaaaagacaaaaa

SEQ ID NO: 641114 - DNA, 205 bp, Homo sapiens
gggatatttacacagtggcttctaagtatcttggcttcgtctctactaaaaatacgaaactagccaggtgtgatggtgcgtgcctgtggtcctagctgctcgggaggctgaggcgggagaatggcttgagcccaggaggggaggctgcagtgagccaggatggtgccactgcactccaccctgggtgacggagcaagaatctctc

SEQ ID NO: 641115 - DNA, 952 bp, Homo sapiens
  misc_feature (4)..(4): n is a, c, g, or t
  misc_feature (7)..(7): n is a, c, g, or t
  misc_feature (10)..(10): n is a, c, g, or t
  misc_feature (16)..(16): n is a, c, g, or t
  misc_feature (30)..(30): n is a, c, g, or t
  misc_feature (42)..(42): n is a, c, g, or t
  misc_feature (79)..(79): n is a, c, g, or t
  misc_feature (117)..(117): n is a, c, g, or t
  misc_feature (125)..(125): n is a, c, g, or t
  misc_feature (131)..(131): n is a, c, g, or t
  misc_feature (138)..(138): n is a, c, g, or t
  misc_feature (141)..(141): n is a, c, g, or t
  misc_feature (144)..(144): n is a, c, g, or t
  misc_feature (161)..(161): n is a, c, g, or t
  misc_feature (178)..(178): n is a, c, g, or t
  misc_feature (182)..(182): n is a, c, g, or t
  misc_feature (184)..(184): n is a, c, g, or t
  misc_feature (186)..(186): n is a, c, g, or t
  misc_feature (189)..(189): n is a, c, g, or t
  misc_feature (192)..(193): n is a, c, g, or t
  misc_feature (196)..(196): n is a, c, g, or t
  misc_feature (198)..(199): n is a, c, g, or t
  misc_feature (203)..(203): n is a, c, g, or t
  misc_feature (205)..(207): n is a, c, g, or t
  misc_feature (214)..(214): n is a, c, g, or t
  misc_feature (223)..(223): n is a, c, g, or t
  misc_feature (230)..(230): n is a, c, g, or t
  misc_feature (235)..(235): n is a, c, g, or t
  misc_feature (238)..(239): n is a, c, g, or t
  misc_feature (253)..(254): n is a, c, g, or t
  misc_feature (256)..(256): n is a, c, g, or t
  misc_feature (271)..(271): n is a, c, g, or t
  misc_feature (276)..(278): n is a, c, g, or t
  misc_feature (286)..(286): n is a, c, g, or t
  misc_feature (289)..(290): n is a, c, g, or t
  misc_feature (296)..(296): n is a, c, g, or t
  misc_feature (298)..(298): n is a, c, g, or t
  misc_feature (313)..(314): n is a, c, g, or t
  misc_feature (329)..(329): n is a, c, g, or t
  misc_feature (335)..(335): n is a, c, g, or t
  misc_feature (338)..(338): n is a, c, g, or t
  misc_feature (342)..(342): n is a, c, g, or t
  misc_feature (349)..(349): n is a, c, g, or t
  misc_feature (354)..(354): n is a, c, g, or t
  misc_feature (359)..(359): n is a, c, g, or t
  misc_feature (366)..(366): n is a, c, g, or t
  misc_feature (373)..(373): n is a, c, g, or t
  misc_feature (375)..(375): n is a, c, g, or t
  misc_feature (382)..(382): n is a, c, g, or t
  misc_feature (410)..(410): n is a, c, g, or t
  misc_feature (450)..(450): n is a, c, g, or t
  misc_feature (547)..(547): n is a, c, g, or t
  misc_feature (839)..(839): n is a, c, g, or t
  misc_feature (869)..(869): n is a, c, g, or t
  misc_feature (882)..(882): n is a, c, g, or t
  misc_feature (887)..(887): n is a, c, g, or t
  misc_feature (915)..(915): n is a, c, g, or t
gggngtntgngggggnctcggggggcggcngcggtgtttcancgggaaaggctcgaggagagcgcggctcacgagaganaacccagctgtgctccctggaaccttcaatttcaaggnctccctgngtctantaggggnctnagntcagtatgggggagcanttgagtgagatggggcncacngngnccnccnncgngnnccangnnnaagcccngcatgtggnggtcatngggcnggnntgtggtgggaaganntncctcctttaccgccncaagnnnaaggagtntgnncagagngncccgcaccaaaggcnncaacaccgagaaganccgggngcncctngggggancgcgnggcancacgctncgcaagngngggacgncggggggcaggagaagctgcgacgcacngtggcgctcttataccgcgccggacagacggtctagtgtntgtggtggacgcgtgcggaggcgtgagcggctggaggaagcgcaaggtggagttgcaccgaatcagccgggcctcggacaaccagggcgtgccagtnctggtgctggccaacaagcaggaccagcccggggcactgagcgctgctgaggtggagaagaggctggcagtccgagagctagcagccgccactctcactcatgtgcaaggctgcagcgctgtggacggtctgggcctgcagcagggccttgagcgcctctatgagatgatcctcaagaggaagaaggcagctcggggtggcaagaagagacggtgacccgagccccccctccctttcctcccacctagtaggggtctgcacacttggacagcagggtgggacagcctgtganctctcagtcagactggggtgcagacctgtncacctcaatgaangaganaggagatggggtgtccgttttggtgcanactggggtggggatgggaaagggatgtctttcatatt

SEQ ID NO: 641116 - DNA, 738 bp, Homo sapiens
tctgcctggcccactcagtggcaacaccgcgaggagctcgtatcgtccttggtgagagcctcagcggtctccctctttcagaactcactgccaagagccctgcacacaggagccatccatgctagctgcttgcagcttcattaagaccatgatgatcctcttcaatttgcgtcatctttctgtgtggtgcaggccctgataggtcagtgggcattctgggctgtcaattcgactggggcatcctttctgaatgatcttcgggtccactgtcgtccagtgccatgcagtttgtccccgtggtgctacttcctcactctgcagccggcgtggtggtctttgctctctggtttcctgggctgctgatggtgctaagactgatgagcaacgtgtgccctcgtgacgtccttcttcatcctcctcctcagtcttcgttgctgaggttgcagctgctgtggtcgccttggttgtacatccatcaatggctgagcacttcctgacgttgctggtacgtgcctgccatgcagaaagattatggtgccctcgaagactctcactcccggtgtggtgaacaccacccatgcaccgggttcaatgtgctgtgggttcacgcacctatgggctttggcgcgagtcaccctacttgcggaccacagggcgttcccccatctgtggcgtgctcgtcccagcctgcctatgggccggccggtccgggtccgacccagctgggtgggccagcga

SEQ ID NO: 641117 - DNA, 305 bp, Homo sapiens
gccaacgtttgggccccaaaaccggtgcaggttttgctgtcatcgtcaggactccttgtgggctgtggggctggccactccttggccctttgccagatgccagctcaccctgcattggtccaggaccccaaggtcacctacctttccccaaatgccatcgaggaccctgaatttcagaaagccatgggcaaaaagagaaactggaaggaaagccaatcagaaacttcaacccaaagccaatttggctggtccaaaaatggggggctgtgataaagaatctttaataaagtggcttttccccccca

SEQ ID NO: 641118 - DNA, 295 bp, Homo sapiens
agaactagtaggcctcaagcagtcctcctgcctcagcctgccaaagtgctgggattacaagcatgagccactgctcctaattcttaagagatcatttctaaacctccatagtgtatactcttccagaattcactttttgcacacccaaaggtttcaaatggccaccacactttctcaaatgtatcttactgcaaaggcccagttgcagaagacagcaggattccatccatctgtttgcaattcaccatgcaggcccaggcccattcaaaattccatgcattcaagcagccacagg

SEQ ID NO: 641119 - DNA, 900 bp, Homo sapiens
  misc_feature (73)..(73): n is a, c, g, or t
  misc_feature (107)..(107): n is a, c, g, or t
  misc_feature (193)..(193): n is a, c, g, or t
cgtggtggctcatacctgtaatcccagcgctttcggaagccaaggcaggaggagtgcctcagctcaggggttngagaccatcctgggcaacatggtgaagccccatntccacaaaaaattaaaaataaaaataaatttaaaaaaaggcatgcatggtggcatatacctgtaatcccaggtaattggaggcaanacatcatctcaaaaaaaaaaaaaaaaaccttttttgtgaggcaaagaggccgggaaaggggttgaatacctctcgctttgtaaagggggccaaaaaggtgtctgaaccgggttttccgaatcgggaaggtaaccccagggggctactaagcgaggtggggatatcttctcccattcaagagacgtcctcgagggtttactagacacgtttatgttggccctcactgattgcgcgatctcgcaggctcctaaaggggagtttagaaagcggaggtgcccctcagtccccgatgataacctataggcctgtgcgggtgattcacaccgggttaaagactcttcaaagctcccttctcagcgaaatgggccatattccatctgatatagggagctcgtgggtgagaacccaatgacaggttcggattcatttggacctgaaaactggacccaaaaaaaaccttttcggcatgggggtttacaaaacaacctttggcaggtacggtctaacttattgctaactgaagggagactacacggtggggcacacactacggtactaaatttgtaaggcggcaccgggtccagccgtacccacacttgggggggggaacaccgagggcggattggaaccggtccactgaacggttctcagaaacacaacgggaagagacgaccacgaggcccacagcgctacaggacacagactga

SEQ ID NO: 641120 - DNA, 728 bp, Homo sapiens
tcatgaacccgcgggtaacgagcgttgagctcttcccggcaggaagaatatgacaaatagcacgaggcgagctcggttatgggaaagcgccgacgatgatgggctattctgcatgccgcccgcaagcatgagggactcggaaggatctatgcagcatgaagcagaaaaaggcaaacgagaagaaggaggaaccgcgaagtagcgtttgtggcattcggtgtccaatccctcttgcctttcgcctgtgttcctggagtccagtcccaccacgctcgtcgtttccgtcctgttagtgcatcacatggtcccatgcaccgatggcgattccctttgcccatgagtcgtgctagctgggtcccattttgttgcattcctttccccgtctaggtaggcctcgtctccccgcatgggcgcagctccctgcggggtgagcggggttaccccgttcgccagtgttttttacttccttgtggcggctcacgccctgaaaggtatttaacacagtaggctatcgtaatgagagataaaagaaacaaagggctaacataattgtagataaaaataaagacattagagaaacaaaattgaaaagagaaattttaatattgagggagtggagagagtgaacttagatatttgcacacggcaagaggggggtgcaaaagttcatgggcagaagggatgccttgggaagttagatactagagtacttaggcagtgaaattagg

SEQ ID NO: 641121 - DNA, 605 bp, Homo sapiens
gggcccaaaccaaggtttttaaaattttccggcctgaaaaaagtggaaaaaaagctttgccgtttgatttccaagggttttaaagtatttttaggcctcccctttgggggggggcttatttattaatttaatttgggtttgggggcccccccgggcttaaaatggaaatttttggcaacaattaaaaaacgctggggggcgttaaggaaaaaaattttgttgttccaaaaagatttttttttccgcgggaaaaaaaatatttttttttatgggaaggttttcaattataaaaattttttaacgctttctttttgttccacaaacacggccaataagggcgccgaatatcccggggaccacaacacaaaggggccgtttttccgcagagaaaaaaaaaaaaaagacgctgtccacaaatctctggggtgttgggggaaaaaaaaggagcaaaacgtggtttcctggggggaaatatttgtgcccccctccaacatggttgtgaggacactttttatttttttggcccgctgtattttaccaacaaaccccgccggaatatttccccgggggaaacccgggttatatttttttcccggggcgatgcg

SEQ ID NO: 641122 - DNA, 307 bp, Homo sapiens
tagagagtgcgtgtaactaagaactaaaagatagggaataataggagttgggatacagtgttagatactaacgatcttcaagctttgaagatgtcatgcatgaagaaaattatgggaaacactgttcccgagtaattacttacagcgcttagtgtaacatatggtagatcactgtctccgcatacagacactgtaggtacgtaaaaactaccttgattctttatacattatgagacgacactgactcccgcataatgtcgttagagattgtagacaaacggtactcggaagatttcgcaacaatggg

SEQ ID NO: 641123 - DNA, 446 bp, Homo sapiens
gttccaccgctgcctcacgcgtatacactgggcgtaactgagtcacccccggctccgcgcgagattctcactggatgattactcgtatgagaccacgagcgggaacttcacgtctttcccgggccttggctggaattttttggctctgctgttttcgccacgcccataaatcttacacctggaagctgctgattcacaccctccaccacgtacctcccgaaaaggactgtcctataagttgtacactttaaaaggtcatgtagaggttgtaatagaatggcctttcagcctggtgactattggatagagaactcttgaatactgcctgcatccgggcaccctggcccggttgccctaggacctcgcgggtcccctgatgcaaagaggtgtttggtacttacataagaaaaatcatttctgactgattttacgcaaaagaaattacc

SEQ ID NO: 641124 - DNA, 805 bp, Homo sapiens
gtgatgtcatatcgtatagtaatacgaaaaagcagatacaagcctgccggagttccctatctgctaaagaagtaatatggtgatcatcagtggggattcccggtacggaagagagacagctctgataacaatgtttcgtcagggacgacaagaacgcggacaggtagtcacttacccagtagtgtcacaccccgagtttgcttacgtgtaggtttgcattacccaccctggttgtgctgcgaatttgcattagaacctgatcatttcctggggccagcatctaccaggggcgtatgaccagtctagaggaccattacccttgtgctccccctcgaggcattgagagttatagttacctatgctggtcagaaacgctatgggtgtatcctagcgtggtgtgttactacgttgaaaactcagctgtcaactttctcctaaatacttcagcactttttgcattcttgtaccatttgtcggttgcttatattccacccttgtatttgtttgtaacttgtaaggctccctaggggggcaagcaaaattatgtgtcttatggcgtgtaccctgttataggtgcctggcaaatgcccaatgtttatatcaaggtcttaattatacaactttgagttatttcatcccaattcttcatggaagtgatgctcaagccttgctaaaaacactgagggtctcccgataagccacggcattggggatccttggttttcaaagtgcttctgttttccccgaaggtccacttgagatccacaaatccccctttcctcttgatttttgccatgtaagtata

SEQ ID NO: 641125 - DNA, 648 bp, Homo sapiens
gccatgataccggagtgggggccagcaagggttgctttagatgtactctccccagaagaagcactaaagcagtacagaaatgaacggtacatttgtggccacaaagccattgtatgtagccttagctcagcgcaaagaagagcgccaggctcacctcactaaccagtatatgcagagaatggcaagtgtacgaagctgttcccaaccctgtaatcaacccctaccagccagcacctccttcaggttacttcatggcagctatcacacagactcagaaccgtgctgaatactatcctcctagccaagttgctcaactaagaccatgtcctcgctggactgctcagggtgccagacctcatccattccaaaatatgcccggtgctatccgccctgctgctcctagaccaccatttagtactatgagaccagcttcttcacaggttccacgagtcatgtcaacacagcgtgttgctaacacatcaacacagacaatgggtccacgtcctgcagctggcgccgctgcagctactcctgctgtccgcaccgttccacagtataaatatgctgcaggagttcgcaatcctcagcaacatcttaatgcacagccacaagtaacatggcacagctggtgtcatgtccaggtcagga

SEQ ID NO: 641126 - DNA, 108 bp, Homo sapiens
  misc_feature (36)..(36): n is a, c, g, or t
gcttctctgcgcttcacgtgctcaggtcacaatgcntgcggacaagaagcagtccagaagttctgaggctggacatcggcccgctccccacaatgaaataaagttatt

SEQ ID NO: 641127 - DNA, 193 bp, Homo sapiens
  misc_feature (112)..(112): n is a, c, g, or t
tagaggatcccctccagtatgaattatttatgtgtagtagctttgaggattgcattaagagcttatcccagcattctatcacattatgatatgtgtttctctcctagtgtgnaatcctcgaagaagctgtggcggtcggatgaatgctagtaggcggaccggggatacctgagactcgacattcgtgaatcgt

SEQ ID NO: 641128 - DNA, 137 bp, Homo sapiens
ttaggattcgtagatcacaagcaagctaggcgcctgagcatctggttcaaacgggtgctggtcagaaggcagccgcccacttcccgtttcctctttaactgaggagaagctgatccagtttccggaaacaaaatcct

SEQ ID NO: 641129 - DNA, 839 bp, Homo sapiens
  misc_feature (419)..(419): n is a, c, g, or t
  misc_feature (600)..(600): n is a, c, g, or t
  misc_feature (637)..(637): n is a, c, g, or t
  misc_feature (735)..(735): n is a, c, g, or t
  misc_feature (780)..(780): n is a, c, g, or t
ggtccgccgattcctcctccttggtctgcgcgcgtccttgagctggcgtgaggccaaatgcaaatatgagtgagcgggaaggcctcctgcaccctggataccgtgtgggaagacaagcacaagtatgaggaggccgagcggcgcattcttacgaacactgaggcgctacacagggcggtgcgctctcgctgcctcagtcatgtccttgccaatgcctgagtgggccatcctatgaattggggcctgggcaggatcgacctctgtatggacgctgtatgaggctggaagcccactgtacgggtgtgcagcagtgctgatgatcccatggaaagatgctcgaggtactagccaacgggcaacgtccctcttgcctagacatacacatagcagggaagactgcttgcctcctcaaatggagnctggggcgtcgagccaccgacaggagacgctttggacaccagtcccttgagcgccttcctctgtgaagctgaaagcgatagttgatgtcgctggcactagaggtcgaactttttcgctggaacaccagtggacaacgcaggtagtcttcctccttatctccagcacaccgtaaaggcattnggtcaggtgcatctgcttgcgttcttggcgtccaggngccgaggccacttcgaggcctttcccatttggcacatattggggacccccattttcgagggtgtttcttccttagcaccgccccattgtgtgagatanacccaccggaggttgaggcccttggcccaggccacacttgttganaccgttcgtggggagggaccttccttcggggggttcatacccacaagggtcccgtcccc

SEQ ID NO: 641130 - DNA, 850 bp, Homo sapiens
  misc_feature (98)..(98): n is a, c, g, or t
  misc_feature (183)..(183): n is a, c, g, or t
  misc_feature (198)..(198): n is a, c, g, or t
  misc_feature (334)..(334): n is a, c, g, or t
  misc_feature (409)..(409): n is a, c, g, or t
  misc_feature (510)..(510): n is a, c, g, or t
  misc_feature (518)..(518): n is a, c, g, or t
  misc_feature (543)..(543): n is a, c, g, or t
  misc_feature (554)..(554): n is a, c, g, or t
  misc_feature (564)..(564): n is a, c, g, or t
  misc_feature (566)..(566): n is a, c, g, or t
  misc_feature (682)..(682): n is a, c, g, or t
  misc_feature (692)..(692): n is a, c, g, or t
  misc_feature (708)..(708): n is a, c, g, or t
  misc_feature (828)..(828): n is a, c, g, or t
cgccggccgccggtgtccggaccgctcgcccccgtttggacccgacttcggttcttctggggtgttgatgctcctaaagcccgagagcacgtgtccanaccctagcctgtacgacgctgactctgcccggtcccagaaccaaagccatgccggggtgtggcctctgaccccacgcggtagggnaccccgcttgcgggnaccccacctggcaacccgcacctcccagcctcgcagccggcctgagccgccatgcgcgggaacgttgctgccgctggccggcctctacctggtgcagggcctgccctacgggctccagtccggcctcctgccagtnctgctgcgtgccggcggcctctcgctgacgcgcgtggggctggccaaggttctgtacgctccgtggctgctcaanctggcttgggccccgctggtggacgcgcagggctcggcgagggcctgggtgacgcgcacacggcgggcctgggcctggtgtgtgggctgcattcctgggcntccccctncatggagcctggccaggcccgggcntgcccgccgcntgtggcgggngnttgcctgcctgtttgttgaaccctggggtgccgccaatgcacggaatgtggcccctggaccgcgcctggcctgtgcagcctgcctggagcccggccgaacctgggggccgggcaanacccgtgcanggtggtcgcgtacaangctggggggccgcgctacctggggggcgcgctgctggcgctgctgcccaccttctcgtggccgcaactctttctgctcctggctgcacctactggctggccgcggcctggcctgggctgnacaagcctgcggcggctccaca

SEQ ID NO: 641131 - DNA, 904 bp, Homo sapiens
gccatgaagagcaccatgcagccaaaagcctggtggattggcaaagccattgctgtcttaacctctggtggagatgcccaaggtatgaatgctgctgtcagggctgtggtacgagttggtatcttcaccggtgcccgtgtcttcttatgtccatgagggttatcaaggcctggtggatggtggagatcacatcaaggaagccacctgggcacagcgtaacgatgatgcttcagactgggcaggcacggacgattggaagtgcccggtgcaaggacatttcgggaacgagcaaggacgaatccgagcatgctacaacctgtgtgaacgcgtgggatcaccaatctctgtagtcatatggcggagtgatggcagcctcactggagtgctgacaccttaccagttctgagtggacgtgacttgtatgacagatgacctcccagaaagcaggtaagatcacagatgaggagagtacgaagatcacagactaactgaacattgatgggcctggattgggtacaaatagagaatgacttctgtatggaacagactatgacccattggcaactgactcgtgaccatgaaatcggatccatggacaaaagcacgatgcccatcaataccacctggcccagagccaaccagaggacaataggagtaagaaagtaaagagacagcaaaatggatgagataacccatgggccccatatggatcaaccaacatcattgacccaagatggagaagccagacacatgagacgattacacaacaacaccttgacaattgcgtcacacgcaaacaccaccgaccctggggaagagaaaacaccattatggaacgcagaacaccaaccgacacaacagacaccccggtggcacactgcattagcaacatacatatttgaag

SEQ ID NO: 641132 - DNA, 358 bp, Homo sapiens
agaggctttagatggctgtgcgcaaaggagatcctcatgtgagctatgcccgcgtctgtaggtggcctgagctttacaaaaatgagactcatgtgtaaatattgtcagtatgcgtttgactttggaattgatctctcaagattaacactgtagagtaatgcttcattaagtatgaaggtgaaggatgaatatgtgcatgactttgagggacaggcattggtgtgcactgaaggacattcaattcccattcagcattcaccaagtaatcgtgcattgacagagacatacaggaccccaactctgttagccccatctgaggctaatgctaccagaactgtcaacttttccctttctgtgg

SEQ ID NO: 641133 - DNA, 437 bp, Homo sapiens
  misc_feature (8)..(8): n is a, c, g, or t
accccagnccgctcctcagcccccacccctcccttccaggagtgcagcccgtcccccctcagcaggctggggacggccttgcgcgctgcggggacccgacggggcagccccagccaggccgtcaggctccgagagaggtgcggagccaacactgcctcccagcgtcccagggtcctgtgaccgggaaggccccgcatctgctgcacccggagtggtggaggccagaacgctcgccagcaaacccgcccgttcacagaggcaccggagcgggcgggcgggggcggcctgcggagcagccagtcccgggcaccccacgccgaccgccgcgcgtccgggccggtctctgggcccctctgctggtggaacccggcagcgcctcctccgtctcagccgcgtcggtcccaggcgcctcccctacccgcacgcccaggctgggt

SEQ ID NO: 641134 - DNA, 269 bp, Homo sapiens
tatccacaggcagacacaaagttaaatgatgcaggattgccaaccacaggaatgaagacgatttctatacggaaataaacagaatgttaggacactccagtgtacaaggctcacaggggtcaaatatatgatacaaactgccatagcccacatggaaattgttggatcctgaaaccggaagtctgtggtgtttggattcagacagaactcgttcaagtcgcttatacaatgccgttgatagtccatctctgttacttacctttattttc

SEQ ID NO: 641135 - DNA, 311 bp, Homo sapiens
cttctagctcggtaccccatagaacaagcctgtgccaatggctgatcctagcgcgatgaagtgaacgtgccgagcactcagtcctctttttaatcctttatcaccggatgatgacgtctctgtttttgcgttactgcccatacataaaaatcctttactgttacgcagtagactttcttgaatttcatccagcgaatggacgatgtttcacgtgaaacattattccgtttccatacaagaaccacgtggggacaaccagtagtttctcgctcccataagttaaccacttcggcggggtcggactgactaga

SEQ ID NO: 641136 - DNA, 174 bp, Homo sapiens
acaccgagtaggaatatagatagagtagcctatcgctgtactgagactaggactacggtagtaagcatgactcccagaagtaagcacccaggcctgggaagatgccgataacatactgcagcagaagggcagtggatggaggggccactcaggggaggtgtttcccgagcagac

SEQ ID NO: 641137 - DNA, 266 bp, Homo sapiens
ctaaaatttttttttggaaatttcccaaatccttttccccaaattcattttgttttttcaacaacctcatctgcattttctatttctatatggaaccggctctatattgctatatctctgtataaactttcccagccctgtttgtttcccccccatccccttttgtttttgggaaccattttccccccccaagttcccccttttatgtttttactccctccctggtctttgaatgccttcgcctgtttaaagggttgggctttcca

SEQ ID NO: 641138 - DNA, 136 bp, Homo sapiens
ggggaaatggggggatttttcgggggacccctggcccccaaaggtggacgggcccccaaaggtggaaaaatttttttttggccaattgggtggtttaaaaaaaaaattcggggaaaattaaaagccgggacttcca

SEQ ID NO: 641139 - DNA, 219 bp, Homo sapiens
cggcacgaggattttgatgttggagcaaccaactgcagaacaagataattcatactgttgacattaaaattaaaattttcttttttttttgagacaaagtctctctgtcactcaggctgatgtgcagtggcactgtctttgttcactgcagcctccacctcccgggttcaagtgattctccagtatatttgtaaaaaataaaaaaaaactaaacccgta

SEQ ID NO: 641140 - DNA, 542 bp, Homo sapiens
tgaggatctgctctagtctgaatcagactgtagctcgagagtaatcatatagaaaataagtcgggggggagaggagaaggaaaaaagagcggagctgcaatccggggcagaggtgtgtcctgtgctatgaaaaacacgtaggaataggtgaaaattagtctatttagtctatgcattgagctctagggaaagtatgtcgtgcaagagatgagagtaacaggtgagagtacgtatactgtattagaaagtgagcgagccctttgttccatgtaagacagtcttgccagtccagtttaggttgacatgtggacctgagtacatcaagtttgaggattcagtttaatgaaaatgatgaacattgtaacattttagttggattagtatcatagtgctgtaaatactacttcatgctgtttcttttttgtgaatttgcttttatgaatatatagcacttatctagataaatatactacaaatgtgattattgatggaggtgggcctgtcccacagaaagtttcaacattgagtgtgaaacacttgtg

SEQ ID NO: 641141 - DNA, 1205 bp, Homo sapiens
  misc_feature (23)..(23): n is a, c, g, or t
  misc_feature (33)..(33): n is a, c, g, or t
  misc_feature (38)..(39): n is a, c, g, or t
  misc_feature (54)..(54): n is a, c, g, or t
  misc_feature (60)..(60): n is a, c, g, or t
  misc_feature (62)..(62): n is a, c, g, or t
  misc_feature (65)..(65): n is a, c, g, or t
  misc_feature (130)..(130): n is a, c, g, or t
gaggacgaggaaacaatcgtggntacaaaaatnaatcnnagggctacaaccagnggcagnanggncaattctggggtcagaagccatggagtcagcattatcaccaaggatattattgaatacccaaatnaaacgaactgatacatatttctccaaaaccttcacaagaagtcgactgttttctttagtaggctaactttttaaacattccacaagaggaagtgcctgcgggttccttttttagaagctttgtgggttgattttttttcttttcttttttgtacatttttaattgcagtttaaaagtgaatcgtaagagaacctcagcattgtgcacgataagagaatgtgtcagtatttcagggttctacattttatctgtaaaatgtgacttttttttttttttatcacaacagaagtaaaaggtggcttggtaccgggggtcttttattaagaatttactccccccatttctcacagagaataacagtcgggagtcatggtcacaatataatagaatgtgttagcaaccagattcatgtagggactaaggggtcctcatgaatggcattaagactctgtacggctcatattacactccatcctctcgtgtagttggcggggtaggggagggggtaagctaaatcatagtttcggacaataacggggagggttttttcttaaaataacaagggaatgggtataatggggatggaaaactaaaactgggaactaagatagagaagagtggagggtatgtagaagggcggttaaaattgtaaaactgggtgcataatgggggaggctcaaactgtgagggttaatacataatttttcccatgtctgcaattggatctgaaaagaaagctggtttgcccatttcttattgaagaagcttgtgtaaatccaggggcaaggggtctatatgacgttggcatgggctgtgtgcccttctcccacaaaataggttaactgctggccggagtaggtaactcccccatcttgtaaggccaatgaaaccgtggttccgccataatctttaatgtaacccggcggccggaggggacacaagccggcggagttgttttccaaagaagaggggcgagacacacagggggggccacaagaactttaaaaaagggggggcgaagatacaggagcggagacacccgtagagagccttagggttaaaagcgtaccgacaa

SEQ ID NO: 641142 - DNA, 414 bp, Homo sapiens
gtgtggataggcgagcttgaccaggatggcattcagcgaaaagccggccgatgcgatgaccgcgagccagatgccgaggcgcgcgtcggcgctgctcaatattttcgtcgtccaccgaggatggaaccgagcacgccgcgcacgatttcgcggccgatcgagctggcgacggtgcgcgccaccgtcttggcggcggtctgggccagaccgtcacgctgaccgccgcgcgggccggtcgagccgaacaccagatcctgcagcccgccgagcaggccgccgtcaccggctggcgcgttggtcgcaccgggttgtgcgcccggcacaggcttgccggtggcgaccggattcgcgttcactgcagcggccagcatttcgtaggcggactcgcggtccagcgtctgttcgtagcggccg

SEQ ID NO: 641143 - DNA, 207 bp, Homo sapiens
  misc_feature (6)..(6): n is a, c, g, or t
  misc_feature (18)..(18): n is a, c, g, or t
  misc_feature (27)..(27): n is a, c, g, or t
  misc_feature (29)..(29): n is a, c, g, or t
  misc_feature (63)..(63): n is a, c, g, or t
  misc_feature (65)..(65): n is a, c, g, or t
  misc_feature (103)..(103): n is a, c, g, or t
  misc_feature (119)..(119): n is a, c, g, or t
  misc_feature (125)..(125): n is a, c, g, or t
  misc_feature (127)..(127): n is a, c, g, or t
  misc_feature (167)..(167): n is a, c, g, or t
  misc_feature (178)..(178): n is a, c, g, or t
caattnacagcaccaaantcacctcananacctacccaaaaggcataattaaccttacttccntnttctctccactcatcctaccctactcctaatcacatancctattccccgagcantctcantnacaatatatacaccaacaaacaatgttcaaccagtaactnctactaatcancgcccataatcatacaagcccccgcaaac

SEQ ID NO: 641144 - DNA, 254 bp, Homo sapiens
cgtaatgctgaaagcggcagggaaacgtgctaccatacccttcccagacttctgtcggggctggccttgctgtctgtctcctctatgccactgccttgttctctgggccctctaccagttcgatgagaagtatggcggccagcctcggggctcgagagatgtaagctgcagccggcaactatgcctactaacgtgtgtgcctgggaaccgccgaactggctgttggcccatccttgaagggcctatcaacctaa

SEQ ID NO: 641145 - DNA, 212 bp, Homo sapiens
ggagctggggctcgcttaggctgggtcacgcttccctggtgcctgcacccctcaagcctgtctcaccagtggcctgccctctcgctccagtgctgttgtcattgtgtctccttgggccgctgggtggtggcgtggtccgggtttgtaggagtggtctagtgggggggtaggagggatgtgggtgtgtggcttggggttgcttacggtgctgc

SEQ ID NO: 641146 - DNA, 130 bp, Homo sapiens
tgaggatccccgctacaacgcaaaggaatcatgaaatctgccaatgccaactcccgtcaggctgatccggaagctcatcaaagatgtggctgatcgtcctgcaaggcctgtgacggtccattccctgggc

SEQ ID NO: 641147 - DNA, 231 bp, Homo sapiens
cgctcgtccctgcgaagcggcttttacaagaaggatgagaacaagttgagcagtgccaacggccatgaagaacgtgcataaagaggaaaaaaagcaagagcagaagtcgtagtctataacgaaagagaagcataagtaggaacggaagcgaagtatagacagagaaaggaacatgagcaaaagccgtgaaagaaagcgaagttgaagcaaagagaggcgacggagccgctc

SEQ ID NO: 641148 - DNA, 422 bp, Homo sapiens
aaatactaccattattattttgtgagttatgacagcagtgcaacttgtgaccagcattgtaaagccttacaggtctgtgcaattatgaatcttgatagcatgtcctatgatgattgccttaaacagcatttataaagcacagtcactagtattccagttgtgtttgtagaaaaaaaaaatcacatcatggtgctcctgcgatcagcttctgaagtgctgggagcataggaagattgacattctgtgtgacttgtgaggctcagatgctgataccagtaacattcaaaattaacttcacgcattgaatacatttaaactgttcattagcggagtgatatttggacataaatatctcgtcttccaattttatgtaattatacctaacttatacccttgtaaaacttgtcatctatgcaataaag

SEQ ID NO: 641149 - DNA, 327 bp, Homo sapiens
  misc_feature (20)..(20): n is a, c, g, or t
  misc_feature (22)..(22): n is a, c, g, or t
  misc_feature (324)..(324): n is a, c, g, or t
ataaggattacaggcgtgcncncattacctggctgacacttcattcctttttatggctgagtaatattccattgcatggatggaacacttttatgtatccattcatccattgatggacattttggttgtttctcttttttggctatcatgaataatgcttccataaacattgcgaacaaggttttatgtggatatatattctcatttcccttgaatatgtacctaagagtggaattgctgggtcatatgttaactatgtttcacccttggaggaactgtggagctgaatttcacagcagctgcacccttttacattcccaccancag

SEQ ID NO: 641150 - DNA, 334 bp, Homo sapiens
  misc_feature (28)..(29): n is a, c, g, or t
  misc_feature (64)..(64): n is a, c, g, or t
aaaccttgggttatatagaaggacttannaatttagtgttgtgtccgggtgaggtggctcctcncctgtaatttcagtgttttgggaggctgatgcgggaggattgcttgaagccaggagtttgagaccaaccagcctgggcctcatagtgagattccatctctacaaaaaatttttaaaaattagctgcgtgtagtggtttgcacctgtagtcccagctactcaggaagctaaggcaggatcatttgagccaaagttggagcctgtggtgagctatgatcgcaccactacactccaagatgggtgacagagtgagaccctatctctaaaaaaa

SEQ ID NO: 641151 - DNA, 157 bp, Homo sapiens
ttcagactagtgatgagtgtgtggctacatacaaaggagatccttggaggtgaaagggaagggagtatgtagggctcaaacgatgagcaagagtggaatcaaataaaatgcttccactaccaaacagacattagatgaaaaccttaaaagataataa

SEQ ID NO: 641152 - DNA, 101 bp, Homo sapiens
gcacacgcgagtatcacactgcacacgccgaaagtcagactgcacacgccgagcatcacaccctgagatggggcaagaatccaatatcgccgatcttcacg

SEQ ID NO: 641153 - DNA, 139 bp, Homo sapiens
tacgtcccctcctactcgggcccccgactactggcgttccccgcctacacaccacaccactaccgcttctgactcttaccctccctctctcctacctccgtgctcgcactctggctactacgtgggacggccgggacgg

SEQ ID NO: 641154 - DNA, 355 bp, Homo sapiens
gggatttcccagcccaaggcagggtttttccagcaccctcctgtaagcagaagtttcagggtccagaacctttccttaggccccacccccaccccaatttctgccttccaaacaaacagccccaggctaagggttagacagggtgagcctcatacagactgtgcctttatggccccaaccttgggagaagaattttctgttaacctggaagactactgaatcatttttcccttgcccagtggaataggaccttaacatcccccttccggggaaagtgggttattttaattgggggtagcaatttatactgttttgtaaactacatttcctacaaaatatggatttattcttttga

SEQ ID NO: 641155 - DNA, 476 bp, Homo sapiens
tttaagagcgtgggtcgttttgattacatggtcaacgcacctttcataagcttctcttgcaggaataacctccatcccgcaagctcataggaaattactataaaccacacaggattcttgaacgtactgggggtttccaagagggaatgagtccgaccccaaggtgtcccggtcgctaacaaaaacaaactaaagggcctaaaactggacgcgagcccatatgcccaacagggggcacagaaatgataaagaaccgttcctaacatccatggcaacttcaacacacgaggatactgacccttacatattagcgattttagggaaaacttccacccttttaagaaagaagaacaagcttaatagctggatttcacagtgatcgaaatatttgttactatcagtattatgagacaataccttgggctgttggatgcctaaagagactacctgcgtgtcatatatccgatcagaaccaa

SEQ ID NO: 641156 - DNA, 104 bp, Homo sapiens
ggaggaggtggcgatatatcgaagactccgaggcggatccaaaccgtgtataaggaggccacgggagtccccctttaagatgggcccccccacttccctaccga

SEQ ID NO: 641157 - DNA, 737 bp, Homo sapiens
agcggagggaaccccggctgctcagcgcgctccgaggtcatggagatccccgggagcctgtgcaagaacgtcgaactgagcaataacgcgcagaacgaggggaatgcagacgagcaagctcaggtcggcgaccaagaccatcatgtcagcaggaagaagagaggtcaggtggtggggagcatgaggtggctttcggtggttgcactagtctggtaagaggcttgtgtggagcgggaaagattactgtgagcatggggtaggaggagtacctggtgtgtcatggtatgccatgctagcacgtctggatggtgagcaagtatgacgtgcaaggtgctcaataagaaatcttggctgtagtgctgaagacagagaagagactgttcgaggcatcgagagagttgctagaactgttagcagatgcgtaggcgttagtgtgcatcacaagttatcatagtcaccttacactctaggtatcgctagacaatgcaaggcaagattcatgtaaggtgcaagtttaccgtgtaaggaagtatttgtagatgactccgtctgcatgtttgtgaacagagggatgtcaaaggactctactaaaaagcccgggcaggagagattaccaggtggcactgggatcgatgctgaatatgaacaggcagaggcgcctgagttggtgctgagaaacagactccgtgtgatgtaagtgactgtgtccagacaagtagtggaactttacaggaacg

SEQ ID NO: 641158 - DNA, 219 bp, Homo sapiens
ttttaaccggggggggggggccctttcccaaaaacctgggccccaaaggtgttttttaaggggatgggaaggtaaccctttcgttcccttttgggatgggaaaaaggggggttggggggtgggtttttttgtttggtttgttggtttgttttaaaaattcccccaggggtgggatttctttttgaatggggggtgggggggccccgggggaatttttta

SEQ ID NO: 641159 - DNA, 155 bp, Homo sapiens
  misc_feature (15)..(15): n is a, c, g, or t
ctgatgtgaacttcntctctctccccagaaaaggctcaacatcaactatatagccaacatgtccaaggtgtttaagaagaccagctccaatgggaagctctccatctacctggggaaacgggacttcgtggaccatgtggacacggtggaaccca

SEQ ID NO: 641160 - DNA, 1538 bp, Homo sapiens
ggccggggaatgacgtcaatccgagctcgtcccggcctcaccagcgccatgctgggctcgcgagccgcggggttcgcgcggggcctgcgggctttggcactggcgtggctgccgggctggcggggccgctccttcgccctggcgcgtgcggcaggcgcgccccacggtggtgacttgcagccccccgcctgtcccgagccgcgcgggcgccagctcagtttgtccgcggcggcggtggtggactctgcgccccgccccctgcagccgtacttgcgcctcatgcggttggacaagcccattggaacctggcttctgtatttaccatgtacctggagcattggtttggcagctgaaccaggttgttttccagattggtacatgctctccctctttggcactggagctattctgatgcgtggagcaggctgtactattaatgacatgtgggaccaggactatgataaaaaggttacaagaacagccaatcgtccaatagccgctggagacatttcaacttttcagtcctttgtttttcttgggggacagctaaccctggcactgggtgttcttctgtgtctaaattactacagtatagctctgggagcaggatccttacttcttgtcatcacctacccactaatgaaaagaatttcatactggcctcaactagccttgggcttgacatttaattggggagcgttacttggatggtctgctatcaagggttcctgtgatccatctgtttgcctgcctctttatttttctggagttatgtggacactaatatatgacactatttatgcccatcaggacaaaagagatgatgttttgattggtcttaagtcaacggctctgcggttcggagaaaataccaagccgtggctcagcggcttcagtgttgcaatgctgggggcactgagcctagtgggtgtgaacagtggacagactgctccctactacgctgccctgggtgctgtaggagcccatctgactcaccagatttacactctagacatccacagacctgaggattgttggaataaatttatctccaaccgaacactgggactaatagtttttttagggattgtccttgggaatttgtggaaagaaaagaagacagacaaaacaaagaagggtatagagaataaaatagaaaattaatgaatgaaatttatctaggaatttttaaaacattttttacaaaatataattagatttgaatacaaaatctgatacaatatgttaaagaattaagaacctgaagatgaagatttagagcatatttacctggattttacttatttgctagcaaaattcccccttgtcacagaaaccagggactcttcaggatttgagatggccttgagtattttagttgatacattcttctgcccattataattctcacctgaagttatggggattgcacgggttttggcactttagaaaaagcctgatgtgggtcttacataaatgaatgtctgtataagaaaatggactcttttttttagggaaaaataaaagcaactatggga

SEQ ID NO: 641161 - DNA, 1180 bp, Homo sapiens
tcgctgttctgtaactcggtggtctcttacctcgagtggtgctcctggtgttttccccgatgtagcctcccgtctttgctgcctctgttctccgcaacacaatcccacgagccgcgttggtcaccccgttggttttttgcgccccctcctcttgtgttgccttgaagccctgtgcggactgtttggtcgcctgcgtcagcggctcgacccactcagattgctagtgcacacttgctgggttgtcccaccacctttgctcccaccttgtctgcccacctctcttgtcgtgaacatcaccttctccaccaatggggtgggtttcctctggcttttgcccctgtggcttttgtccacagtcacacacacggttgtctgtgtttctcgtcatttgttgtgtacttttgtggtcaagtgcccccaccccccccccctctgttcctaccgccctcgttgggtcactctttgtcccctcttgtgtcgcacatactccctcttgggggtgcccgcgtgccccctctcgtttctatggcggagatgtcctccacaggtgtgacccctcctcccccctcgagaagtgtgggaaaagcgaacggtacacggaagttttccaccagtcgcccgtgttttctaagagatccgccttgaccccctatatccccttctcacaattttgcgctctttgtttacaaggaagcataccaagtataacaacacctagcttgtgggttctctggggggaataacgtggaatattttgtcgttctactcgttgtgttttgtactataaatgggacatttccggagatattttaacatccatactatgccccgggcttgtccccctttggtggccccactattctacaggcggcaggggacattctcaccccggctgcgtgggtgagacatcccccccccccccgggactccccttccctctggctcctctcccctctttctatgaggaaataagatgctgtgaactttttggaacctcccgttttttgattttttatttgggtaggttttggcggtcccggcccttttttttaccccctggaggaaataagatgagggagaaaggaaaaggggaggagaacttctcccctccccccttcacccttagcttccttgaaaatgggccccccccgaataaatctgcccctttttataaatgctt

SEQ ID NO: 641162 - DNA, 3282 bp, Homo sapiens
ggccggggaatgacgtcaatccgagctcgtcccggcctcaccagcgccatgctgggctcgcgagccgcggggttcgcgcggggcctgcgggctttggcactggcgtggctgccgggctggcggggccgctccttcgccctggcgcgtgcggcaggcgcgccccacggtggtgacttgcagccccccgcctgtcccgagccgcgcgggcgccagctcagtttgtccgcggcggcggtggtggactctgcgccccgccccctgcagccgtacttgcgcctcatgcggttggacaagcccattggtgagtgcgggcgggcgggcagcccgggaatttgcaagtagcagccgccgagtcggctccgcggagctgtccgcggcggccggccggggcgtgatggaaatgagaacctgaaagcttgggcttggctgccgggtgccgtgcgccctggggcgaatcacctcgggacactttgaaatgagagcctgaaagcttgagcttggctgccggctgccgtgcgccctggggcgagtcacctcaggacacgcagtcgggacagtctcctaaaggacccgccagtttcacgtctgtctgcatcctgagcacctgaagcgggcaagataattctcattccacaaacacttgtttaaatggtgactcaagcggaaggttccgttctcgtggccctccttcatttattagaatgtttgattctccccgcaatcttgtaaggcccacaaagacaatccttaagacagttaagacgctgaggaaactaaggctcctcgtcagagccagaccagaagaactctgtgttttgatgctgagtcggagctcttttacctgcatcacccataaggcaaagatttaattcatttgaacgcagcagggacagcgcttacggactgcctgtcagcttacaatcgcccccgacagaaagattttcctgaccttcctattttaattaacacctaccaacctcactttctatcgctttatccgcaatttttcttaatagcactcaccactaactaaccttatgcgcttgttgattgattggcttctccagtagtgttaagtgaattaataagttcctactacgttgtccggccatagagatagaaaaagctatggaaaccctttgctttcaaggaactctggtctagttgaaaaagactatttggtgagctaggaaaatatggatcaaatatgagtgatacaaaagcaagtgctacaggaaaaagagaaattactgtggatcccttgctggaaagtttcgagaagaaattatactccaaaggacaagttgattttgcagaggagggaagagatcttagtgcgggaagtacttttgcaaagacccaagggtggagtgttagaacactaagaatacgagcctgacctggaacaccaagtgggtgtggaaaatgggaaacgagactagacaagaacatatctgaagaagctggatagcgtggaggaagaagtgaaggatgaactccagccaatctagatgatgacatttgccattgcagtgtatggagatgtagtcaaaggcctaggtacatttactccacttttgcccgtacaagacccgaattaggccttgcttttggtattctagatttatgcacgacctatttgggattagagcactaagttataacaatcagctatcaaagcataaaagcctactgaatgataggtacagccctgccatcattgggaagctgtgtatgacccccatgagttttggggccacattcacgttgagaggcatgcatttccaagcccagttccaatctgaagcctggctgtaattctgttcttggagtctgtggcatggagtggcagtgtagccttatagatgaacatctgccattattcccatttccccagttaaacctctggcttctatcttagtggctggaccttccgccatgtaacagaaggcaacaaaggggttatgagcaaaactttggagccaaacctcttggatgtgaacctccaccctgctcatctgagggaccttggataaattacttcacctctctgggcatccgttttcatctgtaaaatgaagatactattaatgataatatggacgttatgaggtcacgaaaattcattaatatatgttaagtgcttagaacagtgcctgtcataatatgtgctgaagaaatagccattattatcttagaagtggggaatggagaaaattgtacttacagattgtgtatgtttggaagataccagcctgcatggtttggttctaaataaggtgatcattacaggatttttcagaaaactaaatagtactatgttagaattcgctcaacaaatgtattttgaacccctaccatatgccagaaacaataattgacaggagtagaattccaggtttgataattctttatttaaattcttattttgtgggataattatgtgttcgttgttttactttgttgaagttatatcttgttaccttcattgatcaatagtaggttttcgttgtttttgagaaggcaatacagcttctttcaaatgggctaaactaccttattccagaaagtgtcagcaggtggcactctttccaccaaattggaagtgtaattttttgttttaccacgtttatgggtgattatgttgtcttgaagatcatctgtttttgatctgtccatcacccctcagaacttgctcattttatttcatctcccatagagtttttcccttttctacaaaaacatttctttttgcaatctacttgtctcttgtctttgctacctctgcgtctttcttcacagaaaagtatggggaatgaaagtgtcatatggaagacacaacaaaacaaaaaactggcaaggaatcaaggcgggcccacacacgcgggcgaaccgaccgctgctatgccagacatcaaggaagacccgacgtgacaccgattggcctccggaaccaactggcagccacaacgggccggcctggacttacaacccttagcccattaaccgctcgtgccttggcacaaaagccccctcatcgcgcacgcccgcattgcaaacaggcgtgatgtcacactcgtccatcgcacagacgaccacaaccgaacacttcccacctgccctcaaaaccacacactccgtgggcgcgcccacaacgacaaccactccccacaccgggaagcgccgcacacaccgccgccgccgaaagtgccacacagcagacgaccgccgcacaccaaaacaacacacaacaacgacaatcccaccagccgcaccaaccaa

SEQ ID NO: 641163 - DNA, 781 bp, Homo sapiens
  misc_feature (563)..(563): n is a, c, g, or t
  misc_feature (565)..(565): n is a, c, g, or t
  misc_feature (568)..(568): n is a, c, g, or t
  misc_feature (570)..(570): n is a, c, g, or t
  misc_feature (572)..(572): n is a, c, g, or t
  misc_feature (580)..(581): n is a, c, g, or t
  misc_feature (588)..(588): n is a, c, g, or t
  misc_feature (592)..(592): n is a, c, g, or t
  misc_feature (601)..(603): n is a, c, g, or t
ctgggaatttgtggaaagaaaagaagacagacaaaacaaagaagggtatagagaataaatttatctccaaccgaacactgggactaatagtttttttagggattgtccttgggaatttgtggaaagaaaagaagacagacaaaacaaagaagggtatagagaataaaatagaaaattaatgaatgaaatttatctaggaatttttaaaacattttttacaaaatataattagatttgaatacaaaatctgatacaatatgttaaagaattaagaacctgaagatgaagatttagagcatatttacctggattttacttatttgctagcaaaattcccccttgtcacagaaaccagggactcttcaggatttgagatggccttgagtattttagttgatacattcttctgcccattataattctcacctgaagttatggggattgcacgggttttggcactttagaaaaagcctgatgtgggtcttacataaatgaatgtctgtataagaaaatggactcttttttttagggaaaaataaaagcaactatgggaccaaacaaancnaancnanaacaacannaaaacanaaancaaaaaacnnnacaaacagacacgcggcacgacgacgcaccaccacgaccagcccccccctaccacgcccacgaccacctcccgagaccccccccgacagaccaaccccggcccccgcagcgcaagagacgactacacaacgagccgccgaccaccagcacacacacgccgcgcacgcacaaaagacac

SEQ ID NO: 641164 - DNA, 1656 bp, Homo sapiens
ggccggggaatgacgtcaatccgagctcgtcccggcctcaccagcgccatgctgggctcgcgagccgcggggttcgcgcggggcctgcgggctttggcactggcgtggctgccgggctggcggggccgctccttcgccctggcgcgtgcggcaggcgcgccccacggtggtgacttgcagccccccgcctgtcccgagccgcgcgggcgccagctcagtttgtccgcggcggcggtggtggactctgcgccccgccccctgcagccgtacttgcgcctcatgcggttggacaagcccattggaacctggcttctgtatttaccatgtacctggagcattggtttggcagctgaaccaggttgttttccagattggtacatgctctccctctttggcactggagctattctgatgcgtggagcaggctgtactattaatgacatgtgggaccaggactatgataaaaaggttacaagaacagccaatcgtccaatagccgctggagacatttcaacttttcagtcctttgtttttcttgggggacagctaaccctggcactgggtgttcttctgtgtctaaattactacagtatagctctgggagcaggatccttacttcttgtcatcacctacccactaatgaaaagaatttcatactggcctcaactagccttgggcttgacatttaattggggagcgttacttggatggtctgctatcaagggttcctgtgatccatctgtttgcctgcctctttatttttctggagttatgtggacactaatatatgacactatttatgcccatcaggacaaaagagatgatgttttgattggtcttaagtcaacggctctgcggttcggagaaaataccaagccgtggctcagcggcttcagtgttgcaatgctgggggcactgagcctagtgggtgtgaacagtggacagactgctccctactacgctgccctgggtgctgtaggagcccatctgactcaccagaaatggggtcttgagattttgcccaggctggtctgaaattcctggcttcaagcaatcttcctgccctggtctcccaaaagtgctgggattaccagtgtgagctaccaaccccagccaagtttacactctagacatccacagacctgaggattgttggaataaatttatctccaaccgaacactgggactaatagtttttttagggattgtccttgggaatttgtggaaagaaaagaagacagacaaaacaaagaagggtatagagaataaaatagaaaattaatgaatgaaatttatctaggaatttttaaaacattttttacaaaatataattagatttgaatacaaaatctgatacaatatgttaaagaattaagaacctgaagatgaagatttagagcatatttacctggattttacttatttgctagcaaaattcccccttgtcacagaaaccagggactcttcaggatttgagatggccttgagtattttagttgatacattcttctgcccattataattctcacctgaagttatggggattgcacgggttttggcactttagaaaaagcctgatgtgggtcttacataaatgaatgtctgtataagaaaatggactcttttttttagggaaaaataaaagcaactatggga

SEQ ID NO: 641165 - DNA, 1834 bp, Homo sapiens
ggccggggaatgacgtcaatccgagctcgtcccggcctcaccagcgccatgctgggctcgcgagccgcggggttcgcgcggggcctgcgggctttggcactggcgtggctgccgggctggcggggccgctccttcgccctggcgcgtgcggcaggcgcgccccacggtggtgacttgcagccccccgcctgtcccgagccgcgcgggcgccagctcagtttgtccgcggcggcggtggtggactctgcgccccgccccctgcagccgtacttgcgcctcatgcggttggacaagcccattggaacctggcttctgtatttaccatgtacctggagcattggtttggcagctgaaccaggttgttttccagattggtacatgctctccctctttggcactggagctattctgatgcgtggagcaggctgtactattaatgacatgtgggaccaggactatgataaaaaggttacaagaacagccaatcgtccaatagccgctggagacatttcaacttttcagtcctttgtttttcttgggggacagctaaccctggcactgggtgttcttctgtgtctaaattactacagtatagctctgggagcaggatccttacttcttgtcatcacctacccactaatgaaaagaatttcatactggcctcaactagccttgggcttgacatttaattggggagcgttacttggatggtctgctatcaagggttcctgtgatccatctgtttgcctgcctctttatttttctggagttatgtggacactaatatatgacactatttatgcccatcaggacaaaagagatgatgttttgattggtcttaagtcaacggctctgcggttcggagaaaataccaagccgtggctcagcggcttcagtgttgcaatgctgggggcactgagcctagtgggtgtgaacagtggacagactgctccctactacgctgccctgggtgctgtaggagcccatctgactcaccagaaatggggtcttgagattttgcccaggctggtctgaaattcctggcttcaagcaatcttcctgccctggtctcccaaaagtgctgggattaccagtgtgagctaccaaccccagccaaggtatattattttttaaaaataatataggcctaaatccaaattttcccatctgattttcctggaattacttctgattcatgtctggaaaaatttcagtgatatctgaagcttgtggtttgagttgaattactctaaaagcaaactgacagataaagcttttaaaaaaaaatctgggtttctagtgatggttagtagactaattattcataaatttggtttctgctggcataaagaccaaggacagataagacatgaaatgcggaacatgtcaaagttctgccagtagagagcaggaagctgtcatttcaggatattcacccacaccacatcccctacctgtcagaaacttatgttgagaatctacattgttgacttgtaaatgaatgaactaaatctaattttgattaaatcacttgctaataaattgactatatttttatatcagtgttattgttattttcattaaacagaatcaaaaaggtattcatggtggatcacctgaggtcaggagtttgaccagcctggccaacatggcaaaaccccgtctgtaccaaaaatataaaagttagctgggcatggtggtgggcacctgtaatcccagctactcaggaggctgaggcgggagaatcgcttgaacccaggaggtagaggttccagtgagccaagatcacaccgactgcactccagcctgggcgacagagcaagactccgatctc

SEQ ID NO: 641166 - DNA, 132 bp, Homo sapiens
atgagcatctgctgacccccagtgccccagttcagactctcccatctgccttccagacctgtcaatctgaacccgcacaccagggagtggagttgaccataagtggtgccattgactggtaaaaacaagcct

SEQ ID NO: 641167 - DNA, 1520 bp, Homo sapiens
cttccctcatttacagatgaaacaaagacttaagccttaagatactttactgtctagtgtcactcaacttacaagtggcagacatagaactgagaagtcttcttactttccccttcactgtaggaacccttgtcatctgtaggggagctctacagattcctatcagaacctggcttctgtatttaccatgtacctggagcattggtttggcagctgaaccaggttgttttccagattggtacatgctctccctctttggcactggagctattctgatgcgtggagcaggctgtactattaatgacatgtgggaccaggactatgataaaaaggttacaagaacagccaatcgtccaatagccgctggagacatttcaacttttcagtcctttgtttttcttgggggacagctaaccctggcactgggtgttcttctgtgtctaaattactacagtatagctctgggagcaggatccttacttcttgtcatcacctacccactaatgaaaagaatttcatactggcctcaactagccttgggcttgacatttaattggggagcgttacttggatggtctgctatcaagggttcctgtgatccatctgtttgcctgcctctttatttttctggagttatgtggacactaatatatgacactatttatgcccatcaggacaaaagagatgatgttttgattggtcttaagtcaacggctctgcggttcggagaaaataccaagccgtggctcagcggcttcagtgttgcaatgctgggggcactgagcctagtgggtgtgaacagtggacagactgctccctactacgctgccctgggtgctgtaggagcccatctgactcaccagaaatggggtcttgagattttgcccaggctggtctgaaattcctggcttcaagcaatcttcctgccctggtctcccaaaagtgctgggattaccagtgtgagctaccaaccccagccaagtttacactctagacatccacagacctgaggattgttggaataaatttatctccaaccgaacactgggactaatagtttttttagggattgtccttgggaatttgtggaaagaaaagaagacagacaaaacaaagaagggtatagagaataaaatagaaaattaatgaatgaaatttatctaggaatttttaaaacattttttacaaaatataattagatttgaatacaaaatctgatacaatatgttaaagaattaagaacctgaagatgaagatttagagcatatttacctggattttacttatttgctagcaaaattcccccttgtcacagaaaccagggactcttcaggatttgagatggccttgagtattttagttgatacattcttctgcccattataattctcacctgaagttatggggattgcacgggttttggcactttagaaaaagcctgatgtgggtcttacataaatgaatgtctgtataagaaaatggactcttttttttagggaaaaataaaagcaactatggga

SEQ ID NO: 641168 - DNA, 109 bp, Homo sapiens
tcagaactctaatggtatgcctccaaccaaaaatgtccaaaattgaatttctgagccgggcatggtggcttatgcttgtaatcccagcactttgggagcctgaggtagc

SEQ ID NO: 641169 - DNA, 1884 bp, Homo sapiens
  misc_feature (1666)..(1666): n is a, c, g, or t
  misc_feature (1668)..(1668): n is a, c, g, or t
  misc_feature (1671)..(1671): n is a, c, g, or t
  misc_feature (1673)..(1673): n is a, c, g, or t
  misc_feature (1675)..(1675): n is a, c, g, or t
  misc_feature (1683)..(1684): n is a, c, g, or t
  misc_feature (1691)..(1691): n is a, c, g, or t
  misc_feature (1695)..(1695): n is a, c, g, or t
  misc_feature (1704)..(1706): n is a, c, g, or t
ggccggggaatgacgtcaatccgagctcgtcccggcctcaccagcgccatgctgggctcgcgagccgcggggttcgcgcggggcctgcgggctttggcactggcgtggctgccgggctggcggggccgctccttcgccctggcgcgtgcggcaggcgcgccccacggtggtgacttgcagccccccgcctgtcccgagccgcgcgggcgccagctcagtttgtccgcggcggcggtggtggactctgcgccccgccccctgcagccgtacttgcgcctcatgcggttggacaagcccattggaacctggcttctgtatttaccatgtacctggagcattggtttggcagctgaaccaggttgttttccagattggtacatgctctccctctttggcactggagctattctgatgcgtggagcaggctgtactattaatgacatgtgggaccaggactatgataaaaaggttacaagaacagccaatcgtccaatagccgctggagacatttcaacttttcagtcctttgtttttcttgggggacagctaaccctggcactgggtgttcttctgtgtctaaattactacagtatagctctgggagcaggatccttacttcttgtcatcacctacccactaatgaaaagaatttcatactggcctcaactagccttgggcttgacatttaattggggagcgttacttggatggtctgctatcaagggttcctgtgatccatctgtttgcctgcctctttatttttctggagttatgtggacactaatatatgacactatttatgcccatcaggacaaaagagatgatgttttgattggtcttaagtcaacggctctgcggttcggagaaaataccaagccgtggctcagcggcttcagtgttgcaatgctgggggcactgagcctagtgggtgtgaacagtggacagactgctccctactacgctgccctgggtgctgtaggagcccatctgactcaccagaaatggggtcttgagattttgcccaggctggtctgaaattcctggcttcaagcaatcttcctgccctggtctcccaaaagtgctgggattaccagtgtgagctaccaaccccagccaagtttacactctagacatccacagacctgaggattgttggaataaatttatctccaaccgaacactgggactaatagtttttttagggattgtccttgggaatttgtggaaagaaaagaagacagacaaaacaaagaagggtatagagaataaaatagaaaattaatgaatgaaatttatctaggaatttttaaaacattttttacaaaatataattagatttgaatacaaaatctgatacaatatgttaaagaattaagaacctgaagatgaagatttagagcatatttacctggattttacttatttgctagcaaaattcccccttgtcacagaaaccagggactcttcaggatttgagatggccttgagtattttagttgatacattcttctgcccattataattctcacctgaagttatggggattgcacgggttttggcactttagaaaaagcctgatgtgggtcttacataaatgaatgtctgtataagaaaatggactcttttttttagggaaaaataaaagcaactatgggaccaaacaaancnaancnanaacaacannaaaacanaaancaaaaaacnnnacaaacagacacgcggcacgacgacgcaccaccacgaccagcccccccctaccacgcccacgaccacctcccgagaccccccccgacagaccaaccccggcccccgcagcgcaagagacgactacacaacgagccgccgaccaccagcacacacacgccgcgcacgcacaaaagacac

SEQ ID NO: 641170 - DNA, 473 bp, Homo sapiens
tcattcaataagtgtttgtaatattggtatacaagaaaccagaataaacactaactatttaacaatagggactgaaaagataatttgatagagaaattgtattttatgactacttcagttcatatcagccatcaacacttactcactcctttcagtccttcttggtcaaacccggctgcggttttgtacaacttacaaatgctgaatcacctggtcccacatcacagttgcaaggcccctttctattctcaaatcaaatgccctggctttaggcagcagctatatgctataatctaccttatgtctatctccagctgtgcctggaattagctgagtaaccaaatgactacttgacctctctacgattgtctaaaagacagttcaattttcaagtacaaaataaaactcttggctggcacagtggctcgagcctataatcccagcactttgggaggcccaggcgggtgcaccac

SEQ ID NO: 641171 - DNA, 1766 bp, Homo sapiens
  misc_feature (1548)..(1548): n is a, c, g, or t
  misc_feature (1550)..(1550): n is a, c, g, or t
  misc_feature (1553)..(1553): n is a, c, g, or t
  misc_feature (1555)..(1555): n is a, c, g, or t
  misc_feature (1557)..(1557): n is a, c, g, or t
  misc_feature (1565)..(1566): n is a, c, g, or t
  misc_feature (1573)..(1573): n is a, c, g, or t
  misc_feature (1577)..(1577): n is a, c, g, or t
  misc_feature (1586)..(1588): n is a, c, g, or t
ggccggggaatgacgtcaatccgagctcgtcccggcctcaccagcgccatgctgggctcgcgagccgcggggttcgcgcggggcctgcgggctttggcactggcgtggctgccgggctggcggggccgctccttcgccctggcgcgtgcggcaggcgcgccccacggtggtgacttgcagccccccgcctgtcccgagccgcgcgggcgccagctcagtttgtccgcggcggcggtggtggactctgcgccccgccccctgcagccgtacttgcgcctcatgcggttggacaagcccattggaacctggcttctgtatttaccatgtacctggagcattggtttggcagctgaaccaggttgttttccagattggtacatgctctccctctttggcactggagctattctgatgcgtggagcaggctgtactattaatgacatgtgggaccaggactatgataaaaaggttacaagaacagccaatcgtccaatagccgctggagacatttcaacttttcagtcctttgtttttcttgggggacagctaaccctggcactgggtgttcttctgtgtctaaattactacagtatagctctgggagcaggatccttacttcttgtcatcacctacccactaatgaaaagaatttcatactggcctcaactagccttgggcttgacatttaattggggagcgttacttggatggtctgctatcaagggttcctgtgatccatctgtttgcctgcctctttatttttctggagttatgtggacactaatatatgacactatttatgcccatcaggacaaaagagatgatgttttgattggtcttaagtcaacggctctgcggttcggagaaaataccaagccgtggctcagcggcttcagtgttgcaatgctgggggcactgagcctagtgggtgtgaacagtggacagactgctccctactacgctgccctgggtgctgtaggagcccatctgactcaccagatttacactctagacatccacagacctgaggattgttggaataaatttatctccaaccgaacactgggactaatagtttttttagggattgtccttgggaatttgtggaaagaaaagaagacagacaaaacaaagaagggtatagagaataaaatagaaaattaatgaatgaaatttatctaggaatttttaaaacattttttacaaaatataattagatttgaatacaaaatctgatacaatatgttaaagaattaagaacctgaagatgaagatttagagcatatttacctggattttacttatttgctagcaaaattcccccttgtcacagaaaccagggactcttcaggatttgagatggccttgagtattttagttgatacattcttctgcccattataattctcacctgaagttatggggattgcacgggttttggcactttagaaaaagcctgatgtgggtcttacataaatgaatgtctgtataagaaaatggactcttttttttagggaaaaataaaagcaactatgggaccaaacaaancnaancnanaacaacannaaaacanaaancaaaaaacnnnacaaacagacacgcggcacgacgacgcaccaccacgaccagcccccccctaccacgcccacgaccacctcccgagaccccccccgacagaccaaccccggcccccgcagcgcaagagacgactacacaacgagccgccgaccaccagcacacacacgccgcgcacgcacaaaagacac

SEQ ID NO: 641172 - DNA, 390 bp, Homo sapiens
  misc_feature (3)..(3): n is a, c, g, or t
  misc_feature (26)..(26): n is a, c, g, or t
  misc_feature (83)..(83): n is a, c, g, or t
  misc_feature (385)..(385): n is a, c, g, or t
canccaaaaatttttggccaattgtnccctttgggtcacacctaatcaccttctgctgtaatgtccctctgtagctttgccanagttctgttcaaatggcctcagtatgtagaggactggaagcatgcagcccaactaagcatggctacttcagtgtaaaattaacactgagttacaaactgaagtggtaatgttaaaatccatggttctgtggttaggggaacaagtacaaagcttacagtaccaacagcaattgcactgtcattttaatcacactcatatttgtgtaaccaacttagaatataaccaaagagtatccatgggaccttgtaaaagcccatttgcagggagcttccacatccaacatcacctttgacataggttnattac

SEQ ID NO: 641173 - DNA, 267 bp, Homo sapiens
caccgttagattggcatcataggaggcctcagtgcagtagatttcccctattctcaggctagaccctagaccaaacctagcgccaagagatccagtttcactatcatattcatcggcgtaaatctagagctgtttcttcccacaacactttctcgggcctatccggcaatgccccggacggttactcgggactaccccgcatgcatacaccacatggaaacatcctatcatctgtaggtctacctggccaggtagacctagcatcac

SEQ ID NO: 641174 - DNA, 1273 bp, Homo sapiens
ggccggggaatgacgtcaatccgagctcgtcccggcctcaccagcgccatgctgggctcgcgagccgcggggttcgcgcggggcctgcgggctttggcactggcgtggctgccgggctggcggggccgctccttcgccctggcgcgtgcggcaggcgcgccccacggtggtgacttgcagccccccgcctgtcccgagccgcgcgggcgccagctcagtttgtccgcggcggcggtggtggactctgcgccccgccccctgcagccgtacttgcgcctcatgcggttggacaagcccattggaacctggcttctgtatttaccatgtacctggagcattggtttggcagctgaaccaggttgttttccagattggtacatgctctccctctttggcactggagctattctgatgcgtggagcaggctgtactattaatgacatgtgggaccaggactatgataaaaaggttacaagaacagccaatcgtccaatagccgctggagacatttcaacttttcagtcctttgtttttcttgggggacagctaaccctggcactgggtgttcttctgtgtctaaattactacagtatagctctgggagcaggatccttacttcttgtcatcacctacccactaatgaaaagaatttcatactggcctcaactagccttgggcttgacatttaattggggagcgttacttggatggtctgctatcaagggttcctgtgatccatctgtttgcctgcctctttatttttctggagttatgtggacactaatatatgacactatttatgcccatcaggacaaaagagatgatgttttgattggtcttaagtcaacggctctgcggttcggagaaaataccaagccgtggctcagcggcttcagtgttgcaatgctgggggcactgagcctagtgggtgtgaacagtggacagactgctccctactacgctgccctgggtgctgtaggagcccatctgactcaccagatttacactctagacatccacagacctgaggattgttggaataaatttatctccaaccgaacactgggactaatagtttttttagggattgtccttgggaatttgtggaaagaaaggagacggcaacaagaggtttgaaataactgcaactttgggtggcgttctctggattttaacactttttccaattattgttgggtccaactgtcattggataaacggagaggatagggatttcggggttttggaaaaccctggaaaaggcttttgggga

SEQ ID NO: 641175 - DNA, 426 bp, Homo sapiens
tttcgcaggagggtatataaagaggaatgatcatggacgagggatgatgcagggacactctggtgtccaaataacggaaatcctcaagttacatcaggggacaaaccaggatgggtgagtgtgcgttggagcatgtgcgaacgtgatcctgatgtgtgcaagcagggggtggagtgagctgcatgttagaccctctcgtcctaatgtcatgtcgagcacagccgaaaatgatatctccagatgggcagtgagtcaacttcttctctcatagggtaagtggctatggatgcggagaagggtgtggtgttgtcctgctgaaacctctaaggaaggtcagtcaacttaaaaatcagtctggagtggttctctgatcagctacaggcagctttctgtacccatggcttcttcatccatggattcaactaa

SEQ ID NO: 641176 - DNA, 1424 bp, Homo sapiens
atagaagagacttatcacctttcatgatacacgccctcataatcattttccttatctgcttcctagctcctgtatgcccttttcctaacactcacaacaaacactaacataatactaacatctcacgacgctcaggaaatagaacacgtctgcaactatcctgcccgcccatcatcctagctcctcatcgccctcccactccctacgcactcctttaccataacagcacgacgtcacacgatccctcccttaccactcactatcacactcgcgcacaccaacgcctactgcaacctaccacctacaccgcactacccccgcgcacctaactccttccaacctccctacactacctccccctcactcacttccctcgcacccccacgcgcgcacactcccgcacatcccttgcaccctccaccacctcgcagtactacctccccgacacgacacacccccactctccctactccctcacttaccctcacccccgcacccgtcatcgccaccctccatgcacccccgccccctcacccactccccgcctccccaccacaccctgcccactcccgcccccctctccccccacaaacccccctccacccgcctacacccaccacggcacccctattactcaccagctccacaccgctctgccacaatcactgtgcccacccaccccaccacttcccatctcctccctcgctccctctcactccactacccgctcacacccacctctctcgccaacataccgcaccccctcctttccccactaactccaccacccacccacaccacaaccccctcatcctcagagccccccctcctcacccctctcccccctccaccccccaacaccgcgcgccccgctcgacgcccacagccatacacactcccacgcgcccccccccccatcacactacatctacacaccctgccacccacagcgcgcaccacaccaccaccgacacagcccacaaacaccaccacccccacgcgccacaacactcacccactcctccctccccacacttgtacatacacacctaactcctggccactacccctctcacccccactactcccctcccctcaccatcataactccacccgcccacctccactctcccaccaatttccctctcactacccctcaccccttctctctccctatccccactccccactactccatccactcccaccctccttcctccctctctttcactctccacatccactccctaccccaccacctcaccacacccccaccccccacccacacaccaccaccccctcgcacacccactctcccacccaccctacacccctccccccccctcctcccccacaccacctcaccctcacacctcctccctcgcatcccccctacccatcccactctcccctccccctccccg

SEQ ID NO: 641177 - DNA, 1404 bp, Homo sapiens
ggccggggaatgacgtcaatccgagctcgtcccggcctcaccagcgccatgctgggctcgcgagccgcggggttcgcgcggggcctgcgggctttggcactggcgtggctgccgggctggcggggccgctccttcgccctggcgcgtgcggcaggcgcgccccacggtggtgacttgcagccccccgcctgtcccgagccgcgcgggcgccagctcagtttgtccgcggcggcggtggtggactctgcgccccgccccctgcagccgtacttgcgcctcatgcggttggacaagcccattggaacctggcttctgtatttaccatgtacctggagcattggtttggcagctgaaccaggttgttttccagattggtacatgctctccctctttggcactggagctattctgatgcgtggagcaggctgtactattaatgacatgtgggaccaggactatgataaaaaggttacaagaacagccaatcgtccaatagccgctggagacatttcaacttttcagtcctttgtttttcttgggggacagctaaccctggcactgggtgttcttctgtgtctaaattactacagtatagctctgggagcaggatccttacttcttgtcatcacctacccactaatgaaaagaatttcatactggcctcaactagccttgggacaaaagagatgatgttttgattggtcttaagtcaacggctctgcggttcggagaaaataccaagccgtggctcagcggcttcagtgttgcaatgctgggggcactgagcctagtgggtgtgaacagtggacagactgctccctactacgctgccctgggtgctgtaggagcccatctgactcaccagatttacactctagacatccacagacctgaggattgttggaataaatttatctccaaccgaacactgggactaatagtttttttagggattgtccttgggaatttgtggaaagaaaagaagacagacaaaacaaagaagggtatagagaataaaatagaaaattaatgaatgaaatttatctaggaatttttaaaacattttttacaaaatataattagatttgaatacaaaatctgatacaatatgttaaagaattaagaacctgaagatgaagatttagagcatatttacctggattttacttatttgctagcaaaattcccccttgtcacagaaaccagggactcttcaggatttgagatggccttgagtattttagttgatacattcttctgcccattataattctcacctgaagttatggggattgcacgggttttggcactttagaaaaagcctgatgtgggtcttacataaatgaatgtctgtataagaaaatggactcttttttttagggaaaaataaaagcaactatggga

SEQ ID NO: 641178 - DNA, 395 bp, Homo sapiens
caagataaactttgatgacaacgcaaaattccgacaaaaagacatatttgctatggacgacaaatcagagaatgagcccattgaaaatgaagctgccaaatatgatctaaaatacataggactagatgggaacattgcctgctttgtgaatggtgctgggctcgccatggctacttgtgatatcattttccttaatggtgggaagccagccaacttcttggatcttggaggtggggtaaaggaagctcaaatatattaagcattaaaatgctcacagttgatcctaagttgaagccattcttgtaaatatattgggggggattcgcaactgtgccatcattgccaatgggatcaccaaagcctgccggcagctagaactcaaggtggcccttggt

SEQ ID NO: 641179 - DNA, 1305 bp, Homo sapiens
  misc_feature (324)..(324): n is a, c, g, or t
  misc_feature (412)..(412): n is a, c, g, or t
  misc_feature (427)..(427): n is a, c, g, or t
  misc_feature (433)..(433): n is a, c, g, or t
  misc_feature (440)..(440): n is a, c, g, or t
  misc_feature (447)..(447): n is a, c, g, or t
  misc_feature (978)..(978): n is a, c, g, or t
atccaactccaccttaatatcagacaaccttagctcaataccatttagccatagataaaggtatacggcgagtagaaattcgaaagcctggtgcatattagaatactaaggtactggcgcaagggcaagaggatgacattacatgagtaaccgaacgcatatctatagcagaggacttaatccccgtactaccgttctgcgataatgaatcttaacttagaagataacttatcgcataggtagagcgcgaagaggcttagggaccacccgaaatagctatgcacgcatgacttaacctagagtagaccagctgaataatggagncgatatccgtgctcattgtaagcaacattaagtcgggcaggaattctattagcgtcacgcagcgtccgtaccataaactcctatcgcngacggccattgcgtntgcttnatgctgnggtgatngttgccagagagactacgagacttcattgagtggttgccaacctgttcataactctctgcgcccatcaaggaaagcgcgcatcttaaatatccccactctgtgagaaactctctacaccgtggtgtaacgttcacacacagtagggtaccaccacgtcttacctattgcgtgaagcccacgtgatggtacatacaaatactcattggtttaaggaggaggcaggttacacaaatatatctttacgccacccaccaatagtatcggacctataaaaagcccaggcgcatgccaaatttaaagcaaaaagcaggtttacaaacggcttcccacatcatatcccgatcttaggcctttacagatacacatttccctctaaaaacggatttatttaaaactggaaattcttctcgtctcaataattcctaaatttggggtgaccctaaatcctggaatcgaagcccttcattctgaataggcaaacttaaattggtggcagctgataaggtctaaccacttgacaaaaccatttnctttccgtaccgggcagttaaggggaccgttgtgcgggttacgaaaaactttcaaaaataaccctaattgggaacaagctgtgcgaccctataattttaaacccgaggtgcccacaaattaatgttctctcaacccccacttgccaaaagcgcaaaacactagagtttcccttttaattttacacccccttacaaagttggttcgcaagagccccaaaattactcacgacacacatgtggtcttgcatactaaaactcaaacaacacataccaccaggatagaaacaaaacgtgacacccatacaggccatacacataacaaggtag

SEQ ID NO: 641180 - DNA, 850 bp, Homo sapiens
ggttacagaggattggcttgtccagaaccatcaggacccgtgtaaggtagaggaggtgtgcatagccaatgagccctgcacaagctttgcagagtgtgtgtgtgatgaagaatgtgagaaggaggctcggtataagtggcttctgagagaaagaaggaaaaggataaacacatgggatgcctgtggaacccaatacctgagcctgagtaaaagcgataaagattccctgaatatgtggctctgtcctagagaaaatgaagtacatagaacaaactaaagcaccaagaggcaatgactccttctagaattgctgattccttccaagtcataaagaacagcccttgtcggagtggcttatcaggcccccatacaaagaaggaagtcccagaggtaagtgcctggtactgaagacatgagctggcaaacaagaagtttagaagccccatgaatacttcctggttgttcctttaacaacagctgactgggtcctgtcaggaaagaagatgggcaaggctcagccagttatcttcgtggagagggacaagtggctgcttcgaaaagaaggcccagggaagtattacttaatgcacacctccctaccaggagggaaccataaacttccccccagaccattatggctccctgaagttggtgatctctttgcctgtatgcagcttaagttgatacaagagacagtggtttgatcgaactcctctagggattgttgacggcatggccagagtgagcagcttctgctgatttcaaccatcagagtggaggatgcggtggcaaaccttgggtacgggctgacaataggtaggatccctgcaaataaattaagaaatggtcc

SEQ ID NO: 641181 - DNA, 273 bp, Homo sapiens
agcctcgagtggcctggctgaccactaccgcacagaggccgtgtcgcgcctgggctgggcctgggtggcctctgattctttgccatctctgaagaaaggaagtcgggtgggtaacggttggggtcaggaagaattctgccaagtaatctttactgtcattctgaaccatagcctctttgttcccgcattcgaaacttttggttcttaactttgctgctcgtttagtccctggggatttcagaatcttaggctgttgtttcaccgtatgggaag

SEQ ID NO: 641182 - DNA, 131 bp, Homo sapiens
ttcctggagagagatgagagtgagcaagagagagggagggagagagacagagagagagagagagagagaggtatagagagcattgatatggggtctactatattccccccggggccccattcccatattat

SEQ ID NO: 641183 - DNA, 787 bp, Homo sapiens
ttacaattcggcctcctaaaatttggcggagaaaataagggtctcaattttaggggaggttttttccgggtgtggttagcgttcgtctcccaagaggtccccaattgtcactaatcaatgaatagtttctcagttctagtgaaagtgggcccatattcgtggtacgtcttaagcccaagatatttcttgtgcatagattgacacacggcgggtctcaaccagttatgtgcgtagcttgatagctctcacctaggctcataatctccattttatgcagggaatcagtgggctccggggtcatggttccccagcagtgtatgttaattagcacagtgttctcaggagttcattcatgcctctgtggccatcctagttgacaaatgcacgctcttcgggttggagtaactgtctctaatacattattgcacctgctagcagtgtgatctcgggtcccaaggcttcgccatagccgttcaagcgcgatgtgggtcttcccgccgcttttgaaaagcagggccactgggcttagtatagggagacctgctatggctagggaggtatgaagcttttttcaacgagacaaagtccgttcggagtatgcccccccatttaaaagcatccccgcattcctgttctttcgcccaggctgaagtgcagtcggaacgctctcggctctgttgcttagttttggtcggagtaaaaccgcctccccgttgaagcaacaggtttcagtgagctcagttcgcccatttatcctgcggcctgggcaatagagtggggctccatc

SEQ ID NO: 641184 - DNA, 1510 bp, Homo sapiens
  misc_feature (977)..(977): n is a, c, g, or t
actctgcaatactctgcttgtcgtttgatgggtgtgctctctctttctgtgatcttattctggtttctttctctctttctaagttgtttctccacattagtcaagaggggtcctcacgggggggcccacacgattgtgtggggcctacatttttagatatttagagagggacttgttctgttttgttctcgctggggtgaattttttgggggggtacccaatggattgtgtttccatgcctttttttgtagggggggttcttctctcctgtagtggcccttgttttggggtcccctctcgtgcccacgccttgttattgtccctctcgggggtatcagtggtccccgtggtggtctcgtggccccgtgtgctcccctcctaccgtttgtggttccccccccccgtttttctttcggggagcggatgcggcccaactgttaggggtctacatctgtgtttttgcgttggatatcctatctcctcggggttgtttgttggtgagcttgtccacatgggtggttccgcctttggcgttcccccccctctgcgcacaccagaggtttgttttggccccgcgcggtgttctccccttataggagggcttcttcagacacttttggtggccccccggtggtctcagtgagaacgcgacagtgcacatttgataattattgtgtttgggggtatgcccccctctattttgggggggtctcctgtctgtttttgtgtgagcgcacatttaggtcccccccaggcgcgtgttttgttttttgtgccagcctccccactgttctcctgtggtcgacagtgtcgtcactgtagattctcctctcgccacggtgtctctctatatagtcctcctattagtcgccctcgtggggacaccttttttgtgacccgcacaccctctctttgtgaaagagaacacacattagaggcgcaccgcacacaccggtgttacactctcacacactccnctgtgagagagatatctctgtgtggagacattagatctctgcgtccatactccccagagagagagtctcacactgtgcgacacactagagtgtctcacactctctagagatagactctctgtgtgcacacacactccccagagtcgcatattgtcttgtgtatcctctcttctctctctctgtgcccctgtgtgggttctctctgtgggataagactgtgttctgtcgtgtgtctcacacaccccaggagaccctaagagaaatggcaccccgctctttttgaaaaagttgacgaagaatagtatatctctttcttggcccctcggccacttcttcgcggaaagacttggtggccataccctcgtgaagagggtttatatactcccctttgtggagatcttggtggggaagaggaagaggtatatagaattgttatttaaaaaaacaacggtatataagccaaatatctataaataatatgaccccagaaattaatctatgagaaatctatctacccaaaaagaaaaaaaaaa

SEQ ID NO: 641185 - DNA, 174 bp, Homo sapiens
gacaccctgtattaaacaacaaaacaaaacaaacatgacacaccaaacatcatccacgtcgtgattataagcattctctgcccaatctattaccaagcataagcatcaacttcaacgttgcctctgctcaaagcagtaatccgtctaaagcggaagcgctctccttttcctttc

SEQ ID NO: 641186 - DNA, 214 bp, Homo sapiens
gccaggctgtccgcgccgccgctgtaggtcctttatcctgaacgggctcgcgggctgccggcggcgacagcagcagctcggggcccgggtgggcagtcggcttcctgctgcagggtgtggtgctgatcggcttgctctatgatcgttggtgcagttacggtgacgacgtctcaacctaagtctgtcgccagcgtccgggccgtgggtgactacg

SEQ ID NO: 641187 - DNA, 226 bp, Homo sapiens
  misc_feature (149)..(149): n is a, c, g, or t
gctaccctggatagacaacagttacagttttgagcctggagatgcttcttcctcttagcacaccactgcatccaacattttaacaaaaggccagaagaattctctgatcctgagtagctgggactataggcgcacgccaccatacccanactactttttttttttggaaagtgagttcccctcttgttggccacggccggaagttgaagtgggttttgaatttggg

SEQ ID NO: 641188 - DNA, 183 bp, Homo sapiens
cccgcaggcaccccgccgtgaggtgcgtccggaacattaagagcatgctgagtgctggcagatgagctcatcaatgctgccagggctacctcgaactcctatgccatttaagaagaaggacgagctgtatggtgtggcccagtccaagctgttgattttcccagctgctactgttgtgagtgg

SEQ ID NO: 641189 - DNA, 128 bp, Homo sapiens
  misc_feature (125)..(125): n is a, c, g, or t
atgagggccggcatgctgacccacgccgaggcttgcgttttcccggaggacgtggactgttgtgagacaagaggcggctccccagcctgggtttccatgtgacccccagtggggctggaccaggnccc

SEQ ID NO: 641190 - DNA, 379 bp, Homo sapiens
agccctgacagtaagtagaattatggtgagtataaagaggggggcagcacattggcagccctcatgagtgcagggcccgaaacttgtccagagtggccacgactggggatgtacttgaccccacagccatctgggatgagccgctattaagccaccatgtcttcaaatacatcagcattgaacttggtgaagccccacttctttgagatgtggatcttctggcggccaggaaacttgaacttggccctgcgcagggcctcaaatcacatgctccttgttctgcagcttggtcgcgctggacatgataccttggccattgtgaaccctggccacggtgccctggggcttgccaaaggcccctcgcatgcctatttgaagc

SEQ ID NO: 641191 - DNA, 369 bp, Homo sapiens
gacgttcgcaccactgcactccagacccggatgacagagcgaggctctgtctcaaataagtaagtaagtatgtacgtacatacatacatacatacatacatacatacatacatatatacatacagtacatacatacatcacagtgtacgtgaagcatagtgcctgtctcagaatcttccattactatgtttattcatttcctggggctgccataacaaagtaccacaaattcagtgacttaaacacaacagaaatgtattctctcacagttctggaagtatctagaagcctgaagtcagggtgtccacagggccatgcttctcctgaaggctctagagagtacctttcttggcctctcctagttaccta

SEQ ID NO: 641192 - DNA, 348 bp, Homo sapiens
ttgcccacgactcgatacattgctgtgagaatcgaatgaaatattagttctgaaaccacctggtgtggaccgggtgcagtggctcacagttctaatcccaagcactctgggaggccaaggcaggtggattgcttgagctcaggagatggagatcagcctgggcaacaacagcctgggtgacactctgtctctacaaaaaattagctgggtgtggcggtgtgtgcctgtagtcccagcgactcagtaggctgaggtgggaggatggcttgggtccaggcgcacaaggctgccgtgaaccttgatcacaccactgcacttcagcctgggtgagagaaagaccatgtctca

SEQ ID NO: 641193 - DNA, 507 bp, Homo sapiens
gatatgcgtctcatagtttacatgtattcttgcctattctacctgtatctcttcctcctctctcattcttacctggctctataactctcatcgaagcggacaagggttaggtatgttccccaaagagtgtagggcttctgagtaagaggttaacatggagctgcaattatagaacctgatagctctgtcctgagacctagccagtccctcacctgccttctctctagaaagtgaggttctgaagccagccatcccatcactgatcttagctgtttcctgaataggcagctttaatataagctcaataatgccacaatactaaccaaaactggtacttcgaaaaatctgcagctgggcgcggtggctcacgcccgtaatcccagcactttgggaggtcgaagtgggcagatcacctgaggtcaggagttccagacctgcctgaccaatatgatgaaacccctctctactaaaaacacaaaattagctaggcatggtgacaggtgcctg

SEQ ID NO: 641194 - DNA, 305 bp, Homo sapiens
tacctgattactcttcatagctacttgagaattggaaatcgcctgaacccagaggcggaggttgcagggagggagactgcaccactgcacttcagcctgggtgacagagggagactctgtcttaaaaaaaaaaaaaaatcttctgtaaaataaattccgggatagtcttttggttcaaggaaatgttttgtaatttgacctcaccctatttaatctttattgtccttatcctgaatgtataaataccagcaggttataattacaccaagacgctatagtttataaattattggcattgaagttga

SEQ ID NO: 641195 - DNA, 301 bp, Homo sapiens
  misc_feature (10)..(10): n is a, c, g, or t
gcttttcaantgctgggattaccaggcatcagccactatgccggctgggatcatatgttccacacatgtttgttcaataagcatggactgcaaccacctacatgaatattcatagctcctcctgtagcctgttgaatatgtatgtttagccaacctcttcagcataaagctcctgcccaaacccctcctgctcctaaatgtctgtctctggtgttaaccagaggctgctcttcccaggctgctggatggctaccttgcaggctgtcacccttaacaagaaataaagtgtcctttcaaatgc

SEQ ID NO: 641196 - DNA, 305 bp, Homo sapiens
cgtcgtacggaaatagtaaaagtacaatacttatcagtagactgtaataagtcgatgatacatgttgtaatctttatgacaatcactaccgacgactaagatgtcaggcgatatgaaacaatacaacccacttataagagatgtatcttaactgtaagaatacagaaatgttgaaagtcgaagaatacacaaatgctttagccacactagcactaatcaacagaaaactgatgtcagacaaactagattttaagaccagaagtatcagctgtggcgcagtggctcaccgccgtgtaatcccaaaa

SEQ ID NO: 641197 - DNA, 412 bp, Homo sapiens
ccgagacccgctccagctgatggcatggccactgtcttgcttatctccaagacgtacataaccaaatagcgcttgaaggaccgccagcagctctccaagctgatcattactcagctgctatatgaccgctacatgagaatctccgaggggcccatcaatgagatcaagccttagactgagtgtgctcactcggagcagactctgcatatcatcacactagggagagtgtgaacacaaatccatactgcccatgcggaggaatggcaaacgatgacaccatactctagtatgaatatggactatcagatactggagacattggctcagctaacgacctgctatgatccagatcgtcacactatgcactcagaggctattgagtacgcatactatgtacgtcacatgtaggcct

SEQ ID NO: 641198 - DNA, 992 bp, Homo sapiens
agaatgtaaatcagccctatccataatatagtttctctaaaactttatcttaaagagtcattttaaaataatataactattaaaaatgtaactgatatttaaatgttttgaaataaaacattttaaaatataaatactgtagtttaaaagaaagaaactgggggaaagaaaagtagagaaagaaataccaattccagtccaaagctttatttgccaggttttcttagaatgacttttaccagtttatgaattcttgtaaacagaatctataatggaaatactgaaagacttttgcctaaagtggcattattgaatgctgctgtgatgctactgtaatgtaataaattattaaattgttgcaaagtgctgtttttgccttaaaattttattttgtgtgtcttgaaaattatagtattaaaggtattgagattgtgcaaatgctgggcacgcttggcatgagataatctgtttttatttttacaaaattgtaatataactatgcaagtgtgtttattaaaagaacacaaactataaaaaaaaaaaacaaaaaaaaaaaaaaaactttttgggccgcccgggccccggaaaaaagtttctcaaaaccctccgtggggggccgggccccaagggtaggggacacgggcccaagcgggtcccaaggaaaacccgggccgaaccagggcgcggttctcccaccaataaaaaaagcccgcggggcgcaccacgaagggtctcggaccaatacgcagaaggggctaccgggagcgccccacggcgcgttctatccacggggagccccagcggagaacgaaaaaactgacgcggccgggcagagtaaaaacacccacaacacaacaacaccaacacagcacacaccacgaccaccacacgacacgacgacaacaacacaccacacacactaacacaccacacacaccgagacccacgaccacacacccacaacaaccagaacacaacccaccacacacaca

SEQ ID NO: 641199 - DNA, 279 bp, Homo sapiens
aattgtcgtgcacctcacagggaggctcaacaagtgtggggtgctccgccccaggatatgccgtgcacctcaaagagctggaaaaatggcagactcatctgcttccatcccgccagtaaggttacattgtactgacaacctcagctggcatcatggcccatgcaagcaagcaagcagaaaacacacaggagggaaaatcctgggcatctttaaatcaaggcatgtaatacatcatattaacaaatacaaatgcctccatcagagatagttgagtaccga

SEQ ID NO: 641200 - DNA, 579 bp, Homo sapiens
ctatatagcatacttgaggtgatcataatagacttcttcaatggcttgaaagtatataacgtcctatcactttagttatcatgctatgtatagcataataagagaatgtacgcttgttccgatcaagaacaaaacaacgttttttccacgattttaattattcccacccattgtgatgaggaatcctcggcaggtcttctctgtgattgatacatggtaacaggtgtcaatatagtggccagcagtctctacatggctccgcaaatcaaagtcttccttccggacaggcaggtagcgtgtcaaaggacgagcctgtgccctttgtctctcccttatttttacttccttttctattaacttctgcctctggctagtttcttccatgtaatcgttttaccaggatttcccggcgtcgtttttcttcttccagggctcgtttttaggcttccatttcccgttccctggattcgagcagccgcgtctttactgcatgagcctgctacaaaagtctctccatttcttctattctagcaatctttgaagtgctggcactagagatgttgtctggtgagcacgcag

SEQ ID NO: 641201 - DNA, 931 bp, Homo sapiens
tacagtaggcatcacagcagcattcaataatgccactttagggcaaaagtctttcagtatttccaattataaatactgtagtttaaaagaaagaaactgggggaaagaaaagtagagaaagaaataccaattccagtccaaagctttatttgccaggttttcttagaatgacttttaccagtttatgaattcttgtaaacagaatctataatggaaatactgaaagacttttgcctaaagtggcattattgaatgctgctgtgatgctactgtaatgtaataaattattaaattgttgcaaagtgctgtttttgccttaaaattttattttgtgtgtcttgaaaattatagtattaaaggtattgagattgtgcaaatgctgggcacgcttggcatgagataatctgtttttatttttacaaaattgtaatataactatgcaagtgtgtttattaaaagaacacaaactataaaaaaaaaaaacaaaaaaaaaaaaaaaactttttgggccgcccgggccccggaaaaaagtttctcaaaaccctccgtggggggccgggccccaagggtaggggacacgggcccaagcgggtcccaaggaaaacccgggccgaaccagggcgcggttctcccaccaataaaaaaagcccgcggggcgcaccacgaagggtctcggaccaatacgcagaaggggctaccgggagcgccccacggcgcgttctatccacggggagccccagcggagaacgaaaaaactgacgcggccgggcagagtaaaaacacccacaacacaacaacaccaacacagcacacaccacgaccaccacacgacacgacgacaacaacacaccacacacactaacacaccacacacaccgagacccacgaccacacacccacaacaaccagaacacaacccaccacacacaca

SEQ ID NO: 641202 - DNA, 423 bp, Homo sapiens
  misc_feature (183)..(183): n is a, c, g, or t
  misc_feature (331)..(331): n is a, c, g, or t
  misc_feature (384)..(384): n is a, c, g, or t
  misc_feature (406)..(406): n is a, c, g, or t
tgagaaggagtctcgctccttcgtctaggctggagtgcagtggtgtgatctcggctcactgcaacctccgcctcccgggttcaagcgattctcctgcctcagcctcctgtagctgcgattacaggcatgcaccaccacacctggctaatttttgtatttttagtagagatggggtttcaccangttggtcaggatggtctcaaactcctgactttgtgatccacccaccttagccttccaaagtgctgggattacaggcatgagccacttgcgcccagcctgtattgctcttaccttaacaaaagaaaccaaaagtgaaagaactaataanatgcctagaggttacaaaaaactgacagaagtcaaactgtgagtatagatcantctggttctcaccaaaaacgtnagccccagtagttcata

SEQ ID NO: 641203 - DNA, 1762 bp, Homo sapiens
ctgggacaccccgtgtgtggcagtgcggcgaagctgctctggagaataccgtgacatgccctgctccctgcagccagtgtgtagtattcgggatgccactgggtgccaaagtgatgacgtccatgctggtcttccatgctgctatggtgccactggctgtgctggcccctgtggagcacgatggtgcgatgctgacccctacttaccgctaaacgatgaacaggctggggctttgtgccttggccccttgccttacttgcgtgctggctcctgcccttggcgcaaccctgaccatggcgcttcgggcagccgaggccaagcgaatcttaccaactagctggcaagccatagcaatggggaactcgtaggctgtgcactgaacctacgcacacttgcgcgacacactatgccgccatgcgcttgcgcaaccccctacactgacactgcaccccaacgtctcaaccgaacttcggcgcacttcctctcatcccaggaaatccaaattctcagctgaatcttgtggccaaggcaccacggttcctaccgcttgcgcttgagcacggggcttagcaccggttgctctcatagcgttggatatcacccccccgacacgaccgaagacggctaaaggccatccgacccttcagtggggcccctatttcgcggcaccttgcagacactttccggcgaaccgcttgggcttctcacgagcaccacacggggaaaccccgatctggcggcgcttttatccactttacgcgcaaaactcaccttggcacaccgcaagacatacaactaatggaacctatacgagccagaaaagaaaaccagagcgaacttcttcaggccgtacctacctatggcataaccgtttcccaaatcttaattcttcggcggccacactccgcgcaagaccgcggccggtagggcccagcacgccggccaccatctctgagctttacctccctcgccccgcctaaacgatatgtcgcagaacaccttcactgtacgcagtactatctcacctcgattgagggcacgcaactttggtctccacaccgacttcctccccttatataaagaacacattacagccactctcatatcactggacccatcctcacaatccctattcggaccactggtactctatactccgatcacacctctcaactcggggcctactacaccgcctcgcaccatcgcacgcccccagcgccgcgctacacacgacactttcccaccattgtgcacgagctatccacaacgttctcacatcacccccccatactctaccctatcctccacagcctacatcttccgctacgccacatttagctaacccatcgtcaccatctcactatctcaacacactctggcgcataagacaccgcaccccttatgaccacgcgccactatatcttagccccaccatgcccacacaaaaacaccacactttccccagcctcatcacccagacacacaccctccccttgcaaccggctcttcctggcacaacacccacctatatacacaacatagctctatataccacgccccacacctgctgacacccacacacccctcccacccagccacccaacttttacccgcctcacctcctcacaccatcacaccatccaaatctacctaacaacctaaaccacgcaatcctcaccacaccacatctctctacccacacaccaactactcctcctccccattcgctctcctaacgaacaacctccttctcctacaccat

SEQ ID NO: 641204 - DNA, 89 bp, Homo sapiens
ggaatcatgtttgcttacttttagaatggaacggaaagtatcttaaagctgtctcaatagtgtgggtctttgtacatttcaaaaggatc

SEQ ID NO: 641205 - DNA, 128 bp, Homo sapiens
  misc_feature (27)..(27): n is a, c, g, or t
ttccccccccccggggggggggggggngggggttcccccgggggggggttttttccccccccccgggtttccccccctttttccggggctttttggaccccccttttttttttttttttcccccccga

SEQ ID NO: 641206 - DNA, 336 bp, Homo sapiens
  misc_feature (123)..(123): n is a, c, g, or t
cggcgggactgtctagtttacagattgctcttatgacgcgtcaaaggaaccagtgtcaggagtcgttctgaccactgatctctactacacaaggaaatagttaggagaacgctttactgtttntgaaaatacagtttcacctgtcagttacaagaatgctgtgccataaaaggtttctcccacttgaagtctactctgatgggatctcagatctttgtcactgctatagacttgtagctgctgtctctctttgtccctgcagagaatcacgtcctggaactgcatgttcttgcgactcttgggacttcatcttaacttctcgccgcccaaacacag

SEQ ID NO: 641207 - DNA, 921 bp, Homo sapiens
cagcgggaagacatagctgcgggtggctgtgctggtggcgtcaagatgtcgaccaagaatatccgagtcagtgacggggactggatttgccctgacaaaaaatgtggaaatgtaaacttggctagaagaaccagtgtaatcgatgtggtcgggagaaaaaaatgaggccaagatgatgaaagctgggggcactgaaataggaaagaaactttgcagaaaagagcgaggcctatttagtgctaatgatggaagtgtaaacacttgcagcactgtgactgtggccagaagatcagagtgtatatgtgtaatactccaaagtatgctaaattagaagaaagaccaggatatggtggtggtttacaatgacgagagcaaacctgtcgcaatatcttagcaaggagaagcaatctgatgggtgaatatgcatgagtttggaaaaacacaacacaagaaaaaaaacacaaaaatttgtgggagcgcttggcctccgaaaaacaggtttttagaacactttgttgtggagggggggacacaaatatggatacggaaaagtgggccacaaggggtgtcaaagaaaaccgtggacataaaaaagggttgggtttctccccaaaaaaaaaaccgccggaggaacacagggggttctggaaacaatcccagaggaggttcggaagggacttagccggccaccaaaacggggcccagggggccggaaaaaatacgcccgcgaggcgggagaagaacagaacaacacaccaaaacaacagaagcgagaaacccagaagaaggacatatcagcctaacagcagaccagaaccagccagagcatcatcaatacaaaacacagcaacgcaaatacaagaaacaaacaagaatcaaacgacaagcgaaacaacaaagaacacaacacacaaaagaaaa

SEQ ID NO: 641208 - DNA, 461 bp, Homo sapiens
aatagttgaatacacggtgagagaaacttgtaatacttgtaaaatagaccgctggggccggatgaaagatgaggcgtaaatagtactgatagatttgttaaagaacgaaataacggcagctaaggacttggtaaaaaatgacatagtgcgcggtgcgacggcagagctggcgttggggcgagggcgaccaacaaatatgaatggtataaagcacgcgtgtacggaaggaatggtaaccccgtgacgtgaaggagctactggtgccatgatccagcagggcattaatggtactacagacagtattgacgtttagacgcatacgtttacaaagtgtggctgggcggagctaaataacactgccttgtgaatgtacagcgaggatacgctagggcttgcctgtaaccttaacaagaggcagattactattttgaggatgtgggatgtgattttgcttattatgc

SEQ ID NO: 641209 - DNA, 221 bp, Homo sapiens
  misc_feature (9)..(9): n is a, c, g, or t
gaggagatngtttgaaccaggaggtggaggttgagggagctgagtgacactgcactccagcctagcaacagagtaagatccatcttaaaaaaaaaaaaaaatccgggtatttcttctagagtgtgcttgtgtgtgaatatctgtatatgcctaagtgtgtgtactgagtcaggactgagaaccgttgctcaaggccagccagggggggtaccgaggtcgaa

SEQ ID NO: 641210 - DNA, 303 bp, Homo sapiens
ttttaaaaggggggggttttttttttttccccccccccgggggaaaaaaaaaaaaagggggggcccccttttttttccccccccccgggtttttttttgaaaaggaaaaaaattttaagcccccccctttttttttgggggggccccgggggttttttggggggggggggttttttttaaacccccccggggggggcccggggggtttttttttgcggggttggggtttttcccccccccccccccttttttttttttttttcccctcccaaaggggggcaaaaaaaggggttttttttttta

SEQ ID NO: 641211 - DNA, 343 bp, Homo sapiens
tctttcctctagatggtggagtacagagaagatatcaggtgagcccttagccccagcctcctcacaccctgatcctggaattggtcaccattggaaatctgacaaagggagggggagtaacaatcattatagagtcacgaaaatcccaacagtggcacgccaaacacacagcttccacttcaggaacatcaaacatccgtagaaaatacctgcatgttccattgggcctttaagtgaggagacttacagtatgtatgctaagattccagtccagtctttcacaaaaatgtgggtgcccctttggaatggggagttcaaagctctgagggcgattagggttagt

SEQ ID NO: 641212 - DNA, 107 bp, Homo sapiens
gttaaatgcgcaggtacagggtgtgaagcatacaaccctacaaagctcactgccctcatggacgattacacgctaattgggtgagacaaatgacacacattaataca

SEQ ID NO: 641213 - DNA, 661 bp, Homo sapiens
  misc_feature (17)..(17): n is a, c, g, or t
  misc_feature (329)..(329): n is a, c, g, or t
  misc_feature (333)..(333): n is a, c, g, or t
  misc_feature (372)..(372): n is a, c, g, or t
  misc_feature (391)..(391): n is a, c, g, or t
  misc_feature (434)..(434): n is a, c, g, or t
  misc_feature (443)..(443): n is a, c, g, or t
  misc_feature (452)..(452): n is a, c, g, or t
  misc_feature (475)..(475): n is a, c, g, or t
  misc_feature (521)..(521): n is a, c, g, or t
  misc_feature (525)..(525): n is a, c, g, or t
  misc_feature (573)..(573): n is a, c, g, or t
  misc_feature (583)..(583): n is a, c, g, or t
  misc_feature (602)..(602): n is a, c, g, or t
  misc_feature (609)..(609): n is a, c, g, or t
  misc_feature (626)..(626): n is a, c, g, or t
gggtggaatctgttgcnctggatctttgaaatgtctccctaaactcggccttgtaggaggataggccattacattcagtggcaaaaactgcaattacttttgcaccaacctaataaatacattttctctctatctttccttccgtacagaaaacttcccctgccgaattgcactctgtcgacccatgggtcccaaggggccacaggaggggccctggaacctgcctccagggaggttctagaggacattatttatcacgcggctaaggcggggctcctggctgccagcaatagaagcctgttctggctgagctcaggtgaaaaggagcntctncagggatattgggtgggctttggtcttcagcccttacanaattctcggtcctggactnaccctcccacattaaacaaccataaaattggacaacatttatnagggaactnaattcaggngttaacaacagggagttcaaganttcaaggaagaggaggaggtgtgcgccccaaagttccctggctctnagcncgggttacagcttccctgttgcaccacaagcggaagttcaagggagcntggtggggtnccaccgacccaaagatggncccactnttctcggtcccacttanccgagggcgcaaagatcggaatttgggggaatgtt

SEQ ID NO: 641214 - DNA, 101 bp, Homo sapiens
gaagagttaaagtcggaggttcgaagacgatcagataccgtcgtagttccaaccatactccccccggaacccaaagactttggtttcccggaagcttaagc

SEQ ID NO: 641215 - DNA, 122 bp, Homo sapiens
gaagaggcagatactgtggggaacacatggaggtaaagtgtgcttggtccgcagcgccagccaggcctctctctgggcgtttatatgagggccccgccctcaggtccctgcgctactctgtg

SEQ ID NO: 641216 - DNA, 194 bp, Homo sapiens
actctgtatcttctatcagcatctaaaaaaactggcagacaaggatggtagattcttctcaggcagttaacctgtttcaaccacgatcttgacccccttcaaccctccctggtcttcactttcaaatctcacccagcccacgtccttcccatctgagtcaatggcctcaccatccatctcgtcgagagcgctct

SEQ ID NO: 641217 - DNA, 602 bp, Homo sapiens
  misc_feature (3)..(3): n is a, c, g, or t
  misc_feature (119)..(119): n is a, c, g, or t
  misc_feature (258)..(258): n is a, c, g, or t
  misc_feature (261)..(261): n is a, c, g, or t
  misc_feature (268)..(268): n is a, c, g, or t
  misc_feature (270)..(270): n is a, c, g, or t
  misc_feature (273)..(274): n is a, c, g, or t
  misc_feature (277)..(278): n is a, c, g, or t
  misc_feature (281)..(282): n is a, c, g, or t
  misc_feature (285)..(285): n is a, c, g, or t
  misc_feature (287)..(287): n is a, c, g, or t
  misc_feature (289)..(289): n is a, c, g, or t
  misc_feature (293)..(293): n is a, c, g, or t
  misc_feature (295)..(295): n is a, c, g, or t
  misc_feature (311)..(311): n is a, c, g, or t
  misc_feature (313)..(313): n is a, c, g, or t
  misc_feature (321)..(321): n is a, c, g, or t
  misc_feature (323)..(323): n is a, c, g, or t
  misc_feature (327)..(327): n is a, c, g, or t
  misc_feature (333)..(333): n is a, c, g, or t
  misc_feature (348)..(348): n is a, c, g, or t
  misc_feature (355)..(355): n is a, c, g, or t
  misc_feature (362)..(362): n is a, c, g, or t
  misc_feature (364)..(364): n is a, c, g, or t
  misc_feature (367)..(367): n is a, c, g, or t
  misc_feature (376)..(376): n is a, c, g, or t
  misc_feature (387)..(387): n is a, c, g, or t
  misc_feature (394)..(395): n is a, c, g, or t
  misc_feature (398)..(399): n is a, c, g, or t
  misc_feature (428)..(429): n is a, c, g, or t
  misc_feature (434)..(434): n is a, c, g, or t
  misc_feature (438)..(438): n is a, c, g, or t
  misc_feature (442)..(442): n is a, c, g, or t
  misc_feature (455)..(455): n is a, c, g, or t
  misc_feature (459)..(459): n is a, c, g, or t
  misc_feature (467)..(467): n is a, c, g, or t
  misc_feature (472)..(472): n is a, c, g, or t
  misc_feature (476)..(476): n is a, c, g, or t
  misc_feature (481)..(481): n is a, c, g, or t
  misc_feature (498)..(498): n is a, c, g, or t
  misc_feature (535)..(535): n is a, c, g, or t
  misc_feature (577)..(577): n is a, c, g, or t
ttngccaagagtgcatgagctcccaatagcaccttggaaacctctgggagcacataggaggctgcaggaatcagcaggtaggaggctgggacaccagcatggactagagaacgtagtgngtgccttccttccagccatggccggctgtccaccactaccacccgaaaccgccggccctctgtccaagcctcctgaagaattcgtgataccagagatgagcatccatataccaggatcacatctccattactgatcttntgngtaagcnangcnngannttnnctnancngctngnacaatcttctcttgcncntaccgatnantggntgctcntttttctgacttggnctcctcntcccgcntnganctgcccccnctggtgatttncttgttnnggnncttgatggcgtagtgcatgctcgctgacnnggganggcnctangtcaggaagctcntgtngggttttngtttnttcnctagntccctggagagtcttcnttaggcggtgttgtgtaatcctgaatcacctgctgcnaggcacgaagcagggcaatacaccgggcattggagcactgancaggcctgggagtctgcaggcgagt

SEQ ID NO: 641218 - DNA, 450 bp, Homo sapiens
cactcttaagaaaggtttaaaacattttgagctgtgatgcaaataaaagccactttacatctctaactttgtgcagacatatatatgagccaaacaaaatttgtgcagaacaatacttcccctggaaagtaaagagaagggatgctatatttgagtgaatattttatgcctatcatattcataggaatgccacatacttggatttctgtgagtcttgcatgaagtctataatatgtcctcattttaaagatgaagaaatcatattaattacctgtttgggaaactctactctcacaccacaacaatcaacataggaagatctctgttgccaaatagtgtgggggtttttccctgcacaccaagtaatgtacaccagctaggtgtcctccagttcagtttccacactatttactgggagataagcatcagatttccccaagggacgtggat

SEQ ID NO: 641219 - DNA, 385 bp, Homo sapiens
tcggtttcgtccatgtttcccaccattggccctgtgatggcaccccctactctcaccctgggaacggaagacttaccgggccttctctggatcccccactcaccttgctctcttctctctcccagtccattttgctgactaggaagctggagtaacatttgtgagtcgcataaagagggaactcctcggtggggtcatggaatttgatattcgtggggagtctcttaggcatgttccaccatgcctggctgattttgtatatttatagtcgagacgggattcactatgttggccaggctggtctcggactcctgaccccagatgatccacccgctttggcctcccaaagtgctgggattacaggcatgagccaccgcgcctggcc

SEQ ID NO: 641220 - DNA, 652 bp, Homo sapiens
ctgcctctgtctctttaacgcgagaggaagcgatgcagaggggtggaaaatggcagagctgcagatgttactagaggaggagatcccgtctggcaagagggcgctgatcgagagttaccagaacctgactcgggtggcagactactgtgaaaacaactacatacaggctacagacaagagaaaagctttagcaggagacactagaagcactatacaacccaatctctagctagtgttgcttatcaaataaatgcattggccaacaatgtactccagttgctggatatccaagcctctcagcttcggagactggacgctcttccactacgaaactccaataattccttcaaacaaaggaaacctgggctggcgcaacttaattgtcccaatttacaacgcggaagcaccacacgtgggacacgcaagagagatcggtatttcgaccaacaacataagaatacatcaagaactcacacaaataatagcacctgcgaatatggagcgccctgtaaggtatattcggaaacctatcgattacacagttctggatgatgtgggccatggtgtcaagcatggacataacagcctgcaaagaactggcacactgtccgagaacaaatcctcctactcagaaaccggcaaaggttcctcc

SEQ ID NO: 641221 - DNA, 644 bp, Homo sapiens
tggtattttaagtaaaggcagagtttcaccatgttggccaggatgttctcgatctcctgaccttgtgatccgcccacctcggcctcccaaagtgctgggataacagggtgtgagctaccggacccgtgccaattataaactattcttagctcagtgggctatgcaaagccttaggctgaccccgtgactccagacgtgtcttctgagacaagcatttctgtgagctgccccagtgtgataactgagttgtgcagtagctgatggtggttaaatggcctctcccattctacgtgcatttgctcagaccagacgtgacgtgcacaggagcagtgtggaggggggctgcaatatgccaaccatttactcttcaatagaggtgtccttcagtgagcctcctctctctctctcattactgactaccctcagctgtagaacaccctcattttttcccccagacctatccttgttccccaattgtgcctctgctccccgtgggttggggataaccttggaaggcagagaatttctgagttctctaacttatttggtcccctaattctccctcatatctgggttggagactcccacccttgtccacccttttcctgactcatactagtatccagagtagggctgcccctgga

SEQ ID NO: 641222 - DNA, 993 bp, Homo sapiens
actatgcaagaagtcaccatcagaacgcgtgttaggaaagttatttctgatggtgacttctgcatagtaccaacggaaataaagaaaagcggtgcgtgggttgaatgattactaggggtcatcatgcggcgataacacaggttgcaatgtgggccgaggtctaggattaacgaaggggaaggaaagtaaagcaactactgctggaatcccttgccacacgtttctcacttgctcttgaactaatggtacaaacgtgaggacagctggcagaagagactgcataaggaaactgcacaagcacaagaagcaaacagagcgaacgcctataccaacatgcacatgacagcaacttaacgaaactctcccactatgggaggaccggccatcatgaacaacggcctacaccgccgattcattgacagcacgagtccacgaatgctgaacgaacgccatgcgcgagggaacagagcaacgaatacacctagcaacgaaaccggcgccgtactgcaaactcgctaccataaccaataggccgacatgccgcccccatcccagcgagccgaaaccagcacgaagcacaacccataacaatggccacacaagccgcaaaaacactgccagccaagcccaagtgaaacactataaacccaagacagcgcacaaacccacaagcaaaagacgacaacaacggaaaccgacggaaccaacagaaacgaagagcaaaccacgaccaggaccaccaaaaccagcacagtcaccagcgaccacgacacgacacacaccccagcgccgagacgccgcacgcggcgacccccagcacgatcgcgcgaagacgggcccggctcgacagcagaggagcgacgcacgcggaagacgcgagatccaagcggcgaggcacagcgggcgccgagaccgacatacagccagaagagccccggagcggcgagcgaactgcgagacacgaaaactagaaatggagacgaagccacaccg

SEQ ID NO: 641223 - DNA, 118 bp, Homo sapiens
gctctctgcggtgactctaagaggatccgactcatccaacgccgctgtgactgtcacgccgctgactgcattcaacgccgctgactgcatcaacgccgccgactgtattcaacgctgc

SEQ ID NO: 641224 - DNA, 292 bp, Homo sapiens
ctcacgacacaccaacacacaccacacccacaccacacataaaccacacccacacccaacacacataccacatgcacacatcccaacacaccacacacccacaccaacacaccccatcatcatcaccatcagcatcagcatcatcaacaccgatattttcatcatcactatcatcaccatcataaacaccatcatcaccatcaccatcatcattatcacatcagcagcagcatagtcattatcatcaccatcatcaccatcgtcatgatcatcaccatcatcatcatcatca

SEQ ID NO: 641225 - DNA, 1048 bp, Homo sapiens
atcttaatcatattctaaatctctctctcaatagaagtaaacctatttcctcactctctcagagtacttagtacctaatacatgatgcgagccagtaagaagatgagtgttaagacacgacgacccaagctgaaagtaaaaaatcgtgagactattacatccatctatacttattccagcgatgagagcattgaaatcaaatagccaattatgtcaaacaggaacagactttttaaagagtaacccaaatatgtgtatagtttgtgatccgatcattagaatcttatcacttaacataattggcagtcattctcattaccattaaagtctggttgtgagactcgccagcatcggtgcagcccgtgtctttacgtgaacctacgcgagctcgcggaacgagacgtcgttaacaatggattttagacccattcacctttaaattcaccctcacgaccacacctccttactccacttgagtgatagtcgtcgacgcctcgaggaaataatcacaggccttattttaagggctcgcaaaactagagagcctattttaatcgagagtgaaatatcgtcgcaagtaagacactaaatatgatttcgaatcgtttgcgcaccaacaatcatattgcacaaacaatcaacctcctcacattggataccatctaacttgatacacattgggctcttatatctacttctcaagctcgtcaagtcataaacttacttcccctggaattttagcaccgggcataagtaggaagtgatcgacgtttggaccgtggcttaaaaacggatgggcagtatagtcgtttcacaaatcgggcgctcaggctcgtaaacgaaaggctaggtacacgtcaactgtattgtcccccctggttagcactttctttaatctttatggatgtcaactttgattattgagcaaaaaaatcagagaatcattaggggtgggccaggcatttgtggttccgcggggaagattgtgtcaacaaaaaggtgtttgggaacccaggcgccaggggacgaggcccccagtggggcaagg

SEQ ID NO: 641226 - DNA, 116 bp, Homo sapiens
ctcttcacgtgcgaacgtgatacaccggcaactccatcacgaacggcgacgcttcgccgcgcataagtggtatgcttcagcatcagtccggtcgcaatcgccatcacgatccccag

SEQ ID NO: 641227 - DNA, 830 bp, Homo sapiens
tggaaaaagtcttggaggccatggggtgggcttgaaaccagcttgggggggttcgatccctccctttttggtctaaattataattgtatacgggttcttcgaatgtgtggaaggggtggggggcactccattatagtcaccccaggtgttaatgggagggtgttctctctactattagagacttttcgcttcagaagcagaaaggttctctcaaattcatgagaaatttattaatattacttgctgttagaaaaagtgaatgaccctacagatgatatggatgtcacatgtggtgtatggcatcgggggtaagctccagagtaactgtcggggcatcccgggataggcgccagaagaaatgttgttgtgttggcggcgaaagaaatgttaagatttaccgccgatagaatatggatatgtagaaatgggattttgggcgtagtgtatgggtcaagggtggtagccgtgagaatcgggggaacactcagtgaattgagagcctccttatgatgggcaatatcacaggctcccttattggtatagcgcacatacttgggaatgtagagctacaagtgtaatttaacgtgtccgttgtagatccggatgccaaggtgacagagttggcgtatctaacaagtgcccagtcataggcccaccttacggggtcaacacgaaaggagtgaacccaagggccacaagagcccgtggggcagaacattcacaaatagctccccgagaaagttgggcagggcaaggaaaaatagaacccggggagggaaacgaaaaaaaggaacgcggggaaaaggccgggtgtacagaaatcactggaa

SEQ ID NO: 641228 - DNA, 282 bp, Homo sapiens
atcatctctactggaccagattctgtggtgaagctggagatttggacagatgcctcacgggtggatggcgttgtctcagaaaaagtgcaggaggatgagtaccgcctatcgaatgtaccagactcaggctctcagacgcacggctggtaccgctgcatggtgacagcctggtctcctgctcagggtgcgcctttggcgataagccgcacccagtcactccaagtccatattgagatagacttccatgcctcagggtcctatatttaatgcttctgtggattc

SEQ ID NO: 641229 - DNA, 123 bp, Homo sapiens
atgtccctagcgcgaggactctaaaagtgagattacttggggcatagaggtatgatgggttttcagatatctttgtatctgacaccacgctccccgggtgtgccccggtacgcgtgacttatg

SEQ ID NO: 641230 - DNA, 326 bp, Homo sapiens
atatcaacagataccaattagaggaactggacattctactttgatttagcagaattaaggcaatgtcccttgtgaaacacttggtgcattttcacaggagtcttgttaaaacataagatccagcgtctttcaatgtttgttatcaaatgctaaaaatggcattgaaatccaaagaatcaggaagaactgagaaaagacaagggaatccaacattgaaatggaacgcctctcacacctatttggcaaagactttaatgcagtcatttaaatgcttcatcaagcaattatgaacatgttggaaatgattgaagaaaagtgtttcatga

SEQ ID NO: 641231 - DNA, 556 bp, Homo sapiens
  misc_feature (76)..(76): n is a, c, g, or t
  misc_feature (116)..(116): n is a, c, g, or t
  misc_feature (139)..(139): n is a, c, g, or t
  misc_feature (143)..(143): n is a, c, g, or t
  misc_feature (163)..(163): n is a, c, g, or t
  misc_feature (170)..(170): n is a, c, g, or t
  misc_feature (491)..(491): n is a, c, g, or t
  misc_feature (534)..(534): n is a, c, g, or t
atggcagctaccatgttccgggctacgctgcggggatggagaaccggtgtccagcggggctgcgggctacggctgntgagccagacccagggccctccagattaccccaggtttgnggagtctgtggatgaatatcagnttgnggagcgcctgtaccggctancaggatnccagatcccccaaagcatgaacattatcctacccctagtggctggcagctcccagagaccccccacccaacctgccttactttgtacgacgctctcggatgcacaacatccccgtctacaaggacatcacgcatggcaaccggcagatgactgtgatccggaaagttggaaggggacatctgggccctgcagaaagacgtggaagattttctgagcccgctgctggggaagacacctgtcacccagggtcaatgaggtgacaggtaccctacggattcaagggctactttgaccaggagctttaaagccttggcttcttgngagaaaggctttcttgaaggcccagccgaagcagcctgctttngttcagcatgcccttgttggat

SEQ ID NO: 641232 - DNA, 279 bp, Homo sapiens
ttagaggacgctgacgtaatatgtaacttatatctactgagtctcaccaatttcccgtctgtccaggtttaggaatgctaatagaagtttggtctccatttctatgtgcttcctagtgtcccctctctttccaactatatgcctgtaacataaagtaattaaaagaagattaagccaaaatgtaccaaaataaagaacctcattatgtttaaatcctttgtgacaagagatactcccttacagaaaagtagttcagtaaaagctcaatatttgcggaag

SEQ ID NO: 641233 - DNA, 496 bp, Homo sapiens
  misc_feature (179)..(179): n is a, c, g, or t
caaggcttggtgcatcattggcgcgaccctccattgtagtgtgaggatgaatatgaggagggatgcttccgcattgagcatgcacagctctttccccatggaccctgatcatgtagaggttgtgaaaagcacgatggcttgagtaagcctgcctgctccaggggttccatgcctggggncgggatgatctagacacgctcagtgggaagatgtggtacagaaagccctccaagcccggcaggcatcccctgcctggaagtgaccagagagcaagccgccttacctccctacattccaagtcaggaccagcacaggactaacaactctggtcttaacagcctcctccttcccatgtccctttcacaccaaggcgactcagacctctcagagacccactttattcagttctgtacatatggggacatcggcccaagcccagcccaccttagcatgtatcactctgtggagaataaagcaccctgtgtacacagccaga

SEQ ID NO: 641234 - DNA, 834 bp, Homo sapiens
tttgacagcgccagacccctttaatgactggccccccgccaatgggtcccccaccaagctggaagacacttccccccacgtgtggcacctcgaaattgggcgcccacgcttcaattacatctctactgaaacagtgagaatacacaaaagagggtaaaaaatcttcttctcgttacaacgcccactctaaactctcttctcaaaataaatcgtaataggctatcactctccctcgaaaagagatctatggccaaacagatatatgtcggttggtgccagccctctatgtatcaagcctagccaagatcgagagagatcctcacatgatttcaaaaaaggggacatcttgtccacaagaggaagagtcagtttctcaaacagcgcgaggtcacaataacaaatatacatctcggtggcgatttcttcaccacacacgggcggagttgtctacaccactggtctgtgagaccgcacacttataacgatgcgagattagacgcactgctggtggatcgccacccccatcgatgacaggagagagagtaggggcactccctactagctcctttatacacaagacttggtcgtaactcgagattacggaggcccaacccacaggtggttcgcagggcccctcacagtgtgagatagtatgattggtgacccaagaattcttgctccccgcccctcccccgagagatgggaactattgtatagattcatcccaccctgcgggtaggcccggttagatatgaaaaacaaaagggcgataagtgttcatgtaccgttacaacactcttgaaaaaaaaagggttaaacaatccacaaaacaca

SEQ ID NO: 641235 - DNA, 319 bp, Homo sapiens
ttttgcctttttttttttgcaaatggttttttttttccgtttttgggggaactttttttggggtttgggggcccgattccccattggttttttttgggggtgccgggggttcccttgggtgggttttttgggtttttccctggttccggaagttttgggccccgaaagggttgaccccgggccccgggttttccccccccttccggtttgcctcccccccccggttttgggtttccccccccccccttttgtttttccgggaatttttttttactttttctgtttaaaaaaaggttttttggtcctttccccagagaga

SEQ ID NO: 641236 - DNA, 443 bp, Homo sapiens
cacccgagtgatgccacatcaccgcccatcacctagagatctgacaaactgatagatcgacatgcaccaagtcgtgcactctgagctcttatcgcaccagcgaggtattgctgctgagaataaagtctccctaaccccagtggtctctttacgttgtctcagagtggattgccacgtgttcctgatggcttaactctctataaatgcctcttctggacattattttaatggcttctaataggatggcatattttaatacacacagtatattaaaggcctgaaggaaaccgtagaagaaaacacctcgttctgtctagaagtcaaagcgacacctgaacttgttctaatatctatatttttattttttttaatcctcatgggtcactgaggctttttattttgagcacaaaaccaccgggaatctagcctgtggtcaaaacggg

SEQ ID NO: 641237 - DNA, 557 bp, Homo sapiens
ggagcggagagcggatcccagagagaccctgagcagccccacctgcgccgccgtggctagttaacatcacaccccgggaggagccgcagctgccgcaggccggtcccagtcaccatcaccgcaaacatgagcagcgatggcctgagacccagcagctgcgtgtgccacaggcgactttcgtagtaatagctgacggtccgatggactaaaagagtgtgaaactagggggtgacagagatgcaagtgcagcgagttgacactgagtcagtgtgctgacaattcgtgaagagcagtgacacgtacgtaatgatagagtaatggattattagtgacaccgcaagggatgaatgcaggcgaaactacgattaatagcgagatactaggatgttacaggaaaacgagtctacaggggttgacttgaagacagggaacccttgaatacgagagagtggcaaggcagcttgggtggaattatgaaatgatgggttatgtaccagagaactgccgctgggaatcctgagtagagatgcggttataggctgaataagctgtttgag

SEQ ID NO: 641238 - DNA, 457 bp, Homo sapiens
gagcaagacaaagtgattaacacaataatttactcattgattatttgttaaacatctacttcaagctacaggccactctaggccttggagggtaaggaaacagcacctttgccctcagagggtttgcaatctagcagggaggggaacataataaagtgtataaaaccaggctctggctctgaagttccagcactttgggcaggtcacttgaacccaggagtttgagaccagcctgggcagcatagtgaaaacccatctctactgggggatataaaagttagcggggcgtggtggtgcatgcctgtggtccctgctacttgagaggctgaggcgggaggatagcttaggcctgagaggcatagttcgcagtgagccgagatagcacctctgcactgcggcgtgggtggcagagcaagaccctgtctaaaaacaacaacaaaaactgatcttaagtcca

SEQ ID NO: 641239 - DNA, 583 bp, Homo sapiens
  misc_feature (558)..(558): n is a, c, g, or t
gcgtggcagcatgcttatatgggggtgtactcccatgatgccctttggcctttatcccggttacccgaagccccctgggaacacaccgtttccctgtgtctttgggggggggcccccccccgaaaaaaaacccccccccgccccgattttttccgccagaaaaaaaaaaaaatagggccccccccgggggaaaaaacccccccccccccttttttttgtgaaaacacccgggaaaaaaaacaccccccgtagaaaaaaccccccctggttgatggtgggggaaacaaaaagagggctggtttctttagaataaaaaaaaaaaaaattcccccccccgtccaagaaagagggggggggggaaaacctggggttttttaccggggccacccccaaaaataccccccctccaaaaaaccccccccaaaaaaaaagggggggcaaaaaccccccacacccccccccaaaaaaaaagaaaaagaggggggcggaaaaaatacaaaaagggccccccctttttttttccccccaaaagaatgaaaagaaaaaaaagggggggcncaaaattctaggggggggccccaaa

SEQ ID NO: 641240 - DNA, 705 bp, Homo sapiens
caatatccatactggccttgaacaggtctcatttctaggaatactagatataacaactcatacaatgcgaatatcctcccggtactatgtccatagagagagtaatactatcagatgcttcatgataagctgaacatctcataacgctcatcaaccatgccctcttactcatcatagtgcctgttgccaaactaagactaaggcgtctgctgaacctacaaggtgagcctagcacgctatctatatctgcgagtactacacacactagctctagttggacaaggatgtaaggtgacttaaacctagaatgcgtatttccaagtgtctaaggacatagatcagtcgccagaaagagttaacatgtatccaagcctgtgacatgcacctcttccagagaaaacgacttcattggagtcacacaaagagcaacggcacaaggcctgaatctattaaagacaatacgcgctcctcctgaacttgattcgctcttgatcgccaaatgtgcaaggcaacgtacactgatgttaagttagttacactcagatcacatttgcagggaacaagagtccacttaggacatagcacacgatctaccatacgtaattaaacgtacctttgaaatactgacagtacgaaaaagcaaaaccatggtgacacacctcagaccagcagacaacttggcacaatcaaaacacaacctgctag

SEQ ID NO: 641241 - DNA, 286 bp, Homo sapiens
agtaacaatgttatattgaagacttgtagtagcgcttttacctgatcaagtactaagttttgcaatctctttgggctcttgttgatgtccaagtgtctttgttctccagtctccttccttacttcagtttcctccttgttccccttctgtgtttcccttcaatttactaagaagcttgatattcatgcttttaaagatggttcgttaggacatgggtccagtatcttcctgacttgctgtctctccaaataaagattcttttcttgttctaaaaaaaaaataaaaa

SEQ ID NO: 641242 - DNA, 735 bp, Homo sapiens
ggctgaggcccaggcccagctacaggagtcctctcagaaactggacctcctgcgcctggccttgtgagcatgctgctggatgcaactgcctcctgcccaccctttgctgcatgcagagtgaccctgatgatgtttgctggtgcttgctgtgtgccttggatacccccatgccttcatgtggacacactgtgaagtgcccacctgcccttaacaggtggacacttgcaagtgtcctgccatcctgtgtgcttgttgaagcatgtttgcttgagcatgcctgttgccattggtgctggctctcccatggctgggcctgcaacttggccaagcgaggcgcccctcccggacgtgggccttgtgcctatccggggaacccgagaatgtggccaatggccacacaatgcctggttggggccccgactgtggcgacacggacattattggctcacaatgtcctgaacggaggttgagccttttgctggcattaggcttgggccttaacacactggggcgtcggggacaccaagaaaccccaggaatggactacgagatcggagcgcgcggccaaagcaaacagatggggccatcgcgaagcgagagccaaagggatagagggcaccggaaaacaaacgataaccacatggagggcgagcgcccagggcaacaccctataatgcgaccaaagctcgcccccaagccatgtgccgaacggccggcagcgagccccccctggtg

SEQ ID NO: 641243 - DNA, 2642 bp, Homo sapiens
gccacagcgagcctctgcgggagcgcccggtacccgccgcgcccgcctgcctggccctacccgggttgctgggcgcgggttggggcgcctgccggcccgccttgtacggccccagcctctgcgctccgccttcgcttcgcgggtcagcagaggacggagggcgctccgggagctgcacgaggctgccccgggcccagcctccgctgcgctggcagcccgcgggcagctccgagcaggaggctcagggtggctggagtgtggggcccggcctcggtgagcgacaccacggaccccggccccgggccatctggacggcgagcgcgagcgcgtttgaagtggtgggggggctctttgttcgccaggccgctctggctctgggcctggaggtggtttttacggctttgatgcctttgaacctattcccaggtgacccgggctcaattaggcccgggcctgagccgggctgtcaggcaagccgcgtgatcaagggcgggctgggcccttttattgaagttgaacccgagaccggggagtgctcggcctccgctgctcctccggccggccaggcgggccgcgaggtggggcccgcgggccacgaccaccgcgttgggaaacccgaggacggcaaagagcgggcccttcgcgcccctgtccgagggccctggctccggccgttctaggggacgttttaccaacaatccgtccaggaaggcagaacgcctaggagcgggccctcgcatgcatgtgagtcggtagcagcgccctgcgcagtgtccgcgcaccggacccgcggcttcagttcggtgcctaaaggttctgcagagccaccgcacccagccccacccggcctgaccgccctccttcctccgcgctgggaaggcccacggcccctctagcccaacaaaatagctttccaggtccctttctttaaaattctcaaataaaaatttaaggaacgagagagagagagagagagagagagaagccaggtccccagccgtcctgccggtgctgggctgcagcccttcctggggcttcacgtcagatggaaagggcctgtttttcccgaactggcctttccctggtttctttgctcagagcagtgacagtagcgatttgctgcccttttaccaaccctgtgtgggtccaaggacccagatccagggacatcttccctttcccagatgcggagggcttttactgaggagaggacctgcctggtagcctgcttcgccatcctcgtctccctgtctgcgtgcccctgtgtcactctggctctgtcggcgtgtctctttctctgtcctttctgtctctttctccagcagagagagttcatagtttagtttgaaagaaaaacagctcagctttggtcctgagcagcccagggctcagcccagccctgaagaccagaggccccggggacgccctggaagggcagcgcaagctggattgcaggctcacctctgcctggggagatggacctggaggatttcacctgcgaccccccggggcgccctggagctatcataaccagcagcccagttcaaccgtctggatgcactttcttcatggcgtgtcttgtctattttaaaatgctttaacaatgattatagtactggaggctgtgatactgacggctgcctgcggaaaaccttgcttaacagaatttggagtgactttcttatgctgtattgccagcccctcagagtcattacctgggcagtgaccccttgcatacataggagaagctaaggcacagtggcatttagcagcgtttccaatgtcacctgtatgttggctggggaagtgacagcattcccctcttttgaggaggggaatttgctgaattaaaacccaaatgaaaatgtcatcaatttgggaaataatactcaggttattgatttagtttgagtttttctttcaaaaattaagtcagtgataaggctaataaagccaatttattaatagcataagtaatacaatatatctctgtgtgaatactctttgcaggaccacccaggctcacttggacttcagtaaaatatcacgcaacaaagattcacagaagtaaatacagttcttggggtacttattcattactgagtatggaaaatcctgtgaatgcttcctttcatatatgtaaaaaagtgtgctttgtttcatgtgactttgtgttttttaaaaaaaaatgaactggtgttctgaaagattcttctattgcacattttccttagggcagcaagtaacagaaggtgatatgttttcacagcaaatttgccagctattagattggctttaatcttgctgcagtagaatgacactgcagggattgtcacctggggatagtcttcaagaatagcagccaggcacggtggctcgcgcctgtaatcccccaactctttgggaggccaaggcaggtggatcacctgaggttgggaggtcgagaccagcctggccaacatagtgaaagcccatttgtactaaaaatacaaaaattagctgggtgtggtggtgcatgcctgtaatttcagctactcgggaggctgaggcaggataatcgcttgaacccaggaggcggaggttgcagtgagccaagatcatgccactgcactccagcctggacgatagagcaagactgtgtc

SEQ ID NO: 641244 - DNA, 1052 bp, Homo sapiens
cggacgcgtgggtcgacccacgcgtcgaaaaaaaaaaaaaaaaacaaaaaaaaaaaaaaaaaaaaaaaaaaaaaaaaaaaaaaaaaaaaaaaggggggggcgcccaaaaatcccccgcaggggggcacaaaaataagacaaccaattttttgtgaaaggggggccccaaaagggggggaataatataacagcaaacagagcggcgctgactgtatattacacacactgttgtaatgtggaacacaacagcctaacagcgcgaacaactatcgtgggaacacacaccccaccacctctcattgggagagcggcagacaaaattattgggacaacaaaaatcgccaacacaacaacaatcataacaacgaccaccaacggagacgaataatttaaaaacgagcagacagaaggataaaaaaagggtggaacacacaacgcagactcaacaaatacatctgaagaaccacctaagagaaaacctatcgggcaccctacgaacaactatacaataagcaggagaaaacaacttaatcaacacgaccagggcaagacaaaatcaagaacaaagcacccaacaacacaaaacaaaaaaacaactaaacaacagaccaccaataacaacacaacaacacaacacaacacaaaacgaaaaaaaacacaacaaaccctcacaacacacacgaaacaccacaacaccccaaacgccacaccccaacacaaaaaaccgaaacaccaaccagcaaccccgcaagagacagcggctgagggacaaacacgaaagagacacaaacgaaaggccaaaagacgaaggaggcaggcagaagaggggaggagcagcacaaaacaacgaaagggacgaaagaagcagggagaaagcaaaggaagagaaaggacgggaggaggaggagagggagaggcgagagagtaaacaggaccagcagaaaacagaaaaggagaagcgcaacaggcgaaacaaaaacacaaggagcccaacgaacagaaaagcagaacgaagcggcgaacaacgagagaacaaagaaaagacgaagcaa

SEQ ID NO: 641245 - DNA, 372 bp, Homo sapiens
gttgtcaacaaaacctgaataatgactatttcctctttcatttcaacatgtacatcctaattctgcccagattttgaaaatactaataaactggactgaaacattcaagtctacctacttaatgacttttgttaagtgcaaattatgttcatggcactatacttggcctattggacctataaaaatgaatgagatgggcttggtggctcacacatgtaatcccagcactttgtgaggctgaagcaggcacgaatcatgaggtcaggagtttgagaccagcttggccaacatagtgaaaccctgtctctactaaaaatccaaaaattagccgtgcatggtggcgcgcacctgtagtcccagctactcagcagg

SEQ ID NO: 641246 - DNA, 850 bp, Homo sapiens
gccttgtttggagcgtctgctctgagtggtggtgtggtcacgtctcgaaaagcggtatggcatggcgaagggttgagtcaactgggctgtgagtagcagaattgcatcattttgaaaggaatctttctgcactgatttgaccaagagcatggtgcatgggaacgtagtaatgaaccagagaggcccttggtgacctagtgaatgtagtatctctttgggcagcaatcccattagcatggatgagttcccagggaccatgtattttatcgccagtatgatgcgtggtggtaatgtggcctgatgtgacttccctgggagtttctttacatgtgtttggggaggaaaaaaaattggtgagagcatgagaactagtgcacgtaagaaatggagtagatacagcatggcgcggggtgttggatgagatgcatggtgaatggctattattgagttgatcgcgtaactttctgccatgtgcattggacaggatctgtgggaagagcaatgtgaccttcattgatgaaagttgggtggaagggcatctagggaagcacgatatttgagtgcctgagtgtgtcacgttaaggcctactgacccacgttttgtccacagttgactgacctgatttatgtgaccgtgcgttgtgcagaaattgtcgtcacaccttcttgtaccaacccgtcgttcatttgccttgactttgttggtaagcttatctgcacaaggtttctccatactgtcaaaaaattttggtgtctgtcatctaggacatcacttcctccatgttctccctaacctactgtattgtctaaaactgtttggcaactcgtcagtacatggcgacgtgatatc

SEQ ID NO: 641247 - DNA, 410 bp, Homo sapiens
gcttttcatcggcaccagacttgtcgctattcatcggcaccggggcttggtgtaaaatagggtataattgctctgggtcgcctacgaggctctggtgagcaatagtgttaaatgttccttaacggagagaaggaagagaagtaacgccgaggcgcgtctttgatttgtgtacctacgggtggaagagtgattttatcgtgaatgggatgcgtgattcctactggggtcgtttgatcccgtcttcgtgctagattaggaggtggagtgctgttagggctgccataatttaagggcatacgatgaagtgaaacggtaaagaatcgtgtgagggttggactgtctactgagtagcctcctcagattcattgaactaggtctgtccccatgtatgggatggtggatcgtaggtt

SEQ ID NO: 641248 - DNA, 156 bp, Homo sapiens
tgggcactgtactactgttcacttctgtaactgcttcagtggcttcttctggagaggagaaatatacaaaaccaaaccgctttgctgagagcaacctccatcataacctttgtcactagatgattgtagccaaatggagaaaactctttccggaga

SEQ ID NO: 641249 - DNA, 1035 bp, Homo sapiens
ttcagtgggcagcattaccccctctgctgcctcccgcccgcgcttatccaggcgtgcaccatgcagcgagctgcctgtgccctatcaggcctaccgccagctacatctcgcagtgatcactacatcctgcaaccggaccacgtgtacagaatgctgggtgcgcgtcagtctacgcccctcctgcgtaggcgtatcgtctacgacctgagtccgaccgtggtgcatcctattgcacgcacgtggcggagatcgcccaaatccacggcctacctcggcaactcttcacccttcgcggttgtccgagcgacatttcttgaaacaaaacatgaacagactgcggccatactgggcgtcgcacaccctacagcacggaacagtgctgcatgtacaaccgaagacctcccaggtcggcatcaaccattgccctcgtcgacttcccatggttgcttttttcctctagctaccaccgagtactgatcctcagttcactgtgcctatcgcaccacaattgctggaactccccggggggcaattgccgcaccaatcgcaccaactcttaacagcggtaaagacaacccattttaggcaccggagtataagtcccgcgatcttgccgtaaaaagtactgctacctggtgggaccaatgcgtcgtgtcaccgtgctcacatggtccctgacgctaatgggggccccccccaaaacataacattattgtccgcctgcgccattctagtcgtcgcacagtcggctgacccattgtcgacaaccgttctctaaacacaggcccacgcggcctcgcggccgcacctaggcgtagtgggaaccggccccgcactagccatgccacggcccgacgggggcaaccagccgacctcacatggggcaccccccaccacaggaacgcaggggcacgggagcataatgacgggtggcacccacgacactccaagacacggggcacaaccgcctccaggcgactgacaggggtaccccccaagtggttgcacacgcgcgcgaccaatggccgtcccgcc

SEQ ID NO: 641250 - DNA, 1126 bp, Homo sapiens
acgcaggagctgtcgaggaagatcagaaaccagtcatggattatcatcgcgagcttatctccagacaatgagcaattgcccatgctggaggcggcgccctggggccccggatatcaaatgcaggtactgcggagccctgtacgactagggcggtttgccatccctggatgactcgtgctcgctcgttggcgctaggcacatcaccggcgtagattccatgtaccagcgatgtctagggcactggcatggacggatagcttgagagtcactcttcccgatgaataccgtgctggcttggtagggaaatcatggggcatggacagcgttccccagaaagccatccgcaaagactgtgaacagagatgcgcatgtgccaccccggcgttgtcgtgaattctaggggcttgcctgacccattgagggcagtcccttgccccctggggggctccgatgcaagaaatggccaaccaaggtaattggtgccatgagtgatcggagatggatccatgtgatggcctcctgcgttcctggagatgctgacccccttaaggtgtacccgacacactgaaagggtgcatgctttcccggaagaatcgctttgatgacgaccttaatgatatcgatccatggagacactatagatctggaaaggtctttggagcacgctggatgcagcattggctcctgtgtgatcttgagccatgcactccttgttaggcaaaagcacagtgacgctccgcgtgagagtcctggtactggaggaccctgtctatctgggctgggttgtatgcatagcagtgatctgcgcccaggtctcccagatgagtaagcggcagaagccggatcaaaattcgtggcaggagcagacatgcaccgctttcatgctcacctttgaccgctcggatcccgtccgaactttcagactgtttggtatccataataccctggccctggcactagcgaacacagtgcagacacccaggaagcaggtggcgcgcaggctccggcgccaccacttccaccgttgttacgcgccattgaactacgatgcacggtcaccggccacgtgcggtctagcgactcgttccgacacccataacacaccagtacaagcgctgtcatatag

SEQ ID NO: 641251 - DNA, 279 bp, Homo sapiens
gcgacttcttacaagaaacacttatcagcgtaacaatcacggtgaaaccccggaggcggattgttgcggtgagcggggattgcgccattgcactccagcctgggtaacgagagaaactgtctcaaaacaaaaaaaagaaaaaaagagatagaatctccctctgtcttctaggcggaattgcagtggccttgttcattggattcactgtaccctttgaccttcctgtgggcaacaagttgatctctctttgccttcaagccttcccagaagttaacttgc

SEQ ID NO: 641252 - DNA, 406 bp, Homo sapiens
  misc_feature (9)..(9): n is a, c, g, or t
tggcttccnttgcccaaccaggggtaccaagtttttgcgcagggaggccccgcgctgggacgccccttttagggacccagcctttagacagctgctgtgagggacagtactgaagactttgcagccctcgggacccccctcggagggtgccctttgctcaggcctccctagcccctccccctaaccaaattttccctggacccccttttgagctccccctccccatgggaggtggggcctccatttaaggccttccctgtcaaaagggggttgtggcaaaaaccccatttcaagctgccctcccctccccgtttcagtggaccctgtggccaggtgcttttccctatccccaggggggtttgtgtgtgggggggtgtgcgtttcaataaagtttgtaccctttcca

SEQ ID NO: 641253 - DNA, 1025 bp, Homo sapiens
ctttctcgtactctgtcgtgtgtggcgagctcactctgtgtggtggctcgtcctagggcgttgtcgtggtgtctctcttcccatagtgggcgggcccagccccgcgctcctgtgtagctcctttgctcaggggcttgcacatgtgatttagggtttccgacaggggtgtacagcgtttacacgcctgtagttctgaggattttctagtgaactgacccgttaatttcagtcccacgtccgaaatccgagtagccacagctagaactctttgctgcggtttctagagtggtctttctcgaagtcatgggacccctaaggtaatgaccagagtctacccctggtggtcataaaatagggcaggcctatgaagaaagccctttactcgtccatctgcgtcccagccccgatgtgacccccgttgctgctcctcacaccatggtgatccaggtctcgtactgtgggcacaggcctgggtacctcatctttttagtgcctctctcctcttccacaggatggggtcccacagctgcagcagctggccccgtaattgagcacacgtgtggttatcccgtagagcttttcccacagaagggtgtttgaacttagagttcttaataaaatctttaccacaatacaactctttgaggtagaataactcgtctttggcaaatggacacttttaacaaactttcacacaccacttctctcttttgtatataaagacccgtgactgggcacccgtggctcatgcctgtaatccccgcaatttgggaggcccgaggcgggcgggtttcttgaggcccacggggttcgagaccagcctgggcatcatagggagaccttcatctttaccaaaaataccaaaattagctgggcactggtggtgcaagcctgcaatcccagctaaacttggaaggcctgaaggtgaggtgggaagatcacttgagccccggagtttgaggctgcagtgagctatgattgcggcactgcaactgcagacctgggacaatgagactgtgtctcta

SEQ ID NO: 641254 - DNA, 603 bp, Homo sapiens
tcctgtattactttcagttcagttagtggttcatgtccatacaaaggtgctatcctagggatctgatgaatgcctgaaaggacagtagaatatggatcaatttccttgaccctgtggaagagtgcaggaactgtggtgtgtgttgtccttggacttctgtaaaatgtgaccgtgtgagatcttgtggtagattgaacggaatatcgaagtgctgagtttactccataggtttcaaaccttttttatttgaagaaattcttgaaaaagcctatgttccatgggaacataagagttattatagtgcctcctaaggggttaactataagatcaaggaggaagtttatatttaaggaagaattggagtgacgtatcttagaagaaggaaaggctgagtgtttccatatagctgcttctccaccaggcctatcattgtttctttttagagacaaacgtgacaaggctagatctgtgtactctctcatatgctaggtagcaaactggggtgactattttgatacgaaggtgggcaaaaattattttctgcaagtttaactgagtaggcacacgaagacaagttcccgataggctgatgggttattgcta

SEQ ID NO: 641255 - DNA, 813 bp, Homo sapiens
tgcggcggttgggccgaggtcggtcggctcagtggcctgagtgtggctggacgcgtaccaggtgtgacggagggagtggatgccggaggtctgctgacccagccgccatgaagccccccgcagcctgtgcaggagacatggcggacgcagcatctccgtgctctgtggtaaacgactctgcggtgggtacctgtgtgccctagcagatggagggagtggcaccagtggagctcatcgagcattaccaacgcgcgtgtatgatcaggttggcacccaggagtttgatggacgttgtcctacgagagcacgctcaaggcgctggctcgatgtggaggtcacctacacagttcagatggaatatccttgacttcccccagcatgtttccccctccaaggacatccggacagtcaagcacatgagggccgacaagaagctctctgagttctgactgtggagatgacgcatgacggggaggacgtgtaccatgatggatctgtgtggctccaggagaaagttcagaaggactcactgaggcccgaggctgctgcggtacctggagcggctaatcaagctgggccggagaaatgggcttcacctccccagagagactcaggaaaacatcaaacgcatcaagaagaagctgagccttctgtgcatcgacttcaacaagaacctgaacgaggacacgaccttcctgcccttcacgctcaggggagctaggagggctccccgaggaatttctgaactcctggagaagatggggacggagttgaggtccctaagtaccccattatttcccctctgaagaatgc

SEQ ID NO: 641256 - DNA, 428 bp, Homo sapiens
atacacggactccccagcttgcacttcgtaatatgtttttgtgcttctgcaccttacacagagaagcatcagactatgtggaagctttgtaacacttccagaggaattacgaagctagcacttatgtggattttatcccatatttatcttccctccttttagagttactctcaggctgatcaaagccttaacttgaggataacgctgcaaaaagggatacttacttttcaattttctgcttctagttgctaagggtgtgaggtgagtctgcatgttgtaaggtgaatggcggaggggattattaagataaagaactgttgtgacttttaagatcttttcctttgaattcccattgtgtgtcacagaggaattaagaaaaagttgatgactgatcttctgaaggaatgcatgcagagaagtaagaacaa

SEQ ID NO: 641257 - DNA, 777 bp, Homo sapiens
  misc_feature (46)..(46): n is a, c, g, or t
  misc_feature (72)..(72): n is a, c, g, or t
  misc_feature (85)..(85): n is a, c, g, or t
  misc_feature (90)..(90): n is a, c, g, or t
  misc_feature (158)..(159): n is a, c, g, or t
  misc_feature (167)..(167): n is a, c, g, or t
  misc_feature (217)..(217): n is a, c, g, or t
  misc_feature (245)..(245): n is a, c, g, or t
  misc_feature (333)..(333): n is a, c, g, or t
  misc_feature (366)..(366): n is a, c, g, or t
  misc_feature (380)..(380): n is a, c, g, or t
  misc_feature (386)..(386): n is a, c, g, or t
  misc_feature (388)..(388): n is a, c, g, or t
  misc_feature (390)..(390): n is a, c, g, or t
  misc_feature (399)..(399): n is a, c, g, or t
  misc_feature (401)..(401): n is a, c, g, or t
  misc_feature (405)..(405): n is a, c, g, or t
  misc_feature (436)..(436): n is a, c, g, or t
  misc_feature (438)..(438): n is a, c, g, or t
  misc_feature (442)..(442): n is a, c, g, or t
  misc_feature (448)..(448): n is a, c, g, or t
  misc_feature (451)..(451): n is a, c, g, or t
  misc_feature (458)..(458): n is a, c, g, or t
  misc_feature (468)..(468): n is a, c, g, or t
  misc_feature (487)..(487): n is a, c, g, or t
  misc_feature (495)..(495): n is a, c, g, or t
  misc_feature (505)..(505): n is a, c, g, or t
  misc_feature (522)..(522): n is a, c, g, or t
  misc_feature (592)..(592): n is a, c, g, or t
  misc_feature (594)..(594): n is a, c, g, or t
  misc_feature (761)..(761): n is a, c, g, or t
tcctccactcccctcctcctacaatcagtcctatcccaagtcaggnactgagaacctgctgaaaaggctgangaggggctgaaanaagtngggaagggttcataggacctttacctcagagcagattaccctgagctataaccacatctcaaggattnnggggcgtntagatctcatctaagggagacacaacttttctggtcctcagatggaaagntgggggaaggtaacagtatttacccttncataaaaactttggaggtctttaggaggatacccctcaggagggctaggagaggaatgacaaatacagaggatagaaggttccgtggnctggttgtgccctcacacagggtatgggttgtncaggactgccactnccgttntnanaccaccatntntatnctcgatgggtttggttcgaagtagatgcccnangtgnttgttnatnaagagtnttttttcctnccttacatagaccccaaanatgcccanctcttaaatncactggaccactcgggnagggctgccaggccgtagcaggcaattataaaaaagctcaggttcgatcttctccatgaggatgtaggangncctctcctcactgtccttcagctgtttcagggcctgtaccatttcctccccatataggttgttacctccaccctctctctggggctttagcacaaaccggctaggggcagcaagggcctcggcgatggcctggtcccttcttcacccacatccagtgagtagaggcnagcaaaggtggcgcgg

SEQ ID NO: 641258 - DNA, 174 bp, Homo sapiens
  misc_feature (7)..(7): n is a, c, g, or t
  misc_feature (12)..(12): n is a, c, g, or t
  misc_feature (53)..(53): n is a, c, g, or t
  misc_feature (84)..(84): n is a, c, g, or t
cgaattntgaanggaatctcgtctgaagatacccccgagccccccgtccgcgngacctctcgcacaccacaatccccacccctnctattcctcccttgccatcagctagctgcaggccccccacccgaagcccaccgcacctgaggtgtgataagcggagacccggcgaggcgc

SEQ ID NO: 641259 - DNA, 526 bp, Homo sapiens
  misc_feature (54)..(54): n is a, c, g, or t
  misc_feature (268)..(268): n is a, c, g, or t
  misc_feature (385)..(385): n is a, c, g, or t
cgatggagtgcagttttatttgtttgagaatatgttttgttttcttcctttttntcgttcttgcttaccctcaaaacatgggaagaaaagctgtctgactcaaacagccagcagtctggtccgggccccctaagatggagaggcgccatttcccagcaggccaagaaatgccccgggagctccaagggttctgtgggtcccgggatgagaggctgacacagccaagaagacccagggtgaggctgagcggaggctgaggcggcatgcntggccgcccacactgccatccgtcctagcgctctgtgcagagcacggctgaaaactccccaggtatctttggaaatgaagaacactgggttggcacccggcaatttgggacagcagnttttctggagcgcacagcttgggaataagcctgaagaaatctttcattcctagagcgttggtggataaatggtacttatttgtttaacctcaaatcaagccgcagcccccatttctggggctgctttgcgagggttgtttt

SEQ ID NO: 641260 - DNA, 992 bp, Homo sapiens
  misc_feature (77)..(77): n is a, c, g, or t
  misc_feature (225)..(225): n is a, c, g, or t
  misc_feature (228)..(228): n is a, c, g, or t
  misc_feature (277)..(277): n is a, c, g, or t
  misc_feature (313)..(313): n is a, c, g, or t
  misc_feature (519)..(519): n is a, c, g, or t
ggactcgatctacgatacatgtgtgagattacaggtcacgagccatcgagcaacgcaggctggcagagtagatcatntgttaccatgctcatctttggaccttcgattctgagctcgttgcttaggacatgcaccaatgggcaagctgtgcatgtgcgaccatcagatttccttcactctttcaacgtgtgtctaatccgaaccaacagctttgtcgacattccngtngtcctcggttcattgcttgtgatcccacgtagcgtggccttaagtgacnacgcttaagggcaccgatgatacttgagatatcagngcgtacatatttcctcaagtagtggtatccccgtaggttaatttacaatctaacgattgatatgtcaacacgctctaacaacaccttcctctatacctgacttttcactcctagaacgcaacttacttttctcgggcaccgagtccacttctctaggcagtaggtacgcgcattatcgatggacacacgaaatagattacaaaacntatatgacagcacttgtttcgcagacattcatgcacgcttgcaatgttactgatgtcctatgggcctgtagtgtacgtggaaggccccacgacgtaaggcatacccatcatgtgtagagtgttcatggccgtgcgataaaatgttccgtgggttagtccccgaggggtcacgtcatgaagcaatttatatagatcgtaactataatccttccatagaattgcagtcaaacaagggtaaaaggatattcttgacaaggtgtagaaaaaggttgagggctggtatagaatattccgttaccaagagagaatggtgtaatgatccacccaaattaatactcaatcaggggcggttggctgaaaaaattttgactaaatgagaaagagagtaaataccggaataaactataaggtagatattaggttagagattgaggatggtaatggtgggtttaaggatttggggttaccagttt

SEQ ID NO: 641261 - DNA, 231 bp, Homo sapiens
  misc_feature (16)..(16): n is a, c, g, or t
gacggatctcaggatntcgcagatcccctaacaaagtgagagagcatgcgagcagttggagaaccatgtgtacatgggccgggatcgattagatgctctgtgatagagcgtgtatcctctcgatcacatacagaagaggatatgcacggaaaagctctttgacttcttgcatgcgagagaccattgcgtgacccacaaactctttaacaacttgaaatacatgtgtggact

SEQ ID NO: 641262 - DNA, 120 bp, Homo sapiens
acgggagccttaacctaccgatatctgtgtagcgataggggctggaggcttatattatggggtagggggcgctggtaggcgaagattgtccgagggagagtgggaggatgaatgcagtgc

SEQ ID NO: 641263 - DNA, 408 bp, Homo sapiens
gcctgcagccttttcactacgaattaaaataaggaccatgtgggtgtctttggaccctatccaaaccccttagggtctggccagggggcgatagtaacttttttaaggattgaataaattgagctttttttttggcccagagggaatgagtggtaagtaactttttccccgccttagattcctcaggagaaaaggccacctgcctccagcctggaatacataaagcctcctttttagactgtaagtccctgctgcccgggttctaaagagcaaggggctttttttcccccagtgctgaggagaaaagttctgaacggaaacggggttgtttttggacttttgagttggcccctttttttccccttggcctgagtttttataaaatttccattaattggggcagtgtga

SEQ ID NO: 641264 - DNA, 151 bp, Homo sapiens
ttataaagcaaccacaatcaggacaaataaagtggattactggacctagaggagagagccgaactgagagtctagaaactgagctgtgactatactgaacttcaatattaccccaagcaagacgtcagatacacggagaaaaagtacatct

SEQ ID NO: 641265 - DNA, 183 bp, Homo sapiens
gtcatgcgtatgcgactcagaaatctagccgacgccacagggaggtacgacaatgacgacggggaccggcaatatctgcataatctgcaagaaatggctaaagaccataagacacacggcatttttacttgagtcctaaaatgaacatccggtgatattggaccttcccaatcctaaacaaat

SEQ ID NO: 641266 - DNA, 809 bp, Homo sapiens
  misc_feature (741)..(741): n is a, c, g, or t
gctcacttgaaaggggtcccatgcatggagtgtgaacgatcccccaggaaatgacgaagctgggccatcgagctgatgctgtgtgcgccagtatgtaccagtgagctcctcaagggctgtgcctgccgcccagtaagcagcttacacttcatggaccagttgtcgtcgatatccgatccggatgcctggaccgaattagggatgcgtccatgattgcatccgtagccgtgacatggagctactttcggaaggaacacgcaggggaagaaagtaaccgaaggcctttgacttcgcggggagcttcgttcatcgttagtgccccaacgcttgacagaatcgctcccatgaaatccgagcagttgctggaccccggtggccctcttggaccactgcgagcgcccgtctcctcatatctaaaggctatgacgctagtaattgcaccttggggctagatggcgagcccaggattgctcgttcctgtccaaatgctcccgtatggcaggcaaggatgacatgctcgtgcctgtgtaaggcttggaccgaggtcgacgtcgtggcagtgaagaagcttgcgtgcctaacttgcaacgtcgctctatacaccggagatacctttgcacaagtatgacgctaaaggggctagcttgcgaggtgcagctatgcgcaggacattcaaggatgcctaagaccaggatagctgcgtctgggtgcactatccgacttccaaccaggcttaatctntggctttgtctccagagtctaacgacgacgagctgggcgagtgcttgccacgcgcccatgccctgaac

SEQ ID NO: 641267 - DNA, 690 bp, Homo sapiens
tgggggcgggggactggccccaaggggacaaaacaggttatttggggcagaacgtggggaaaatcaggggtgggatcttggccacaccccccagctcgtcctttctttcttaatgggctataggatttcagaaggacgcctcttggcagctttgatagagctcatctgccaggcactcagcaatgggtctaaatgtcccgagaaggcagcctcacaagctgcctgtgcacacgaagccaaatggcctgtgtctcacacggcgcagggggagacacatccacagcctgtcgtctcacagtcccggcgccgcccaatgcgtgtggagtccccccggggcacccactgtcggatgagggcgtccacccaggacctgaagagagtgttctcgcctgtgagcagtgttgtttgatctcgaaggctatgcttgagcgatgcgcacagcctatgagcttcttgccgttgtggcggccgtgccttcatccatggagttagtgaggcgccccacatggggaccttgagcttgcgcgggaagctgttgggcgggattaaccgccctgctctgtgaggcaggtcctgggcatacttctccttcattgcattgtagccctgcggggaaatgtccttgctctgccatcatcgggctccattcccaagagctgatgttggggttctgcccgtggtgtgtgtccc

SEQ ID NO: 641268 - DNA, 534 bp, Homo sapiens
cagctatcggttcatgttagtgtatgctaggttgaatctatgtctttgctattgtgaatagtgccatggtaaacatacaagtgcaggtatcattttagtagaactatttattttcctttgggtatatacccagtaatgagattgctgcattgaatgatagttctgctttaagttctttgagaaatctccaaactgctttccccaggggctgaactaatttgcattcccactgacagtgtataagtattcccttttctctccagcctcaccaacgtctgtttttgttattgtttttgttgttgttgttttactctttagtaatagccattctgacaattttgagaaggtatctcattgtgattttgatttgcatttctctgacgattagtgatgctgagcattttttcacatgtttgtcggccactggtatgtcttcttttgagaaggatctgttcatgtcctttgcccactttttaatagggttgttttcttcctgttgatttgtttaaattccttattgaaccggatagcttg

SEQ ID NO: 641269 - DNA, 407 bp, Homo sapiens
  misc_feature (14)..(14): n is a, c, g, or t
  misc_feature (39)..(39): n is a, c, g, or t
  misc_feature (57)..(57): n is a, c, g, or t
  misc_feature (61)..(61): n is a, c, g, or t
  misc_feature (65)..(66): n is a, c, g, or t
  misc_feature (111)..(111): n is a, c, g, or t
  misc_feature (130)..(130): n is a, c, g, or t
  misc_feature (144)..(144): n is a, c, g, or t
  misc_feature (176)..(176): n is a, c, g, or t
  misc_feature (180)..(180): n is a, c, g, or t
  misc_feature (284)..(284): n is a, c, g, or t
cccctaaaagtaanaatccctaaggcccacatctgaaanaaaacctgtcaccccagncctncccnntcttcacgttgaggattcaaactggcccaatcacaggacaggtgncccggcctttccttccctnaggtctcctagggnaggggcatgggtaagggtgtttccctcagcancccncccggggtggggattatgtctgctgtcatgtctgggtctttagggtaggacaggctgtggtatgagaggcaggagtctccacaaggcttcatgtggccccttantaggcaggccctgccctctggtaaggtcccttcatgctggaggcacacagctttaaggaagtaggttgaagtaggactccttcgtcctctcactggctttggctccctcaataaactgtgtgg

SEQ ID NO: 641270 - DNA, 474 bp, Homo sapiens
tggtatgcattgactttcttcaccaagtgcatatattagtcgatgtcttgttgtgtagtctttaccgttacagttgatgtacggggatcgatgtgctcagccagatgtcctgtgcgaaatatcatgttagattatacttaatttatctcttaccaaaaaccatgttgcgttcaaagaggttaacattaaaactatagatgacaggacatgaatgtgttcttttctcctttaccagtcctatttttcaatgggaagactcaggagtctgtcacttgtcaaagaaggtgctgatcctaaaaatttttcattctcagaattcgttgtgctgccaacttgatgttccacctgccacaaaccaccaggactgaaataagaaaacagtacagaaggcatagtttacagatgtttttaattctagtatcttatctggaacaacttgtagcagctatatatttccccttggtcccaagcctg

SEQ ID NO: 641271 - DNA, 641 bp, Homo sapiens
gagagccttaaccctcaccaccctcagctgttgacgtcgtctccactccccgctaacccctaacagtccttcctcctcctctccgtgctccagatttggaccgcctttaaacgtccgtcagcacttctattctctcacttaagtgtctgctgatcccccccttagatctgccctgggagaatcgtagtaatgcaggaacagtctgcagggattctctcctgctgcctcagttgctaggggaagagactgggccttagcaggtgggtgacttgaccaggtcaccggctttgtgggtagagctgctcatagtagaacccaggagacttatctcccaggccagtgttctttctcccgtatcctagttttcttaatagaagattattaggtgcagcaataaccaagttcagttagataatttagaaacaaaaccatattttatacacattcatttcatttctgagagttcacatactcaattcctatggcttattttattttaagcagtttaaagagacaataagaaaatgcgggcgggatgcagtggctcacacctgtaatccgagcacttggcggggctagggcaagagtatctcttgagaccaggagttagagaccagcctagacaacgtggggtaggaggt

SEQ ID NO: 641272 - DNA, 292 bp, Homo sapiens
  misc_feature (22)..(22): n is a, c, g, or t
  misc_feature (36)..(36): n is a, c, g, or t
  misc_feature (71)..(71): n is a, c, g, or t
  misc_feature (198)..(199): n is a, c, g, or t
  misc_feature (203)..(203): n is a, c, g, or t
  misc_feature (245)..(245): n is a, c, g, or t
  misc_feature (265)..(265): n is a, c, g, or t
cccttgtcccccctgcttttcncctcccccatgccnaacccctgtggccgccgcccctcccctgcccccgntggtgtgattatttcatctgttagatgtggctgttttgcgtagcatcgtgtgccacccctgcccctccccgatccctgtgtgcgcgccccctctgcaatgtatgccccttgccccttccccacactnntganttatatatataaatatctatatgacgctcttaaaaaaacatncattccaaaaccaaccaaantaaaaacatcctcacaactccccaaaa

SEQ ID NO: 641273 - DNA, 148 bp, Homo sapiens
aggtgaacaatcacttagcggggacatacttcgcgggaagtgattgttccgcgggaagtgattgtttcccgcgaagtgatgtgtccctgtgaagtgattgtcccctgtaagtgatggtcccctgtgaactgatgtgtcccctgtgttc

SEQ ID NO: 641274 - DNA, 519 bp, Homo sapiens
agggcaggtgtcaagactggctgaagtcacatgaaaaaaaaaaaaattgtcagttgttcatgtgaccgcctgcacacctgaaaaatcaattatttccaaaacactcatccatttaccattttaaaacagcaaaaaaaaaaattcaaccacctttgacaatgcttttctccaattggtttggacccttttttttggtctctaaacctttattttaaattcgaaagttacaattttaaaacattattttccagtttatttttccagataaacttactcagattagcttataactttacagaaggaccccaagaagattgacagggggttgaccaagaatttagtgactttggacatttgggcgtgcagaaaacccaagggttccatttttgtctgtggagttgaggccttttagaccaaaaggggcaaagcccaaaggttcccttatttctcgccaccacccagaaggattcttgggccacccccccaaaacctttagtgattctttctaccgaggacact

SEQ ID NO: 641275 - DNA, 501 bp, Homo sapiens
  misc_feature (119)..(119): n is a, c, g, or t
  misc_feature (132)..(132): n is a, c, g, or t
  misc_feature (135)..(135): n is a, c, g, or t
tcaactgctgaccatttaaaagcagcctatgattgttctttttgtaaagcaagcaacctccctccactttgctgttttgactatttgaattttacatattgggcttacccaaaccaacnggaaaaaggtttnggngggaaaaaggccacacccctccagggcatgtggctgacactgggtcaatgtctgcatctgtgctgtgtgtgtagtgtggttggccagtaggtgagtatccctgtgtgtgtgagtgaagccactccccaggctggtgctctcctcctgtgcccagtgactgcccagtggcagctcagctgcccttcactcccacctgctgccaaagtccctgtgctaatgggattacaaatacaaaaagtggaaaaaaattttcgtaaactttgttttatattaaaagaaaaatccataagtctgtgtgtgttaaacatgaggttctgcctctgtggctgtgtttgaaaaaataaagttttattagaataataaaaa

SEQ ID NO: 641276 - DNA, 390 bp, Homo sapiens
tattttgccccccacggggcgcccccgggtgtggggtttttttattttatggggaaagccccccccccccccaaccaattttttttggggggcggccaaaaaaaaaagggccccagggggttttggtttttggcgggacaagggggccccccccaattttttcccccccctttttggggggccccccccccccccccggggcttgggggccaaagggtttcccccagccccccccctttttttttttggggggttttttttttaaaaaaaaacccccccccccccgggggggggggggggcccacccccccctttttttaaaaagggggtttttttaaaggggggccccccccccccccgggtttttttttttttaaaggttttggagga

SEQ ID NO: 641277 - DNA, 1117 bp, Homo sapiens
agcggctgaggcaagagaatcgcttgaaacctgggaggtagaagttgcagtgagccaaaatcacgccactgcactccagcctgggcaacagagtgagactccgtctcaaaaataaaaaaaaaaaaaaaaccggatgtctaggccaaggatattttttttggatgcaggggggattagtcctttgggtaaaaccccatgtgatttgggggaaagtgagtgccagacgggggaaaaactggagttgttggggacgtgaaacacagtggagccttcacgtgcttattattctccggggtatccatagtaaagaactggtggcaagctattcgaaaaaacagcaaaaagtgcttcacctattaacaattgtgacaacaagagtcgatggaaggtgcgaaaacaacattaattttgcagagcgaaaaagaggaactatatacttatagtgcatagtgcaatcatacaagattataaaggggacgccgatgtggtggaaaccaatataatctatatggactagagatttataataaaagcggcgggttaaaagataacggttaacatttgggtagtacaaaacgaaaggcattatggtgatggtgagtgatgacccatgggtggtaaaaatcaaacacttggaaacaatttgcgtgaagtgccatgtaaaggcacagctggggaacccggaggcactattgggtaatcaaaaagctttggggctgtgcactatttataagggaagggagggccgtgatttatcaaaccctcagggtataagacaaataacaggacggcaagttgtgaaaacaacacaccactcacaatcgatagggcgaaactccgggggggaccgaggacaccgataagggaaacacgcggggcgacaagggactcagcgacgatgtacagccacaagctgcaagcacgtcaggaacttggaaatatatagaggcagaacccgtgcgaacagtgcagtaaaccctgaaccagtacaacatccaaagaattcccaacaaaacgctggggagaccaacaggacgacgatgacaactacatagcagcatagaaccaggacagaagaactgcagagccgcaaacagacaacaggcacagagcgccc

SEQ ID NO: 641278 - DNA, 727 bp, Homo sapiens
atgggtagatttataaggtttccaactccaagcccaggctcctgtacagcatctctggatttgcctggggccaaggggaacttgtcaccctgaaaggaaggacacaaggttggctggtttcaccacctcctgattgtagaaccctaggacctttagcaaatataggtggtaacaaggaaatgcttaccttgggccttggccaagacccagtgctatgctgtcttcaggtctgacccaggacagtcctagtggtagtggcctcagggagtttttgtcatcccatcactagctacaagcagctcagaacagagagaaagactccatttgtttgggagaaaataaagaaaaaaaacaagagtctctgcctgctggtccaaataatttttccagatcttatccaagaccaccaaggcagtctgcaagaactacagcattactatgtttggaggccccctaatgcagatgtggttgcagtgatcaaaaacttagatcacaacactcaagcccctttgaatacctgaaaagtctacccaagaaggacgagtatgagcaaagcccagactgtgaaaaccacaatgaatatctaacgtttaaatgcccaggcaccaaaaaagcatccacaaacatcaagaccatctaggaaaatcatgacttcactaaacaaaataaataagggtacccagggaccaatatttggagagacagattattgtgacctttcagatag

SEQ ID NO: 641279 - DNA, 637 bp, Homo sapiens
  misc_feature (165)..(165): n is a, c, g, or t
  misc_feature (218)..(218): n is a, c, g, or t
  misc_feature (348)..(348): n is a, c, g, or t
  misc_feature (350)..(350): n is a, c, g, or t
  misc_feature (369)..(370): n is a, c, g, or t
  misc_feature (375)..(375): n is a, c, g, or t
  misc_feature (381)..(381): n is a, c, g, or t
  misc_feature (492)..(492): n is a, c, g, or t
  misc_feature (587)..(587): n is a, c, g, or t
  misc_feature (595)..(595): n is a, c, g, or t
cgtgctccaacccaagctcccacagacctggtgttatttcacaagggccggggggccctccccaggcttccctgaaggaggcggaagtttgaacccttatgtggggttcattgggctagggtagtggtatgaggtttaaaactatttaaggattaggaggagaangagtcttcaggaaactcttgtttcactggactctgcagcctgcagaactgggngcaagggtaggagttccagtaggggaaggagcaggtagactcttcagctggcctcagctgggactgaagacctaaggctgattctcttttcttcttccatccttaagaaggccatttttctgtttccttntncttccaccaacttttttanntttcntggctnatctcccattctcccgcttcccttccaatttccctttctagaaaaaccctggtatttagctcaggccaaaactgcctcagcagaaaggtggccttggacaaaactggtccnaagaatttgaagtggcagtacttgcggattggctctgtccagcaaggcctcagctgcttgttgcgtctgctttttccccttcgaattcccggctntatctctnaagggtatctcgcaaggctcgcgaatttcgttaattctcggg

SEQ ID NO: 641280 - DNA, 400 bp, Homo sapiens
gattacaggtgcacaccaccatgcctggctaatgttttgtttttggttttggttttgtttttgttgtggtgtttggagcagagtttcactctttttgcccaggctggagtgcgatggcatgatctcagctcaccgcaatgtccgcctcccaggttcaagttattctccttcctcagtctccctagtagctgagattagaggcatgtgccaccacgcccggctaatttggtatttttagtagagagaggttttctccatgttggtcaggctggtctcgaactcccagcctcaggtaatccgtcctcctctgcctcccaaagtgctgggattacaggcatgagccaacacacccgggctatatccacttctaattggaatggaagggaatgcactcaccaga

SEQ ID NO: 641281 - DNA, 2246 bp, Homo sapiens
aagttatagccatttatttcagttgcatagttcttaaaatcacattattttctaaaatgactgcattaggtaataagaaacttgagacaactgtgtgagtatcctgagaaatagattcccaagttactaaagatgatttattaaattaatattaaatggtcttgcacttaacattgttttgatttaattggtatttttaaataactagactcaaagatgaagtgtctgaaatgttgattatgtatcttcagtgggtcatcgccagagagcggtttcagcaagctgcagatctgattgatgctgagcaacgaatgaagaagtccatgtggggtcagttctggtctgctcaccagaggttcttcaaatacttatgcatagcatccaaagttaaaagggttgtgcaactagctcgagaggaaatcaagaatggaaaagtaagtagaagaactcattaagagattgtttgggggttatgttgtttagtctttgtgggtgctgaggttttctgcttgtaaaatctggttttcctaaaggatagtaaaacttctaaaaaatacatttcttaaaattataaaagcaatgcctgcttagagaatttagagagttcagaaaagtataacaaagtaaacatcactataattggtcatccatagctggtagcactggtaacatatggatgtgtattgcgttaaggttttttcttttcggtgaatatttatctacttaaagcataagatactataaactgtacaagggcaggggcttcactcatgcttactactgtctgtaatcctatctcctgcctaaatttttgacaaataacctgtctcaaatatgtagaagaaataagtaaaacaaatttgtgttttataataatgaggacattcttgtttgaaatctttgtttagctaaatgtttaaaatatgtcttggtaagaagccacaaacattattattcataattaacatgttttcttttttctccagtgtgttgtaattggtctgcagtctacaggagaagctagaacattagaagctttggaagagggcgggggagaattgaatgattttgtttcaactgccaagtaatgtttttgttcttttaatgtttttgtttctttttgagttcttccttaccttagttccaatgtgggcatttcctggagacaaaacttttgtttcacctgcatcatctttaagttttcttgatctgagttttctgcttttctgtaacagtgtatctattggaaaacaataacagaaatctcataatcctaaaatgttaagcattttgctaatattacacagagtatgtgaactaacagaagggctagactttgtttatcttgtacatcttggaaatctgtgacagcttggcttagattcagttttagtgtactgtatttgaaattaccgttatccacaggaacagtaactatagtttgtcctaatataacgaagtctactttataggttggctgagcatggtggctcacagctgtaatctcagcactttgggaggccaacatgggcacatcacttgaggtcagtagtttgagaccagcctggccaaaatggtgaaaccccatctcaactaaaaataaaaaaaattagttgggcatggtggcacacgtcctgtagtcccacctacctgggaggctgaggcaggagaatccattgaacccgtgaggtggaggttgcagtgagccaagatcgcaccactccactccactcccctctgggcggcagagtgagaccctgtctcaaaaaaaaaaataaaataaaataaagtctactttaaaagttgaaaataagcatgagatcttcagaaatagattttaaaatgttttaggcattgtttttagtttgcctaacctccacattcaaactctggtagtaaactgagcaaaataaacttgctgctctactattttgtgcctcgggatgcattcagatgctcctttcaaaagcaatacatggggctcacgcctgtaatccaggcactttgggaggctgagtctggtggatcacgagagctcaggagtttgagaccagcctggccaacacggtgaaacctcgtctctactaaaaatacaaaaactagccaggcgtggtggcgggcacctgtaatcccagctactggagaggctgaggcaggagaattgcttgaacccaggcggcggaggttgcagtgagctgagatggcaccattgcactccagcctgggtgacagagagactcggtctc

SEQ ID NO: 641282 - DNA, 156 bp, Homo sapiens
catctacgcgctatccacgctgaacgacagctacggaatggagcccctggaggccatgtcgcaccggcctgccggtggtcgtcagttcgccggcgtactgcggcttatgcgcagtatctttccgccggcaaggacgcgctgatcctgcaagatccg

SEQ ID NO: 641283 - DNA, 2343 bp, Homo sapiens
agcgggatggcggcggggaggtaggcagagcaggacgccgctgctgccgccgccaccgccgcctccgctccagtcgcctctggtccttcaaactcacacctcccgggaggagctgtcctggcgccgggtcccgcggggaaaatggtggagccagggcaagatttactgcttgctgctttgagtgagagtggaattagtccgaatgacctctttgatattgatggtggagatgcagggcttgcaactccaatgcctaccccgtcagttcagcagtcagtgccacttagtgcattagaactaggtttggagaccgaagcagcagttcctgttaaacaagaaccagagactgtacctactccagcactattaaatgtgaggcagcagcctccatctactacaacatttgtgctgaatcaaataaatcatcttccacccttgggatctacaattgtaatgactaaaacaccacctgtaacaaccaacaggcaaaccatcactttaactaagtttatccagactactgcaagcacacgcccgtcagtctcagcaccaacagtacgaaatgccatgacctctgcaccttcaaaagaccaagttcagcttaaagatctactgaaaaataatagtcttaatgaactgatgaaactaaagccacctgctaatattgctcagccagtagcaacagcagctactgatgtaagcaatggtacagtaaagaaagagtcttctaataaagaaggagctagaatgtggataaacgacatgaagatgaggagtttttccccaaccatgaaggttcctgttgtaaaagaagatgatgaaccagaggaagaagatgaagaagaaatgggtcatgcagaaacctatgcagaatacatgccaataaaattaaaaattggcctacgtcatccagatgctgtagtgggaaaccagctctttatccagtgttactcctcctgatgtttggtacaaaacatccatttctgaggaaaccattgataatggctggttatcagcattgcagcttgaggcaattacatatgcagcccagcaacatgaaactttcctacctaatggagatcgtgctggcttcttaataggtgatggtgccggtgtaggaaaaggaaggacgatagcaggaatcatctatgaaaattatttgttgagtagaaaacgagcattgtggtttagtgtttcaaatgacttaaagtatgatgctgaaagagatttaagggatattggagcaaaaaacattttggttcattcgttaaataagtttaaatacggaaaaatttcttccaaacataatgggagtgtgaaaaagggtgttatttttgctacttactcttcacttattggtgaaagccagtctggcggcaagtataaaactaggttaaaacaacttctgcattggtgcggtgatgacttcgatggagtgatagtgtttgatgagtgtcataaagccaaaaacttatgtcctgttggttcttcaaagccaaccaagacaggcttagcagttttagagcttcagaacaaattgccaaaagccagagttgtttatgctagtgcaactggtgcttctgaaccacgcaacatggcctatatgaaccgtcttggcatatggggtgagggtactccatttagagaattcagtgattttattcaagcagtagaacggagaggagttggtgccatggaaatagttgctatggatatgaagcttagaggaatgtacattgctcgacaactgagctttactggagtgaccttcaaaattgaggaagttcttctttctcagagctacgttaaaatgtataacaaagctgtcaagctgtgggtcattgccagagagcggtttcagcaagctgcagatctgattgatgctgagcaacgaatgaagaagtccatgtggggtcagttctggtctgctcaccagaggttcttcaaatacttatgcatagcatccaaagttaaaagggttgtgcaactagctcgagaggaaatcaagaatggaaaatgtgttgtaattggtctgcagtctacaggagaagctagaacattagaagctttggaagagggcgggggagaattgaatgattttgtttcaactgccaaaggtgtgttgcagtcactcattgaaaaacattttcctgctccagacaggaaaaaactttatagtttactaggaatcgatttgacagctccaagtaacaacagttcgccaagagatagtctgtaagaaataaataagaagcggaaggggggaaaaaatcggaaagcaaaggaaagagtgcttcggtggtgaaaggaggaattgcccttaaaagagtgtacatttgggga

SEQ ID NO: 641284 - DNA, 610 bp, Homo sapiens
  misc_feature (12)..(12): n is a, c, g, or t
  misc_feature (26)..(26): n is a, c, g, or t
  misc_feature (31)..(31): n is a, c, g, or t
  misc_feature (36)..(36): n is a, c, g, or t
  misc_feature (39)..(39): n is a, c, g, or t
  misc_feature (42)..(42): n is a, c, g, or t
  misc_feature (47)..(47): n is a, c, g, or t
  misc_feature (49)..(49): n is a, c, g, or t
  misc_feature (53)..(53): n is a, c, g, or t
  misc_feature (55)..(55): n is a, c, g, or t
  misc_feature (65)..(65): n is a, c, g, or t
  misc_feature (67)..(67): n is a, c, g, or t
  misc_feature (73)..(73): n is a, c, g, or t
  misc_feature (80)..(80): n is a, c, g, or t
  misc_feature (92)..(92): n is a, c, g, or t
  misc_feature (94)..(94): n is a, c, g, or t
  misc_feature (113)..(113): n is a, c, g, or t
  misc_feature (137)..(137): n is a, c, g, or t
  misc_feature (151)..(151): n is a, c, g, or t
  misc_feature (234)..(234): n is a, c, g, or t
  misc_feature (279)..(279): n is a, c, g, or t
  misc_feature (295)..(295): n is a, c, g, or t
  misc_feature (385)..(385): n is a, c, g, or t
  misc_feature (407)..(407): n is a, c, g, or t
  misc_feature (421)..(421): n is a, c, g, or t
  misc_feature (437)..(437): n is a, c, g, or t
  misc_feature (444)..(444): n is a, c, g, or t
  misc_feature (456)..(456): n is a, c, g, or t
  misc_feature (474)..(474): n is a, c, g, or t
  misc_feature (534)..(534): n is a, c, g, or t
  misc_feature (597)..(597): n is a, c, g, or t
gatcaccgagcncaagagttcaaganaatcntggcnaanggngaaantntgtntntaaaaaaaananaaaggngtgtaanaatgtgaatgtnanaaaagattattgggaagangaggaaaaagaattgaatgaaaanatgaataaaaagtnaaagaaattataatgaataagaataaaaggtagatgggaaaaaaggtgtgtgaaaaaaagaaaagataatttttgtatttttnagtagagaaagggtttaaaaatgttggaaaggatggtataaaaanaaaaaaataaaatganaaggaaaaattggaataaaaaaatgatggaattaaaggagtgagaaaaaaaaaggattaaatgaattttttataaaaaaaaaatgaaaanatgtaaaaaatgaaaaagaganaaaaattaaaaaanaaaaaaagaaaatggnaaaaaanatttaaatttanttatgaatttaaattaanatgagtgggataaaaaaagagttgtaattttgtgtttagaattattaattagaaagaaanaaaatgatagaaaagtaaatggggaaaataattttagaaaagtgtaataaagaaaagaaaganatggagggtaagg

SEQ ID NO: 641285 - DNA, 3277 bp, Homo sapiens
agcgggatggcggcggggaggtaggcagagcaggacgccgctgctgccgccgccaccgccgcctccgctccagtcgcctctggtccttcaaactcacacctcccgggaggagctgtcctggcgccgggtcccgcggggaaaatggtggagccagggcaagatttactgcttgctgctttgagtgagagtggaattagtccgaatgacctctttgatattgatggtggagatgcagggcttgcaactccaatgcctaccccgtcagttcagcagtcagtgccacttagtgcattagaactaggtttggagaccgaagcagcagttcctgttaaacaagaaccagagactgtacctactccagcactattaaatgtgaggcagcagcctccatctactacaacatttgtgctgaatcaaataaatcatcttccacccttgggatctacaattgtaatgactaaaacaccacctgtaacaaccaacaggcaaaccatcactttaactaagtttatccagactactgcaagcacacgcccgtcagtctcagcaccaacagtacgaaatgccatgacctctgcaccttcaaaagaccaagttcagcttaaagatctactgaaaaataatagtcttaatgaactgatgaaactaaagccacctgctaatattgctcagccagtagcaacagcagctactgatgtaagcaatggtacagtaaagaaagagtcttctaataaagaaggagctagaatgtggataaacgacatgaagatgaggagtttttccccaaccatgaaggttcctgttgtaaaagaagatgatgaaccagaggaagaagatgaagaagaaatgggtcatgcagaaacctatgcagaatacatgccaataaaattaaaaattggcctacgtcatccagatgctgtagtgggaaaccagctctttatccagtgttactcctcctgatgtttggtacaaaacatccatttctgaggaaaccattgataatggctggttatcagcattgcagcttgaggcaattacatatgcagcccagcaacatgaaactttcctacctaatggagatcgtgctggcttcttaataggtgatggtgccggtgtaggaaaaggaaggacgatagcaggaatcatctatgaaaattatttgttgagtagaaaacgagcattgtggtttagtgtttcaaatgacttaaagtatgatgctgaaagagatttaagggatattggagcaaaaaacattttggttcattcgttaaataagtttaaatacggaaaaatttcttccaaacataatgggagtgtgaaaaagggtgttatttttgctacttactcttcacttattggtgaaagccagtctggcggcaagtataaaactaggttaaaacaacttctgcattggtgcggtgatgacttcgatggagtgatagtgtttgatgagtgtcataaagccaaaaacttatgtcctgttggttcttcaaagccaaccaagacaggcttagcagttttagagcttcagaacaaattgccaaaagccagagttgtttatgctagtgcaactggtgcttctgaaccacgcaacatggcctatatgaaccgtcttggcatatggggtgagggtactccatttagagaattcagtgattttattcaagcagtagaacggagaggagttggtgccatggaaatagttgctatggatatgaagcttagaggaatgtacattgctcgacaactgagctttactggagtgaccttcaaaattgaggaagttcttctttctcagagctacgttaaaatgtataacaaagctgtcaagctgtgggtcattgccagagagcggtttcagcaagctgcagatctgattgatgctgagcaacgaatgaagaagtccatgtggggtcagttctggtctgctcaccagaggttcttcaaatacttatgcatagcatccaaagttaaaagggttgtgcaactagctcgagaggaaatcaagaatggaaaatgtgttgtaattggtctgcagtctacaggagaagctagaacattagaagctttggaagagggcgggggagaattgaatgattttgtttcaactgccaagtaatgtttttgttcttttaatgtttttgtttctttttgagttcttccttaccttagttccaatgtgggcatttcctggagacaaaacttttgtttcacctgcatcatctttaagttttcttgatctgagttttctgcttttctgtaacagtgtatctattggaaaacaataacagaaatctcataatcctaaaatgttaagcattttgctaatattacacagagtatgtgaactaacagaagggctagactttgtttatcttgtacatcttggaaatctgtgacagcttggcttagattcagttttagtgtactgtatttgaaattaccgttatccacaggaacagtaactatagtttgtcctaatataacgaagtctactttataggttggctgagcatggtggctcacagctgtaatctcagcactttgggaggccaacatgggcacatcacttgaggtcagtagtttgagaccagcctggccaaaatggtgaaaccccatctcaactaaaaataaaaaaaattagttgggcatggtggcacacgtcctgtagtcccacctacctgggaggctgaggcaggagaatccattgaacccgtgaggtggaggttgcagtgagccaagatcgcaccactccactccactcccctctgggcggcagagtgagaccctgtctcaaaaaaaaaaataaaataaaataaagtctactttaaaagttgaaaataagcatgagatcttcagaaatagattttaaaatgttttaggcattgtttttagtttgcctaacctccacattcaaactctggtagtaaactgagcaaaataaacttgctgctctactattttgtgcctcgggatgcattcagatgctcctttcaaaagcaatacatggggctcacgcctgtaatccaggcactttgggaggctgagtctggtggatcacgagagctcaggagtttgagaccagcctggccaacacggtgaaacctcgtctctactaaaaatacaaaaactagccaggcgtggtggcgggcacctgtaatcccagctactggagaggctgaggcaggagaattgcttgaacccaggcggcggaggttgcagtgagctgagatggcaccattgcactccagcctgggtgacagagagactcggtctc

SEQ ID NO: 641286 - DNA, 853 bp, Homo sapiens
gttatcgatcaagtgtcatttctgttcggggcccatctatcctggtactacggacgatgaatgttcgttccgtatacgaatagcaacggtgttcatgattctatgcaaactctataatgtctataaaaaacttgtaataaagaagcgcaatcctcgcaaagttaggtggacctaaagcattccaggaaagcaagctggtaaagagcgtatacagtggtagtaattatatttgaatgttgataaataccgtagaaatgatacgtataaaataccagagagatcttatggaataaaagtatagatgcgatgaagagagttgaagaaatcaatacagaggcgccaagttaaatttgataaatgaagcagattgcaggaataacataagaggagctacagaaagttcaggatatcaaagaagtcaagcaaaacatccatcgttgatcctgagcccctcttgcaggcgaacgggcaaacagttggaagagaaaatggtacagcagttacatagaggatgtggacatggaagatgctccttaaataatctctgtaaccatttctgtttatgtacatttgacaatgccctttggatacttggaactgctaaatttatgttatttgaacataaggtcacttagatgaaaagcgattatcagacatctttcctgcattgcatctacataatatcagatattacggctgttagatttgtctcagtgttacatctttactgatagatgtacttaagtaaatcatgaaattctattgtactatagaagtgaattgtggacgtaaatggttgtggtatttggataatggactaggaggttttgtatagtaatactgggaaaattcg

SEQ ID NO: 641287 - DNA, 2506 bp, Homo sapiens
agcgggatggcggcggggaggtaggcagagcaggacgccgctgctgccgccgccaccgccgcctccgctccagtcgcctctggtccttcaaactcacacctcccgggaggagctgtcctggcgccgggtcccgcggggaaaactgtcttgctctgtcaccaggctggagtgcagtggggtgatctgagctcactgcaacctcccgctccttggttcaagtgattctcctgcctcagcctcctgagtagctgggattacaggttttgcagtgggggttactttaccaagcaaggtcctatgaaggatggtggagccagggcaagatttactgcttgctgctttgagtgagagtggaattagtccgaatgacctctttgatattgatggtggagatgcagggcttgcaactccaatgcctaccccgtcagttcagcagtcagtgccacttagtgcattagaactaggtttggagaccgaagcagcagttcctgttaaacaagaaccagagactgtacctactccagcactattaaatgtgaggcagcagcctccatctactacaacatttgtgctgaatcaaataaatcatcttccacccttgggatctacaattgtaatgactaaaacaccacctgtaacaaccaacaggcaaaccatcactttaactaagtttatccagactactgcaagcacacgcccgtcagtctcagcaccaacagtacgaaatgccatgacctctgcaccttcaaaagaccaagttcagcttaaagatctactgaaaaataatagtcttaatgaactgatgaaactaaagccacctgctaatattgctcagccagtagcaacagcagctactgatgtaagcaatggtacagtaaagaaagagtcttctaataaagaaggagctagaatgtggataaacgacatgaagatgaggagtttttccccaaccatgaaggttcctgttgtaaaagaagatgatgaaccagaggaagaagatgaagaagaaatgggtcatgcagaaacctatgcagaatacatgccaataaaattaaaaattggcctacgtcatccagatgctgtagtgggaaaccagctctttatccagtgttactcctcctgatgtttggtacaaaacatccatttctgaggaaaccattgataatggctggttatcagcattgcagcttgaggcaattacatatgcagcccagcaacatgaaactttcctacctaatggagatcgtgctggcttcttaataggtgatggtgccggtgtaggaaaaggaaggacgatagcaggaatcatctatgaaaattatttgttgagtagaaaacgagcattgtggtttagtgtttcaaatgacttaaagtatgatgctgaaagagatttaagggatattggagcaaaaaacattttggttcattcgttaaataagtttaaatacggaaaaatttcttccaaacataatgggagtgtgaaaaagggtgttatttttgctacttactcttcacttattggtgaaagccagtctggcggcaagtataaaactaggttaaaacaacttctgcattggtgcggtgatgacttcgatggagtgatagtgtttgatgagtgtcataaagccaaaaacttatgtcctgttggttcttcaaagccaaccaagacaggcttagcagttttagagcttcagaacaaattgccaaaagccagagttgtttatgctagtgcaactggtgcttctgaaccacgcaacatggcctatatgaaccgtcttggcatatggggtgagggtactccatttagagaattcagtgattttattcaagcagtagaacggagaggagttggtgccatggaaatagttgctatggatatgaagcttagaggaatgtacattgctcgacaactgagctttactggagtgaccttcaaaattgaggaagttcttctttctcagagctacgttaaaatgtataacaaagctgtcaagctgtgggtcattgccagagagcggtttcagcaagctgcagatctgattgatgctgagcaacgaatgaagaagtccatgtggggtcagttctggtctgctcaccagaggttcttcaaatacttatgcatagcatccaaagttaaaagggttgtgcaactagctcgagaggaaatcaagaatggaaaatgtgttgtaattggtctgcagtctacaggagaagctagaacattagaagctttggaagagggcgggggagaattgaatgattttgtttcaactgccaaaggtgtgttgcagtcactcattgaaaaacattttcctgctccagacaggaaaaaactttatagtttactaggaatcgatttgacagctccaagtaacaacagttcgccaagagatagtctgtaagaaataaataagaagcggaaggggggaaaaaatcggaaagcaaaggaaagagtgcttcggtggtgaaaggaggaattgcccttaaaagagtgtacatttgggga

SEQ ID NO: 641288 - DNA, 115 bp, Homo sapiens
ctgtagcaagagtttgaaaagcactaggcatggagacagagttctgggttccaatcatggcactatgcaggcgcaaatgggcagcacagcacttggcctgttttcttcacgggag

SEQ ID NO: 641289 - DNA, 867 bp, Homo sapiens
cacaacgtgccggggtgacggagaatggctggcagctggctgcttctaggctgtgcccagtgctgtgctggtggagtgatggagaagtgagtgagtggtgtgctgtgcctggtgcttgtgcttcgtgctccttgcaggagtttgtgctgtgctggctgctgaccctggtggaaccggcattgatgtccagctcgccgctgtccaatgaaactgtcgctgtgtcctgggcctgatccaaatgccgggttctaacttgctcccctgacccagtcctgtgtttgtcctgaatgtgccctcgtgtgccaaccagacggaatggccaatgaactggcagttgaagcagacatacgacgagtggcctttactccctgtgcagcttgtatgttgttgggccatgagtgcaatgaatgcgtgctccagacatccatgtgtcctggtatcagtgcctgcgtgggccttgggctgtggacgatctgctaacgaacatcatcctctggtgacggtcaacggctgttaccctacatgaccagcggcactgcccagtgggctgatctttcctcccagttctacctgcgggaggacgacatcggtacccaccgggccgcggtatcacagccccgcctcgctgagctcaacagcctatgtgcctgtcactcctacactgggacccctcgctgaggacttccttacgggtaacacggctgggcgcgccccacaacaccccccaggcgggacacgctgccaagtgcgctcacctcctgccgcccaacgctgcccccccagcccgccgtggtccaacacgcgtggcccgcacggcccacacacccggccctcccaccgcaaccacatccccaattccagggcaca

SEQ ID NO: 641290 - DNA, 311 bp, Homo sapiens
aagtccactctataggatcccttccggctctttgggtgaagaatggaaaggttatgtggtcccaatcaatggtgggaaccacaaacaagggtttcccatgaagcaaggtgtcttgacccatgggcgtgttcgcctggttctgagtaaggggcctttctgtttccaacccaggggaactggagaaagaaagaaaaaatcaattcctggttgcattgtggatgccaatctgaacggtctcaacttgggtattgtaaaaaaaggagagaaagatatttctggactggctgatactacagtggcttcccgcctgg

SEQ ID NO: 641291 - DNA, 122 bp, Homo sapiens
  misc_feature (42)..(42): n is a, c, g, or t
atcactcacagaccaactcccacgggaactctgccacaccgnccattgtgggtacctatgcgttttcagattcctccaaaacgcaccaagtcttcccagcaccccgaccgtcgcgtacggcg

SEQ ID NO: 641292 - DNA, 912 bp, Homo sapiens
catggtggcagcctgtaattccagaacttagggaggctgaggtgggcagatcacttgaggccaggagtatgagaccagcctgggtgaacatggtaagaatcccatcactacagaaaaatataaaaattagccaaggccatggtggcgatacacctgtaattttcagctactcaggaggctgagatgcagcagaatcacttgtgccctgggaggtcagggctgcagtgaactgtgatggcatcattgcactgcggctgagagacagagcaagcccctatctagaaaaaaaagaatgtctgtcgaagcaatgtggcggaattggaacccacttactttactggcggaacataaccaatccgtgtacccatttttgtccgggtattccttttcgtggtcattatctagtggggatttttaacagaaactcgagacgggctttcactatcttgccccagggttggtcttgaagttcatggctcaaagccatcctcctaggtgagcgtcctgagatagctgggatgacccggtgtgagccatgtgtcccaactgttgtgaccctgtgttagaaaagcagtctggcagttcctcaaaaggctaactggtcgagccggtcttatgatgcgacacatttcagtcctagggaatttcccggaagaataaagatgtttgtcgccccaagattgtcaacatctccgtgcagagttattcataagggcacacttgctactgtggacagccaattcccatgggtgccataacaggcgggtccccggaagccgcggcgtgtatgggcccgtctagagcgtgaacggtgtgtggaaacacagacttgttgtctttgcacagacctctgcacaaaagtgggcgggtccctgacacaggaagccaggaggcgccatggttggtcgcacg

SEQ ID NO: 641293 - DNA, 607 bp, Homo sapiens
gtgcaaaattaggcttcgattggcacttttggaaagatatgcaacaaatatgggatgtaatccggatgggccgcatctctgtagctctagaatgtggaaatattgagactcacctgtcattcgaacacatgtgaacacgtttctttgagactaaggactgtctagtaaggtatgggtactatctatctattccgttatgatcatgtacagttgctctgtactactaaatcctgtgggattcttgcttgtatctgtcacactaagatgtggtacaaggtactggatgaaagatgctctagatggagtacatcatacatcactctccggtcactatgttcctcctttcacgcttgaacagcgtttggttccgaacacaggacaaggataccataatgcgctgctggtaccaccgcttcttcaagttgctcatctagtctgaacaggcaccacgtatggtgcttctaggactctcgatgtgcccgtgttttcacggggcaaactcacgggaacagcgagttctcagcttctgcagtggtttacagcacataacatgatcccaaacgtgtcatagaccagttgtaatcttgaacaacactggggtggttca

SEQ ID NO: 641294 - DNA, 869 bp, Homo sapiens
  misc_feature (454)..(454): n is a, c, g, or t
attatcccgaataacaaaaccaaagacatcacaagaaaactacaaaccaatatccctatatagagatgcaaaaatcttcaagaaaatactagcaaactgaatctagcaatatattaaaaggtttatacaccatgactaagtaggatttattccaggaatgaaaggttagtttaatatacaaaaatccaataatgtaatgcaccaccatattaataggatgaaggaccaatagcacgtgatcatctcaatagacggagcagaaacatttgacaaaattcaacatccttttatgataaaaccactagaaaaactaagaatagaggagaacttcctcaacctaataaaggccatctacaaaaaaccacagtaccataatactcaatggtaaaagattgaaagctttccttctaaaatcaggagcaagacaaagatatttactctggccacttgtatntaacatgtactagggattttagccagggcacttaggccagacataaaccaggcacccttgtttttgcgatgatgtgatctggtatatagaaaatcctgatactgactaaaacattcctagaactgttaaccagttccatccgagtgcgggataccagatcattatttcacaactaaacttatttcaatacaggagccaatgaacattctgtaatggattagacaccacctctcttaaaaaggtctcaacacacaaatcttttgctaatttacccagaaggggatttttccaaggcacaaaatcgcgaaataacagaaacacggggccgggcggcgcatggggggaacaccccgaacagttaacctcaaccagccatggcaggagcatatttaacacgacaacaacgccatagacg

SEQ ID NO: 641295 - DNA, 831 bp, Homo sapiens
tggacagggtctcactctgtcatccaggctggagtgcagtggtgcgatctccttactcagtcccctagtgtcattttcaggggcactttcctacctgccccaagtcccagtttgttggttggtttctggctttctctgggtggcttgcttgacagggtctcgctctgtcatccaggctggagtgcagtggcttgatctcggctcactgcaacctctgcctcccgggttcaggcaattatcccgccgtgggcctcctgagtagctgggactacaggcgtatggtagtttggtgttttttgggtagagacggggttccaccgtgttgcccaggcggtctcgatctcctgacctcaagtgatccacctacctcggttcccagagtgctgggatcacaggcgtgagccattgtgcccagccccatttcttttgaagaggtactgagactgtgctatgttcttttgccacgcactgcctgggaagtcagctgtccccaatagatactaggccataagcagccgtgtgcttatggactcagtgggcaaaatctcctgatggttttacctttatacgcggatttattcctaggtggactagagcagggaaagcttgttagggaaggctcatacctttggtgggtgacagactgggaattcctctggtattccgcaattaattttgggggcttggttggatctggcccctgtttgtgtggcccctgtttcccatgccatgcccgttgtgttcaaccgtgtgcccttcgggttggcccgccacttcgggccccgccggtaacccgttgttctccaaaaaagggcgcatgcggggttttgg

SEQ ID NO: 641296 - DNA, 373 bp, Homo sapiens
tttccccccttttgttggttttttcccctttcccccccccaaaagcccgggccccggggttttttttggggggaagggagagggcccccaattgccaaacccctttttccccccgttttgcggtttttttttttcccttgccccccccgtttttcccttttgaaaggggccctttgggccccccccctttttttgggttggccccccctttgggcccccccgggtttccctttttttttcccccctttttttttttttggaattttggggggttaccatttttcccccggaaaaactttttccttttttcggattttttttggccccccttttggggtttttcccctggggccccaaattttgcccgggggga

SEQ ID NO: 641297 - DNA, 1354 bp, Homo sapiens
taaaacagtttacatgaaggggaatttattaacaggaaaattatttgggagggaatctggtgtgtcacaggacgggcggaccacgggggaccccccttcctggcggatgtggctggtcagagggggatggggggtggactatctctcaatccggcccgatcttcatacccgaggcgggcagagggctcgtggagggccgagcggggccccgagggctccgaggggtcgggggcccaatttcctcgcggggtgccgcggaagattggagtggtgtagggcgcggggatacccagactccgtgggcacccttctggggccaacattcgcgtgggacagtccaaacatatagacgagcaatatgtgggtgagggaactacactcttgcggagtcgtgccttatacccttacaatcccaaccagttcaacagcgggcacgaagggtttctcctgtggccaaggaaacgatctcagcgggacctgggagcaaaaggtgtgctcactgtgaaggggatgtgcaaaagaattgtggcaagaacaccaaatataacatttcctcctcctttcgagccaccgtgaggggtccagaggctgtgtgtgacctggtgacattacactatctttctccttcaccctttacgagggtggccatttctctggcagccgtcggtctcacagttcttcggccaccatggcgcggccctaaaccggggggtctatttcccaagtccggagggcctgtgcgcggggccctgcagacatgcgtgcgtggcacagactcaaggggccagaagtcgggcaaggacgacaaggtggtgacccggtggaacactgtcgtgcacgagaaggggccacacaaaaagaccctcgtgacaaaaacagcggcaaagacccacacaagatcccacgggagggggagacacacacaccccgtgatacccaggtgccaaaaaacccacccccgggcgaccagccgtggggagcaggacccttagggcggccgatttgcgggaagggggccccacaacgaggacaggacagacctccgggtgcgacactgagtccgtcaacacaaacgggcagggggaagcgaacacccgcgggagcaaacagaagagtcgcccccgatcataaccacacaaactagggcggggcgagagcgaaacaatatatacagacgcggcctgcacaataaactttgtcaatcacagtcggtcgtcaaaccacgaggcgagcgaacctctcggggggcaacacaacttctgtcaaaacgcagagacggacaacatgacaacataacgagcaactgacgtccaaaatatagatagagcagaaccaccctcatccaaacgagcat

SEQ ID NO: 641298 - DNA, 175 bp, Homo sapiens
cctgttactagaataaaatgctagagaaataaaggataaaggtggcagactagggaatatccactagaaaacatttaatatagatatcacagcaaagcatacatttctggaaaattttaaaaaacttacatagtacctaaccactactaagactaaacaaataactataccacaa

SEQ ID NO: 641299 - DNA, 111 bp, Homo sapiens
tgacttgaatgctaggctttgctgaaactttaccttgtttggtccaatatatttatgtattcctgatacatttacttcagctcattcgggaaatatagttctatcgagata

SEQ ID NO: 641300 - DNA, 327 bp, Homo sapiens
aaaaaatgacccgatattggcttagggctccctaggggacatgcccatggaagctcccctttaaaaaaggggtgggcagatgggtttattttttcccccctgtgaatatgtaaaacaaaccccttttttttgagggggttttttataccaatgccaaaacaaaaatttgtgggctctttttaaaagccagagccatataagctttttgggaaagcaagttttaaccccctgctggggtaatgtccagttatatttgtctataaatggggctgtttatggccatttaaaccccttttttttgtaaagggaataaatttttttttttta

SEQ ID NO: 641301 - DNA, 804 bp, Homo sapiens
  misc_feature (10)..(10): n is a, c, g, or t
  misc_feature (126)..(126): n is a, c, g, or t
  misc_feature (214)..(214): n is a, c, g, or t
gcggggcggngggtgggaaatggcggagtatctggcctccatcttcggcaccgagaaagacaaagtcaactgttcattttatttcaaaattggagcatgtcgtcatggagacaggtgctctcggtngcacaataaaccgacgtttagccagaccatcttgattcaaaacatctatcgtaatccccaaaacagtgcacagacggctgacggctcncactgtgccgtgagcgatgtggagatgcaggacacactatgatgagttcatatgacgcgaggttttgtacagaaatggaggagaagtatggggaagtagaggagatgaacgtctgtgacaacctgggagaccacctggtggggaacgtgtacgtcaagtttcgccgtgaggaagatgcggaaaaggctgtgattgacttgaataaccgttggtttaatggtacagccgatccacgccgagctgtacacccgtgacggacttcagagaagcctgctgccgtcagtatgagatgggagaatgcacacgaggcggcttctgcaacttcatgcatttgaagcccatttccagatgagctgcggcgggagctgtatggccgccgtcgcaagaagcatagatcaagatcccgatcccgggagcgtcgttctcggtctaaaagaccgtggtcgtggcggtggcggtggcggtggtggaggtggccggcggacgggagcgtgacaggaggcggtcgaaagatcgtgaaagatctgggcgattctgagccatgccatttttaccttatgtctgctaaaagtggtgagttgattgaacca

SEQ ID NO: 641302 - DNA, 868 bp, Homo sapiens
  misc_feature (10)..(10): n is a, c, g, or t
  misc_feature (126)..(126): n is a, c, g, or t
  misc_feature (214)..(214): n is a, c, g, or t
gcggggcggngggtgggaaatggcggagtatctggcctccatcttcggcaccgagaaagacaaagtcaactgttcattttatttcaaaattggagcatgtcgtcatggagacaggtgctctcggtngcacaataaaccgacgtttagccagaccatcttgattcaaaacatctatcgtaatccccaaaacagtgcacagacggctgacggctcncactaccattgccctcttgaacatttaccgtaaccctcaaaactcttcccagtctgctgacgggttgggccgggtgcgcgagagcgatgtggatgatgcgaggaccatgatgagtgagtggggagggaggttacagaaatggaggagaagtatggggaagtagaggagatgaacgtctgtgacaacctgggagaccacctggtggggaacgtgtacgtcaagtttcgccgtgaggaagatgcggaaaaggctgtgattgacttgaataaccgttggtttaatggtacagccgatccacgccgagctgtacacccgtgacggacttcagagaagcctgctgccgtcagtatgagatgggagaatgcacacgaggcggcttctgcaacttcatgcatttgaagcccatttccagatgagctgcggcgggagctgtatggccgccgtcgcaagaagcatagatcaagatcccgatcccgggagcgtcgttctcggtctaaaagaccgtggtcgtggcggtggcggtggcggtggtggaggtggccggcggacgggagcgtgacaggaggcggtcgaaagatcgtgaaagatctgggcgattctgagccatgccatttttaccttatgtctgctaaaagtggtgagttgattgaacca

SEQ ID NO: 641303 - DNA, 338 bp, Homo sapiens
  misc_feature (292)..(292): n is a, c, g, or t
gtctcgatctcctgacctcgttatcctcctgcctctgcctcccaaagtgctgggattacaggcgtgcaactgcgctcggcccaataacacagttgtcatcaagtatttcccatgtctctcctcctgtctccgttgctggtgcaggtgcatgctgctcttttgctggctttggcaaagggcacactgctgcactgatcattcttgtagtggcgactgtttttggcctgttgcagattttttgcactgtgtggggggtgtgatgtggtgtagtgtcagtgtgtgtgtgggtgcntgggggggccgctgtgcgcggggggtggtggccctctgcttgtttc

SEQ ID NO: 641304 - DNA, 119 bp, Homo sapiens
ttggctctgagctgcacagcatcggcagatcggcggcgcgcagaacgctcctacatgcagatgctgtgcggctgctgcctgagcgcgtgcgcatcagcccggacaggtctacatcaact

SEQ ID NO: 641305 - DNA, 524 bp, Homo sapiens
gggctagaggatcctgtgctcatttcagttctatggggctggtgagaggtactgaatcatgagggcaggtctttcccatgctgttcttgtgatggtgaataagtctcatgagatctgatagttttaaaaaatgcaattcccatggacaactctcttctcttgtctgctgccatgtgagatgtgcctttcaacttccaccatgattgtggggcctccctagccacatagaactgtaagtccattaaacctctttcttttttaaattgcccaggcttgtgtatgtctttatcagcagcatgaaaatggactaatacagtaaattgataccagtagaatggggcgctgctgaaaacatatccaaaaatgtggaagtgactttggaactgggtaataggcagaggttggaatagtttggagggctctaaagaaggcagggaaatgtgggaacgtttggaacttcctagagacttattgagtggctttgatcaaaatgttgatagcgatatggacaataaagtccaggc

SEQ ID NO: 641306 - DNA, 574 bp, Homo sapiens
tctcacccaccccgatacagccacttataataagtttttagaggaggttttaacagaaatggaggagaagtatggggaagtagaggagatgaacgtctgtgacaacctgggagaccacctggtggggaacgtgtacgtcaagtttcgccgtgaggaagatgcggaaaaggctgtgattgacttgaataaccgttggtttaatggtacagccgatccacgccgagctgtacacccgtgacggacttcagagaagcctgctgccgtcagtatgagatgggagaatgcacacgaggcggcttctgcaacttcatgcatttgaagcccatttccagatgagctgcggcgggagctgtatggccgccgtcgcaagaagcatagatcaagatcccgatcccgggagcgtcgttctcggtctaaaagaccgtggtcgtggcggtggcggtggcggtggtggaggtggccggcggacgggagcgtgacaggaggcggtcgaaagatcgtgaaagatctgggcgattctgagccatgccatttttaccttatgtctgctaaaagtggtgagttgattgaacca

SEQ ID NO: 641307 - DNA, 472 bp, Homo sapiens
  misc_feature (333)..(333): n is a, c, g, or t
  misc_feature (368)..(368): n is a, c, g, or t
  misc_feature (382)..(382): n is a, c, g, or t
  misc_feature (414)..(414): n is a, c, g, or t
  misc_feature (433)..(433): n is a, c, g, or t
tgagatggagtctcgctctgtcacctaggctgcagtgcagtgggtgcaatctcggctcactgcaagcttcacctcccgggttcacgccattctcctgcctcagcctcccgagtagctgggactacaggcgcctgcccccatgcctggctaattttttgtatttttagtagagatgggatttcaccgtgttagccaggatggtctcgatatcctgaccttgtgatccgcccgccttgtcctaccaaagtgctgggattacaggcatgagctgtcatgcctgggccgggattaattctttatccatgttatctggcattatttttgattttctgnctatattagggaatattggtaagacccatttcccnttctgggctgtttncccaaaggaaggagaattcttaaaaagttagnacaggggcagcatggcttnatttgatccatgaggataggatattatttttaaaaattt

SEQ ID NO: 641308 - DNA, 893 bp, Homo sapiens
  misc_feature (139)..(139): n is a, c, g, or t
agcgagggagacagcgccgtagtgccggtacatcggggattctggctcttcctcttcgccttaagatacgggtgtctgtatatgaataatcaatagcagtcaacgagccaacggctaatcaggaccagcgttgtgaacnaactagaaaaagacgatgacacacgagatgacgcgctttgagcccgtagctcaggtgttcaagcgactgtattacttgcaaggcgttaaactgaaaccggtactgatttggaagcagtagctgagagtctctcgttgatggcttctgtgagtcataaagaacgtatggatgtaccgtgcgagtaatgtcagaagagaacaccttcgtgttggaccacttgcgtgtgtgggctgggtcggcaatgctggcaccccaggtggctatcgactgggcagcaatgatcatgagtagcggtatcgacgaatgtcgtagcgatgttttgcaggcccaagaagatctacgagaccatgcagatgcatttgctcaggttttatacatcaacgttaatcgacggcggctacaaatacctggagaaaggtcttgaagatgaagtgataaagagcatagctggcgtgttcttgagaaagggttaatcagagtcggaggaggaacaatgctagctatgtgtgactgtgggttcttctgggctaattggagacacgttaatgcgatcctatgtcttaatagccttttgataatgaaaattgggttaaagaaggagttacaatcagcatgtagctggtgaaagctctttacatcattggatacatgacataaagatatcaaatgcacgtaagctgcaatgtcttcggaaaagtcagcatgggataacaggactggatggaactcctttcctggcaaattagcgaagggt

SEQ ID NO: 641309 - DNA, 925 bp, Homo sapiens
  misc_feature (578)..(578): n is a, c, g, or t
gcacccaaaaaggggcgccctccaaaagggggatttttattacccagcgttttgagagaaattgttattacccccacagaaaggggcgcccccaaacaaaaatggccgcccccaaatagttcaacgcacaatctggttgtgattatagacgccccctttggagagtgtaacagcgcatacctccttttggggcgcgtgatgaccatcagtttatagagcaccaccccgtttatcttcctcccatgtggggaaatacacaccactgtgtggcggcaaatagatattatcaatagggggtatatagaagatactgccttatatagggatatctttctcttttgaaaaaaacataatccgtggtgtatatctctgggtgcctgtgtgaggtgttttctcactattttaacatattggcgcccctttacagagaggaatagcccacgccgattttttatatctcagagatacatctctgcccaataggcctttattatcttttagagaggcgcattgcttcgcgctcccatttttggtcctgttatatatggaaatattttttggtctccccccagagagangagccaaggggatatacatctttttttttttttttacgccagtttgagttggtgtagtgtatttttggttatccagaataactcataatagctttggggttttgaattggtgaaataatatccatgatagtgtgaaaaatcccatgataccatactgtcaccagtctccagtccccataaaattggatgttgtgccctacacacacaaccaccggatttagaagaatatgtccaactataaaactgcttgtgattgtgaatgactttgttttttgcttgtgtttttccatttcctataaagcacatactaactttttaaaaattaaggttatttttaaagcccgtta

SEQ ID NO: 641310 - DNA, 232 bp, Homo sapiens
  misc_feature (208)..(208): n is a, c, g, or t
ttttacaagatacacatatataaccaaatgtttaatttcaaatactgaacatcaaagcaccttcttttttgcttctgacagttaaactacgttttaacatagtctggaaattggcttacagacttttcttatagccaaagacatgaaaacggagattcaggccatgtggctgcctcgagctatagcccttggcctggccacatatatnaaccaaatgtttaatttcaaatac

SEQ ID NO: 641311 - DNA, 102 bp, Homo sapiens
ctattagccatggtaaacaaaccgagttcttcgacaataccgtcgactgatcccttggcccgcgtctcctttgagcagttatgcagacaaggccaaagacag

SEQ ID NO: 641312 - DNA, 109 bp, Homo sapiens
cccctcgcatgacctggcaaaggaaaaaggcagcccccctccagtccaaggccagttatttttccaaaacccgacccccacgaggacctcgcattaaagtattttcgga

SEQ ID NO: 641313 - DNA, 479 bp, Homo sapiens
  misc_feature (396)..(396): n is a, c, g, or t
  misc_feature (398)..(398): n is a, c, g, or t
cctggaatcccagcactttgggaggctgaggtgggcaaatcacttgaggttaggagttcaagaccagcctggccaacatggtaaaaccttgtctctactaaaaatacaaaaattagccggctggccaggcgcagtggctcacgcctgtaatcccagcactttgggaggccgagtcgggcggatcgcaaggtcaggagatcgagaccatcctggctaacacggtgaaaccccgtctttactaaaaatacaattagccaggcgtggtgatgggagcctgtattcccagctacatggaaggctgaggcaggagaatggtgtgaacctgggaggcagagcttgtagtgagccgagattgcgccactgcactccagcctgggtgacagagcgagactcccnanaatcgaccaagtttatgcttgcggccggaatttcagcttacttggccaattcgccttataatgaagccgtattacttcctg

SEQ ID NO: 641314 - DNA, 433 bp, Homo sapiens
  misc_feature (287)..(287): n is a, c, g, or t
aaatggggtatcgctctgttgtccaggctcgaatgcagtggtgtgatctcggctcactgcaacctccgcctctggagttcaagcaattttcctgcctcagtctcctgagtagctgggattacaggtgcccaccaccacacctggctaatttttttgtatttttagtagagatgggggtttcaccatgtaggccacactggtctcgaactcctgaccttgtgatccacctgcctcagcctcccaaagtgctgggattacaggttgagccaccgtgcccggcctgaaangtaattcttaacgacctgggaacaaatggctgaaggatgcagaacacaagtctcttgatctccccctccctcagcccatgcagagactatctgggctcatgaagcttcttgcagtttctccaggcctgaaactcaaagctgtagct

SEQ ID NO: 641315 - DNA, 882 bp, Homo sapiens
ctcccatccctacgcatgctttacataacagacgaggtcaaccgatcacctcccttacctatctaaattcatattgtgccatgcaattggttacctgataccctacgcagtgtacaccgcactagcggcggtactacctcttcaactccttatcatacttcccccatttattcctagtaaccaggctgaccctgtagactccttgacgttgactaatcgagtaggtactcccgattgataagcccccattcgtcactacataagttacatcacaagatcgtcttgctacgtcatgagctgtccccatattaggcttaaaaacagatgctgattcccgggacgtctaatatccatatcattttcaccggtacgacgaccgggggtattacttactggtcaattgcttctgaaatctctgtgagagcataagcatcagtttcatgcccatcgtccatagaacttaatttcccctaaaaaatctttgatacactaggggccccgatatttacctctagtagtacacctcccgtcatatcccctctagagtccaagatacctctttacggactccagcttatgactcactaaagcccatgtcgaaagaccccctttcgctgggtcaatagtacttgacgcatgtacctctccgaaactagggggctatggtactaatacgcctcacaatcatttgctcaaagccccgtgaccaaagagagcattagtgcatagcaccatgtacctggtacgtattcccctatgaggaataatttagcccgagaggctcagtcgtgccgtacgaaaaacagaccctagaagcgctccatggcattcatcggggaatcttcccacagaagccctcgtagaaccggcattataacacgg

SEQ ID NO: 641316 - DNA, 420 bp, Homo sapiens
ggttagagggtgtgggcccagtgcacagttcagtggtggtggcctggggcaggagtcaggataggaggacaggaccccaggcggcgacagtgtgctggccctcagggaaggcagggtctgggctccaccagagctctggcactgacctcccggctggctctcctcactggaagtggacttgactgaggccccagcaaggcctgcctgctctgggtggatcctgggcccacgcggtgctgtccccagccagatctggctggagcccagcctcagccatgtttagtcctgtgccagcgacccgccgacgacagatcaagactccaagacagcgaggcgggtgtgaacagccaccgaactcctccaacaggactttccttcccggtgcctaaagcccctcccgggggtggggctgcacaacca

SEQ ID NO: 641317 - DNA, 744 bp, Homo sapiens
  misc_feature (18)..(18): n is a, c, g, or t
  misc_feature (21)..(21): n is a, c, g, or t
  misc_feature (29)..(30): n is a, c, g, or t
  misc_feature (41)..(41): n is a, c, g, or t
  misc_feature (46)..(46): n is a, c, g, or t
  misc_feature (50)..(50): n is a, c, g, or t
  misc_feature (60)..(60): n is a, c, g, or t
  misc_feature (65)..(65): n is a, c, g, or t
  misc_feature (72)..(72): n is a, c, g, or t
  misc_feature (93)..(93): n is a, c, g, or t
  misc_feature (744)..(744): n is a, c, g, or t
acaccgtctcgacctctncanactaccannaaaaatctaanctccncatntgtcccgtcncactnctccacntttctaaccttcctccacgcnctctcccagagtggagaacatcgagatattacctcacagcactgatgagagcaagatgggaaaccagcagatgtactgaagccacccgcgaaaaaagagacaagggtctcaaacacgacgaaaccgtacaaacaggaacggtcagaaacggaaataaggcataaagatgagccgccagaggttcacgtagtacgcgaaggaaatcagtttaattaagaagaactaaaagctctttcttgaaaggagaatagggggaatcaacgcaatgaaaaaacaggaaaagtgtgagaatataaaataaacatttgaaaaaaccaaaaaaaaaaaaaaaatataagaaaccgggaacaaaaatgcggccgtagtgagagctaaattgagaaattggccgtaaagaaaagacggattaaaatgaaaagaccggggtttaaacaaagatgaaaaggggaaaaaccatggcgtcaaccaaactaaaattggcttagaaagaaaattacgcctttgagcaaagctgacgtaaaaaaacaagaaagggcccaacacaatagcggcaatgtcaaaaaagttggcgcaaaactagaatggaaaaaaggcacaaaggaaaagcgtaaataaaatggataaaaaatgcgggacaaaaaatgggcgggn

SEQ ID NO: 641318 - DNA, 223 bp, Homo sapiens
ccttggatgttgagctgcgtctcccggtgggggctcatggactttggtgacctggattggggggattgcagccgctcgctgcttcagctgcttcagtgtccagtggcttctggggtgaggcattgtgcccgggggtcgccagtcggggtgaggaggttgggccttggggacagcagccggttcttgtcgccgccctcggcctcatccaccccgtcgggtggag

SEQ ID NO: 641319 - DNA, 185 bp, Homo sapiens
  misc_feature (131)..(131): n is a, c, g, or t
  misc_feature (145)..(145): n is a, c, g, or t
  misc_feature (158)..(158): n is a, c, g, or t
  misc_feature (173)..(173): n is a, c, g, or t
  misc_feature (185)..(185): n is a, c, g, or t
gatcaggacacgaggaagagtaaatgtgagacagtcaaatgtgacttctgcgataaacagatttttaaaccccggaaattttgcaaaattttgggtgaacctggaaccttcttcggttgcatatacctggnactatctgtacccntcatccaactgtntcaccattaaggctntttttctggggn

SEQ ID NO: 641320 - DNA, 1184 bp, Homo sapiens
  misc_feature (378)..(378): n is a, c, g, or t
gggtgggtgcggcatcgctctgatccctgatgtgaccttcgggaccccgcatggtcctcacgcgcaatggcgggtgtgagggccctggtggccgtcgaggctcgctgcggctatcgtgcattacacagattgcctgtacccaccgtggctggtcggagcgcctttcgcgcaggcgactgcgaggcccgttcaccttctcctgttgtccgtgacccacgcggccacgtggggtctggagctggtgtcgtagtccttggaatgcagtgatctctacagaatgggaccgcgagtaagtccagcgagagtcctcaggccgatctctgagtagcacctgacgcctgtggaaggggttgacatgtcgcacgcaatcatatcagncttcgctcgtacagttcgcccttcgagattgctacgttgcatgttgagtcaagctatcacctaacggggctaggcacgtcccgcaagagcagagcaagcgacggaagaatgtctgtgtgaccagaagttcttgcagaacggatcagtcgcccgttggactaagaagtcaccaagaactcgtggccgcaagccttcgaattgtgccaaggccatatcgcactgatagactgccatacttttccatgtgatgggctcatgtgacgcgtggtctaaaaaaacctagaagccacgtttatgccgtgagacctgggaccaaagattgcatagggtgtagctacaagacacgtgggcagacgtgctctccttggaaggtgaggtgaccccaccttgaggagcacttgcggtacaaggcacaaccacttacagggactcttgttatggcttgggccatttagggcatcggctagtgcggttcaggggggaattccccaaagcgggttgggcattgcacgaaaaagggtgctcaccgtagggggcagaacgtgaggttggggcgccactagcccgtagggccaaagaggaaaccgaaactcggattgcgccccacaccgttggaattcctttctttacttagctctgggggagcaccccgccaaaagaagggtgggcaaactttcttaagcggcacacgtggaacgcatagggccatagaagcacagctagcttgcttgcgatataggtggacaggttattgcccacgacgaagcgtccagcggttagcgagccacagtgtaggttccactagg

SEQ ID NO: 641321 - DNA, 923 bp, Homo sapiens
agcgggtctctctccgctgcggggagcgcatcgcggccccggcgtctctctccgctgcgggaagcccatcgccggcccggcgtgtctctccgttgggggaagcccatcgctcgggccgggatgtctcttgggtgggaggaacggacagtctgtgtcgggacttgcggagtgccatcttggggtaggggaggaagtgatcagtcggagtggcttaggaatttcgtttgagatagtgaagatgtgtcttctacgtggcttaggatttagttgtgagataggaatatatgtatctattacagagccttagattatagttgtgaggtgagattagtaactacctttatacaagcctaagtgcatcgagtgggggtgatgcttgtgaggaactgtatataaagacatcagtgtactctggggcgatgatacatggagaaatgtaatttcaagcatcggtgtgttaggggcaagaaacggcgcacgaacatcgctatttccgcacgggagtgcggtcgctcctaataagcagcgcgaagtaaagggggcccccgaatgcaattcggagggggaggagcgggtgatccgtgaaccggggcggggtaaaagggcacgcggatgaaaatagccgagggggggtcactggtgctgaaccatggggcgtaaacggggccccgagcaatatccaagcgaaccagtgggcgagaaacacggggggaataccgggcccgagggaaaaattccccgcggggagaccagtggggggacgccacctcgggcgaacaaccggggccagcggaaaaatacccaccggggaaaccattgggggaagagcaaaggggtaagacccggccacggcaaaaatacccaagggcacgatagcggaaaaaagggacaagcacaccaaaaccgccggacaaagaggaacg

SEQ ID NO: 641322 - DNA, 93 bp, Homo sapiens
ttgtggtgtgaatttggaaggccggaagaagatgtttgatgccgccaagtctccgacctcacaatagaggccagcttgctgtgctgcgctctg

SEQ ID NO: 641323 - DNA, 1039 bp, Homo sapiens
ccctttgtcgtttctctagcctcttctcatcacgacccatctaccctcatgctccagtgcgccagacgcctctagcaagacgcgctcacgtcctctggtccattccggcggatttccctgaatgggagctgggatcagcatgcttgtcgggggtaccccctggagtagacgacgcgcaccaaggggggacccttgggctttgttttgaagaccatcgcttggtcatcattcacctgcacgaccaatcggcctctgatgtccattgccgtattcgtctccgaggcggctgcctcccggtctctggcggtttggaattcgggctcgaccttacgccggtcggtgtccggagatgccttgcccttggccttctggccaggtcatatcgctcccggcggtgacccatcgacgctggccagctccctggacctgctgcctagccctggcatgccctggctggggccccatcttgccgcaatgtgcaccctgtggatggcttgagacctcagccgcgctgctgctgggcacaggcaagagccctcggtcagtctctctttcttctacccgtcctacccagacgacggtccgtggggtttttgcatgtgcggagtggaaagtacaaggctcacttcgttcaccccagggctctgcccacagtgataccacttgcagaccctgccgtgccacgcctccagctctctgactgctcatgagcccccgctagctctatgacctgtccaaggaccatggtgagaacttatcaacgctgcatgtgggggatgtaggtgccggggccaccccagaggtgactgcaatgccgtgaaacagcttacagctgctcaaggcaccagttagacgcagcgtgtagaccttcggcctccagccaggtggccacggggcgaggaccccagccactgcagatctagcatgtcatacctggcatgcacccccacgcccagcatggctgccattgcccagatccctatgcctgagggcccctcaggtctggcctgggcatgtgatggctcctcacggggagtat

SEQ ID NO: 641324 - DNA, 1489 bp, Homo sapiens
  misc_feature (677)..(677): n is a, c, g, or t
  misc_feature (718)..(718): n is a, c, g, or t
  misc_feature (779)..(779): n is a, c, g, or t
  misc_feature (869)..(869): n is a, c, g, or t
  misc_feature (1172)..(1172): n is a, c, g, or t
gcccccgccttttgtcttgtgcgtcagtggctgatgttttacattgtgtctccccttgtgggggattctgtatcgccccgtttctctcccccgtgtgttgtgcacgcctcgttggagccccatgtgcctatttgttaaaggtctcctcccccggtggccctctctttttcttctctgcccaaggatttttcacccgggggttaacacaaccctgtcttttcaccggtggactcccttctcccgcaggttaacccttttcgtttctcaagggggcccccgccccccctttttggggtgtgtgcaccttataagatgggtgaccccccagaccccaacctgtggaaatgttgtgggtgggacccttggtaaggatttacccccatggattttttgaaaggcccttttttcgtaattataattataaaaaaaggaagggggtgtctttgaaacaccactgtaatttttggggggaaaccccacaagaagaaaattttttccaacctctttttttccacagaagttctcaataaccccactctcctggttaaacaaatcctctttgttttgctttttaaaatttaaaataggttcccccctttatttttaacccccccctcggagtgggtctacattcttgaaatgacgcttaactgtttcgcccgcagtgtctccctcgncctctccgcgggcctctggtttttgccgctcgtctttgggnccttcgtggctataactaaaagttagataagatgttgggagatgttttataacaaaatggnctccgtctttgtagacctcgtctggggcgttatcttttataactcttcgtcgcttctcccccgcctcccaccgctataaacctgtccccncacacggagtttctctttttctgtttcttttgttggctctctatggtaaatccacataattgtggcgctctttcttttctcggtgagatcctctcgagggccgccgctctcttatcatatatggagatccacatcgcgtgtatagattgtatagacgcgctcttgtatatgaccaccccacatctgtttgttgtgttcttttggctcggggttctctcactctctcttctggctaattatagctctatttacccccccactcggctgtccccgcgaccactcggcccctcttttagactcgcncccgagagaactcgggaatattagactcgttgtcgacccctcttgggatagactcgcttgtttctcggttctcggccccgcgggactgtgaataggcacctcggatagtcacgaatttaagagtttctttcctcggggagttacaccacggctatgaaatgtactttggctttctataaaccctcccccacagtgagattctaattcttcacaactacccacgttgtaagtatttctgaaaattggggaaccactttattttaaaagccatcccggtagtgttgctttttaccagcataatacaatatatgtatcca

SEQ ID NO: 641325 - DNA, 958 bp, Homo sapiens
  misc_feature (13)..(13): n is a, c, g, or t
ttttctttctttnaagagaggtagagatagacgacgaagcggaggagggaggaggcggggaaagagaggaagtgatctctctggttctttgtgggcggctcgtgaacacatcggtgtggtccagtctcttgctttgtgggaaagaaggtgcaaaccccaagagtggggcgtcctcccaacctaaggggggcgcacacctcattccggccgcccaactggttcaaaaccccctctgtgtgaaacaacattctgggtcaccccccacggcatgttgcgttgaacgagtccttgtttggccagggaacgccccacccagtgcttggtctgggggacccaaaccctgttttttcccgcggtttatcttaatgaccacatcttgttcgtgaatcccgcgcaagccagtcgagtgtggacccccattcctcggtgtaaggactctcctgagggttctttgactcgccacagactcgctgttcactctggccgtctccaccacagggttgtgccccctcgcccacaatgcgcgggcgccgggacgaacgaggtttttacgggggagatggtcgcgcctgctgtgttcctgccggacgtgtctcccccgatccgtcggttcatataactcctactgcgtggataggtcgtctcttcaaaccaataacagggtgaacgatgctctctgcaacgaagccactgacgcacatgatcacttttgtctttcatttttaaatgtttggctgtatgtaagtcccacccgccggctcctcattcaaatggagcatcttaggcataaagggagcgcttatcccacagactctttgacgtcttagaaattggactgccccgcagatctctctccctgttttgtcactgctatctgcgctccaacgcccaaagtagggggtggcccctttttgtgcaagggcaaacaaaatatttgattttggcggccacacatgca

SEQ ID NO: 641326 - DNA, 150 bp, Homo sapiens
ttcaatgccctgtcatcggcaaaatcctttatgtgcaaaactccatatggaatataagcaggtcatggcagacctgtctacattggagaatgagaacaccgaagccttggataaattcaaggagcttgacaaggagtcactcttctattg

SEQ ID NO: 641327 - DNA, 112 bp, Homo sapiens
ggtcgagttctatgaggatccccagtccagacagaagtcatttcccagcgtatgtctggtatctaatctgtattcgaatcccccccattgtctcccaagaccacgctagcat

SEQ ID NO: 641328 - DNA, 823 bp, Homo sapiens
acgaagtacagccgcccgttttatcatcatcggtcgcgtcattatacttactggccctggtcccccatccatggtctccagccggacgtcgcagtcgtcccgaggcatagaagaactcttgactgacagaaacggaggtgtgtccaaagtagaggacggcagacgggctccaaaacccgtacctacacagcctcgccccgtatcgcctcagctaacaacaaatcatcgtacaacctgtataccacctatcttccagtctggtaagcaaaaaggggtgtctcagaatctaaccggcctagtagaaactagtagaggggatatcggccaagacgtcctcttaccctctagcctcccacccaggccactactatcacctccaccatagagcctaggacataccagagcctaggacatccagtagtagaggagctagagcgacgctaaagatagggccgagctcctacccctctagctaccagcagtagccaagtaggtcaggctggacgacttgtggcctcacggaagcacggtagcaaggacatcagctctagcatttcgagtcaaccctgcactaggcagagctcaacctagcgcagcaacgagctgggcgatgtcggcgtgcattgcgtgctccagaggcctagagaaccccctcctgccaagatccagaagctagagcctaccagaactagcttgctagacgggggcggctgcggggtcctggtccagcacactacggcacctgcccacccttacaggagctggcctcagagaaactcttgggggatgcaggctgcagtgtcctggaagatcctgaccccag

SEQ ID NO: 641329 - DNA, 355 bp, Homo sapiens
cagacaggctaacagcacagaatctcacatatcaaatagagcacagctgttgcatacacgcacgttaatgacttcagttaatacttccagtgtttagacttcagagctgctaataacactaaactcaataccgtgtatgttgcgtctgtcaatcacctttgtcttggacaaagctgctccaggtgtgaagaacccgaccgcctaaggcaagatgagaagcatcacttagaagagtcatgactgcctgaaccatagctatagtgggtagccacatagccagcctctggtcctttcacctgagtacaaattttgatcataggtattgttcttatctgtaccagtagccttggctgta

SEQ ID NO: 641330 - DNA, 265 bp, Homo sapiens
acagttccgctagatcacaaccaaccaaatccagagcccaacactgccacagttccactagatcacagccaaaccccaacagagcccaacaccgccactgttctgctagatcacagtcaaccaaaccccaacagagcccaacaccgccacagttctgctagatcacagtcaaccaaaccccaacagagcccaacaccgccacagttccgctagatcacaaccaaaccccaacagagcccaacaccgccacagttccgctagatca

SEQ ID NO: 641331 - DNA, 352 bp, Homo sapiens
ctgacatacgcgggtcgagaagacactatggagctactaatttattagctgcacactgtacctaacaaacccacattcctaaaggccatacctgcattaataaattaaagctccatagggtcttctcgtcttgctgcagccgcatagattgatgcacccgactagtcagatcgcgccgcattggcataccgagccacagtgatagatactgccgcgcggtacgagcgcgccattgagtctgatcgctccgacatacacagtactggcgagctaccacattgcgtgcacacccgtcgccggccttcgcgatgctgtgacataattaaacagtcggactcctctggtccgcacc

SEQ ID NO: 641332 - DNA, 119 bp, Homo sapiens
ttattcactcttgcagattttcatcccattctactgcattgataggccatcaacatccatcctatcgagatttattataagaatgacgaacatacttttctgctcattccgtactcccc

SEQ ID NO: 641333 - DNA, 754 bp, Homo sapiens
  misc_feature (69)..(69): n is a, c, g, or t
  misc_feature (101)..(101): n is a, c, g, or t
  misc_feature (110)..(110): n is a, c, g, or t
  misc_feature (115)..(115): n is a, c, g, or t
  misc_feature (118)..(118): n is a, c, g, or t
  misc_feature (120)..(120): n is a, c, g, or t
  misc_feature (123)..(123): n is a, c, g, or t
  misc_feature (126)..(126): n is a, c, g, or t
  misc_feature (128)..(128): n is a, c, g, or t
  misc_feature (139)..(139): n is a, c, g, or t
  misc_feature (158)..(158): n is a, c, g, or t
  misc_feature (189)..(189): n is a, c, g, or t
  misc_feature (220)..(221): n is a, c, g, or t
  misc_feature (225)..(225): n is a, c, g, or t
  misc_feature (240)..(240): n is a, c, g, or t
  misc_feature (244)..(244): n is a, c, g, or t
  misc_feature (246)..(246): n is a, c, g, or t
  misc_feature (248)..(248): n is a, c, g, or t
  misc_feature (251)..(251): n is a, c, g, or t
  misc_feature (258)..(258): n is a, c, g, or t
  misc_feature (261)..(261): n is a, c, g, or t
  misc_feature (263)..(265): n is a, c, g, or t
  misc_feature (292)..(292): n is a, c, g, or t
  misc_feature (304)..(304): n is a, c, g, or t
  misc_feature (319)..(319): n is a, c, g, or t
  misc_feature (331)..(332): n is a, c, g, or t
  misc_feature (358)..(359): n is a, c, g, or t
  misc_feature (388)..(388): n is a, c, g, or t
  misc_feature (395)..(395): n is a, c, g, or t
  misc_feature (397)..(397): n is a, c, g, or t
  misc_feature (403)..(403): n is a, c, g, or t
  misc_feature (406)..(406): n is a, c, g, or t
  misc_feature (410)..(410): n is a, c, g, or t
  misc_feature (433)..(433): n is a, c, g, or t
  misc_feature (456)..(456): n is a, c, g, or t
  misc_feature (467)..(467): n is a, c, g, or t
gcgcgggctggccctcggctggtgctgaacgaggaggcggttcgggcgaagagcggcttagggcctcancgcgacctggctgagcttcagtcattgtctantcctggaanttaanaananaanatnanccacctggganattctctgatgagtttaanaggtctgaaatctttggatctctcgcgcaantccttggttagtctggagggcattcaataannaaangaatatggaaaaaanaaanananaanaaaaaanaanannntcgttggcaaaagtgtttcggctccangccttaaacganctcgtggatgtgganttccggctgaannccgtggtgaaagttgagcctgactanngcctttttgttgtgcacctgctccccaanctccaananctgganganagcnccgtgagaacaagcgagcggaangcttcccgaatgcattttgcatnaaaggactcantcgactccaaaaaaagcgtcccagcttctttgaaaaaaggaaaacaaaacacaacccaaaaccaagtgcaccgaggccttggccaagcagagcctggtcatggatgcggatgacgaggcagtcctgaacctcattgcagagtgcgagtgggacctcggcaggcctcccgggagcacgagcttcagccagaaggggcgtgaggccgactctcgtggttcccaagaatccagacatctgttgagcccgcagttggtacagtaccagtgtggggactctgggaagcaggg

SEQ ID NO: 641334 - DNA, 873 bp, Homo sapiens
gcggacccgaagcctgcacagggctgccccgactcccgcccgccatgcccgcagccccgatgccccgcgcgctctggctggcgcacgcgccctgcgtccgggaaggccaagctgacgcacccggggaatggcgatcctggcagtgctggacatggctgggtggcatcgagatctgcatcaccttccccaacgagtacgtgaagacgcagctgcagctggacgagcgctctgcacccgcctgcggtacctggggcatcggggactgcgtgcggcagacggttcgcagaccatggacgtcctggtgcctgtaccgcaggccattagcatcacctgcatctacgtgttccatccccaatggactggacgtacaggttaggaatgttcagagttcctcaggcaaacacatgcggagatgcccagtggacggctggacagcactgcgtgggactgctgtgctggactgggcagctggactgtggccagaggaccggtggtggtctgtgtgaccccatggagaccatcaaggtgaaagtacatccacgaccagacctccccaaaagcaccaagtacagaggatacttccacggggataagggagactgtgcagggaacaagggctgaaggggacagtaacagggacacaacacaagaacacgggacaaggaagacaagggatacgaacgaaggcacatccagaaaaaaaagcgaagacctccactgagacaactaggaaccagaagaggaaaacagacgaagaaaagagaaggaaaaagagctgaatacatgaggagcgaccaggaagaagaggaggagagagacaaggaggcaagggaatcgacaccagatggatgacagagagaccagagggaacag

SEQ ID NO: 641335 - DNA, 137 bp, Homo sapiens
tgagcacacatgtctaaaacctataagacagaactctcccactatgagagccactgggtccgggaatgaatgggtctgcactaacttgtgtcttccacctctgtgagcatgttagtggagtgaataacatttattaa

SEQ ID NO: 641336 - DNA, 1997 bp, Homo sapiens
tttacttctcctgaaatgtgacagatattacattaatcagtagagaaagagtgaactcattaataaatgacactgggtcatacctggttaaatggaaaaaaattcattccataacacataattcacagaaagtactcaacagattaaaaatctaaaaatgaagagtagaacttcaaaagaaaatataggagaacatatttatgactttgacataggaaggtttgttaacacatagagtaaaccagaaaggaagagattaagttttaaaacttctgttcaagaaaagacaccatagttataagggaagcacaaatgaatgaagttggaaccatgtaccatatccgaaaattaactcaaaatggatcaaagacaatgtaagatctaaagctataaaactcttggaagaaaacaggtctgaatcttcaatttggcaaaggatgcttagataatgccaaaagcacaagctataaaagaaaaagtagataatttggacttcttcaaaattaaaaaccgtgtttcaaaggacaccatcaagaaagcaaaagacagcctacagaaagggaaaaaatatttgcaaatgatatttctgataagagtagtattcagtgtatataacaaaaagataacccaatttaaaaatgggcaaaggatttgaatagatatttctccaatgaagatatataaatggccaacatggtacattaaaaaatgctcaacatcattagaaattagagaaatgcaaatcaaaacctctatgaagcctgagcaacatagtgagaccctgtctttacaaaaattagaaaatttgcccaggatggtggtgtgcacctgtggtctcagctactcgggggctgaggtgggaggattgcttgagcccaggaggttggggctgcagtgagccataatcacatgattgcactccagcctgggtgacaaggttagactccatctctaaaagaaaaaacattatgcagtaccacttcacatctactaagatggctaaaatttaaataaagggaaagtaacaagtgttcatgaagatgtggagaatttgagaccctcgtattttgctgatagaaatataaaacagagcaactgcttggcagacagtttgctggtttctcaaaaagttaaacagaattaccatatgatccagaaatttcactcctaggtatatacccaaaagaacaaaaagcagagattcaatcctatacttgtatgccaacatttatagcagcattattcacaatagccaaaagctgggaacaactcgcatgtccatcaacagatgaatggttaaattaaatgtatatggtaaatacattacagtagaatatacagtggaatataattcagcttaaaaatggataaaattccaatacatgctacaacatggatgaaccttggaaacgttatgctaataaaataagccaaacacaaaaggacaatattgtatgtttccactaatatgaggtaactggagtagtcaaattcatagagacagaaaatagaagttaccaagggttacggggaagaggcaatgatcagttactgtttaatggatacagagtttcagtttgggatgatagaatagttcagatctggaaatggaccgttgcacattgtctattaatgccacttaattgtacacgtaaaaatggctaaaatggaaattttcatgtgtatattttaccacaatataaaaaaaattaggccggacacagtggctcacgcctgtaatcgcagcactttgggaggccgaggcaggcggatcacaaggtcaggagatcgagaccatcctggctaacacagtgaaaccccatctctactaaacaaaatacaaaaaattagccaggcgtggtggtgggcgcctgtagtcccagctacccgggaggctgaggcaggagaatggcatgaacctgggaggcggagcttgcagtgaggccgagatcgcaccactgcactccagcctgggcgacagagcgagactccgtctc

SEQ ID NO: 641337 - DNA, 440 bp, Homo sapiens
  misc_feature (13)..(13): n is a, c, g, or t
  misc_feature (47)..(47): n is a, c, g, or t
  misc_feature (419)..(419): n is a, c, g, or t
  misc_feature (438)..(438): n is a, c, g, or t
  misc_feature (440)..(440): n is a, c, g, or t
aatttaaataggncctcacctaataggggaaatttggcccctcgagncccaagaattcggcacgaggggaaaactggatatcccatatgcagaagaatgaaactagaccccctacctcctcactgtagacaaaagtcaaatcaaggcctaggcatggtggcttacaccctgtaatctcagcactttgggaggctgaggcaggcgtatcacgaggtgaagagattgagaccatcctgaccaacatggtgaaactcacccccccccacccactaaaaatacaaaaattagctgggcgtgatggcatgtgcctgcagtcctagctactcaggaggctggggcaggagaatcgcttgaacccaggaggtggaggttgcagtgagctgagattgtgccactgcactccagcctggcgacagagnaagactccatctcaaaatnan

SEQ ID NO: 641338 - DNA, 115 bp, Homo sapiens
caagaggccgggtgccgctagaggccgggtgccgctagaggccgggtgccgctagaggcccgggtgccgctagaggccccgggggagggggtttgtgggtgggggtaccgagctc

SEQ ID NO: 641339 - DNA, 157 bp, Homo sapiens
ctgcttctgctttgggcgttctttgtcctttcgactcttcttctggtcccctctcgtcgtgtgtgggaagcctctcgcgctgcgtggatggtgaggctgaccggcttctcctcccagagatgaaaccactgccacctccccccgtggtcccacctct

SEQ ID NO: 641340 - DNA, 316 bp, Homo sapiens
agttacaacagctattgaaagctatgatgggttttatttttgaaatgactcaatatgtatgaggagccgccctagtctgtgtgataacgagtggttataacagagtgaatagccggattctctcctacgtggcacccctggacctgaacttcatggacctgctgaagtaactctcctgtagtacacatctgctgaggactgaatgtcgacgtcgccccaaattcatatgttgacatcccaagccccacagtgatggaatcaggaggtgacgcctctggaggcgatgagttcatggagacagagtcgccacacatga

SEQ ID NO: 641341 - DNA, 152 bp, Homo sapiens
gggcataaggtagcgttgatttactttgctgatacggcagcttatctgcacgctaagcggcgggacggtgtggcccaagagatgcttgagagaaccccgagttttacgccgcctttgccgctgcatcaagaagtcaggtaaaagttggaagt

SEQ ID NO: 641342 - DNA, 188 bp, Homo sapiens
tcgttgtgcagccgagtttatcatcagggcggttctgttagtagtcgtccagtgagggctgcgagctcggtagaggccgaggtatacggacgtcttggtggtcagaaccctggtgtcatagatgccctttcctcagaggactgagatcatggtttttagaatgaaagagttaaagaaaccttgctgtt

SEQ ID NO: 641343 - DNA, 182 bp, Homo sapiens
cgacctggtgtttaccgttcggacagcatgggccgcggtgcttcgtgcgacggtgtcggcggtgtagccggtaccgttgcgcttgttgatcaggaggccagaccggccttgccggaatacgggagggacattggagaaacctcttggttagtgtcgcgcaatgaaaactaaactggccctag

SEQ ID NO: 641344 - DNA, 307 bp, Homo sapiens
  misc_feature (12)..(12): n is a, c, g, or t
  misc_feature (91)..(91): n is a, c, g, or t
  misc_feature (108)..(108): n is a, c, g, or t
  misc_feature (134)..(135): n is a, c, g, or t
  misc_feature (182)..(182): n is a, c, g, or t
  misc_feature (242)..(242): n is a, c, g, or t
tggacttactgncacgtaaaaatgaatggatacaatttaatcatccatataccgaaaaaccaaggttatggcacacagcttgtgccagcgnatgaaggagaagtaatnctgtttttggtggatgtgccaacaanncttgcttgtccccatcacagagctgcacacagtaagtgaaatactanatattttcagcttcaacacaaaatctcttgtacgcgctaagctatagaaagcagtcattntcgctttaaaagaaattgttagccaaactccatggaaactgcccttcacaaaaacacttacttca

SEQ ID NO: 641345 - DNA, 159 bp, Homo sapiens
cacgaggggaagtcgaggcacacttgcccgaaaaggtggactacgtcatcaggtgcgacatgtctgcactgcaccgactgctctaccgccacatgcaggccaagggcgagctgctgactgatggctccgataacgacaagaagggcacaggcggcacca

SEQ ID NO: 641346 - DNA, 130 bp, Homo sapiens
catctactggagaagcgttgtgaaaacggacattcagatagcgctccctatctggtgttatggaagagtggctccacggtcaggctaggtgcaaaacactttattgatgtaggagctggtgtcatagatg

SEQ ID NO: 641347 - DNA, 403 bp, Homo sapiens
  misc_feature (1)..(1): n is a, c, g, or t
  misc_feature (234)..(234): n is a, c, g, or t
ntccggcggcagagctccaccgctgaggccacgaggccaacctttttaacattttgaacaggggcaactattactgaactggggatggctaaacttaagtgggggcagatgggtatagtgcagtgtaatgccatcactgagcactgcaaatgcaagactgaagaactaacagccacatctcagacgctggaccaggggcaggggcaactctttctggatgggggggggaaaaanagtacagccatcttctaactgcatgcctgcaaagatgagcctctgctgggcggggaggatgccttccttatcctggatattgggctccacattttcgatggggtcactgggctccacttcaagggggatgggcttgccagtcaggggcttcacaaagatctgcattttg

SEQ ID NO: 641348 - DNA, 393 bp, Homo sapiens
cttgacaaatggtataacattacagcacacaagatacagcagaggtgatcaaagtggacatcaccagtgataagtcatgctgatagtatgtacccttgatacgatgtaataaatatggtattttacctctgtcctctccctccccaaacccatcatcccaatctaatcctgagaaaaacatcataaaaatcccaactgagggacattctacagaatacctaaccagtacccctcaaaactatcaaggtcatcaaaaacaaggaaagtctgagcaaccatgataaccaagggagcccaaggagacacaactatgaaatgcagcatggtatcctgggcaagatactgcaatagaaaaaggacatgggagaacatctaaataaatacaggttttac

SEQ ID NO: 641349 - DNA, 158 bp, Homo sapiens
ttcgacggaagcaaacaaaacaaaacaaaacaaaacaaaacaaaaccaaacctgaacttgagaccattctcatcacctgtcttgaaattttactttagcctcatgagcgacagagcctactatagaccccctcgtcgctgcctcggacaagacatacc

SEQ ID NO: 641350 - DNA, 101 bp, Homo sapiens
ctctagagtatccccttcattacgcaatttaaacgtagaactaagattctatctggacaaccagctatcaccaggctcggtaggctttgtcgccatctatc

SEQ ID NO: 641351 - DNA, 132 bp, Homo sapiens
tcatcgaacaccctgctgatgggctcttcttgcagagctacaaagggcaaggggtgtgagcagtgtgctggggagggaaaagtgatagattcacattcctataatcgtgcctattttgtatgtaatggacat

SEQ ID NO: 641352 - DNA, 595 bp, Homo sapiens
  misc_feature (542)..(542): n is a, c, g, or t
aggatctagaggtcgtataagcataccaaagcctgtctttggagcacttgagggagcttgaatgaaaggtgcagatagagcagtaccttgatcttatctttctgagtgtcctgcttgttgcatcctgcatggatgagtgaatgcttctatgcacgaggagactcaagccaactcagagtctgctttttccaacgctcttcccaggtttcttttgcaaaggcttggtcatttggcccaggtcttcctggaaagtggagtacatgtcactgactagggtggcgtggtgtctttacccttaacattaagtcttgttacctcagtgatgtgaagccaatggttggaattataaaaagcatccttgctggttcttcacaggacactggaacccaccctgtcaattcagctagcatgtccacacagtcttgatgatccctctctgtaacaggcagctaacattaagagaagggggaaagagaagaagagagcaatagcttatgggagagctgagatcttacttcgttgacccatatttttcccctgancaagttacctgtaaactggaatttgcaaggggatgctgtgatgataagccctt

SEQ ID NO: 641353 - DNA, 253 bp, Homo sapiens
  misc_feature (239)..(239): n is a, c, g, or t
tgtgcgaatatcatgctgaactgtagtcggtggtggccaggtggttgatcagcgcgcggtagaactcggatttgccgtgcttgtagaaaccgatggaggtgtacaactcggcaatgtgcttgcccggcaggatgcgcttgagaaagccgatgaattccgctggcacgggtacatcgaccatgaaataggaacgggtgaacgagaagatgatcgacacgtcggcttcgtcagtgatcaangcatcgatctggat

SEQ ID NO: 641354 - DNA, 842 bp, Homo sapiens
tctccacgaggtcgcgctgggctgtacgagtgctgggccggccagaggctgtcgggtagcagccggggttatgctgggcacggattgcatgctggccatcattctggtcaactgcgatgatgacttgtgggggtgaccacaggtctggaggtggaaggctgtgccttgccatccatggccatgtgacggagagaatcacactgagtgctgacaggatactttagctacgtggtcaatgtacgccacgcggttagcgaccacaagtggtcaagacgccgcaacctgggaacttaggagatgcagaggacccaggcacgggaacggaggggatctggggactgcggccccccaaagggagatccttctccagcctggagagttcactggaccggagtaactctctgtcctggtatggtggggaatcctacatccagagcatggagccaggggctaacgtgcttagcagtccgctctctgggctgggtagaggtacctgaagaggacctggcaccggggacagacgcagtatttgcagtcaataactgtatccagcagctggcccagacccgctagccggaagccagcctccaagatggtgcctgggggccagaacattgctgatgatcctgaagaagggatgccatgagcatagtgaatcccctggaccacagtctgatccacttgccagactctggtgcacatccgtgatgtgaggcgcagtgagggagctccaagggccggtgaggattgcctaaattccgccaagcaagacgctactttctcacctcccggctgcaggctgtgatacccactgatgctgattccccaagtacttgaaacac

SEQ ID NO: 641355 - DNA, 145 bp, Homo sapiens
atagtgtatatggggcccacagctactggtgccagaacacagagacagcagcccagtgcaatgctgtcgagcattgcaacacgccatgtgtggaactcggaggaggaatattccatcttggcagaaaccacagcattggtttatt

SEQ ID NO: 641356 - DNA, 361 bp, Homo sapiens
ggtcccaccccgctcccttaggagggcctgtccaaactttttaaacccccccaaccgcctgccaggatgggctccctggtcattgcagggccaaaaaaccctttctgcccgaacatcaagggggtccctgccccaaaattaggcaagctttttatgggcccggcttttccagaaaacccccactaaaaaaagggagtttcccgaaaaaaaggttaccttaactttttaagtcccccccgggccactcttggaaaaaaaaaatttggctatttaaaagccccaagggtttttttaggggccttgcccattttgggtaaaacagggtctttttaaccctaataaaaaaaaaccaaatttttta

SEQ ID NO: 641357 - DNA, 770 bp, Homo sapiens
gcaggcccagaggactggggtgactcacgggccctgtgctgtgatgttgagagcggagaaaaagtcgtcctaaggccctgagcccctatgcctagccctgtcttggtcccccaatccccagagcttggagtctgggccccagatccaggcctgccttggtcgctgagcctcagagtgtggaattgcctgccctgtggacactggtgctgtggaacggtaaggtcttcccctatcacatggcggaccccggcctctcaggagtagacctccctatcttgcccctgccagccagcaatgcagcacgcgtgcatgggtggggccagtagctcctgtcgggcctcgagaggacaccttggtccatgcatcgagtgcatgctagaacggtgccgtggtgcgaggtcaccgcggggtcgaggcaaggccttcgcacaccgtcagccaacctgaggtgcccctgggaggctcctctggtgctggttggtgctgggttctgtggggcgcctacaggtaacccttctacggggacggcaagatggcaaccttcagtgtacccctgtatagtagacgaagcacgggggatccacgtcctggtgaggtgcgtgctggtgttgctggcctccacctgctcgatgtatttccatcgctcgctagggcagttgggggccctcccacggtgtagctgacagccaacaaccctgttttagccctccactagggcccaatggtgttccgagtgtgttggggtcttgaagcgcgaaaataaagaactc

SEQ ID NO: 641358 - DNA, 194 bp, Homo sapiens
aattccgtcgaactccgccacgataggtccgcgataggtcttgttgacgaatagcttacgaatgaactcgaaagcgtgccccgtcggatcacggcggttgatcgggtcgcaaagagcaaatgagtaggtattcaaccctccttttgcgaatgggctgtcgctgtctggactgttgaaaccccagaagaagaggg

SEQ ID NO: 641359 - DNA, 179 bp, Homo sapiens
  misc_feature (122)..(123): n is a, c, g, or t
cattatcctcctgcttgaactatagcaacagccttcataggctatgtgtcccgtgaggccaaattatcatcctgaggggccacaataattacaaacttactattcgccatcccatacattgnnacaactacacctttcctatacatagggacagacgttattcaatgaatattacgagg

SEQ ID NO: 641360 - DNA, 193 bp, Homo sapiens
gaagccgacgatcgccacccccatcgccagcacccacatgcgcatgcgggtccagtcgcccatgtgaacgatgtcggagacggcccccatcgtgcagaagtgggtgcgctgggcaatggccccgaaggccaccgacaaaaagaaagcagcccagagaacctgggctgcgatggcttggagatcgacgtcttgc

SEQ ID NO: 641361 - DNA, 432 bp, Homo sapiens
  misc_feature (432)..(432): n is a, c, g, or t
tattgtagagatgggggtctcactgttgccagcactggtcacaaactcctgggctcaagtgatcttcccacttcagcctcccaaagttttggaattacaggcatgagccatcacacagggcctgtttcactttcttatcattcatgagctcactggagtaatttttttcaagaacttttcctttgcattcacaactcaggtaactttagtgcaagagccctagcatttggcctgttttggattttgacatgttttcctcactaaacctaatcatttctagcttttgaattaaagtgagagacgtgacttttcctttcacttgaacgtttagcccattgtagggttattaactggcctaatttcaatagtgttgtgtctcagggaacagagaaacccaaggaaaggggagagagggatggggaaacagccagn

SEQ ID NO: 641362 - DNA, 213 bp, Homo sapiens
  misc_feature (98)..(98): n is a, c, g, or t
ttttttttccccggggggccccccctttttgggggctttttttgggaaaataggggggggaaaaaaaacccctttttttttccccaaacccctttttngggggggggggggggtcccacccgccccttttttaaaaccccccttggggtgttttttttttgggggcccccccaaaaaaggggggggggggggggtttttttccccccccccca

SEQ ID NO: 641363 - DNA, 937 bp, Homo sapiens
ctccccagaacgttctttcttccaaccgcccagggggggttctcctgggccgcatggggttgaaccgccccccccgagcaaccccagagggtccttgggggaatatacagggtttcttccgtgcgtctctcggggacaggagcattcccttttctcttgcggcgcccacacccaaattttggcgggggctccagtagttggcgcacccacttgttgctcgttccggtacaccaatcccccgctgtagttcgttctttttcggagaggagcgtctttttcttggtggccgacaaaagcacgttcccccccaatttttctcgagacggcgtgttgaatgggcggcccgagtttccccccaggtgccccttgggaccacccaacccgcgtcgataaggacgcgaccctctccttctgtttctcctcttgtctccctgcaaggggccaattttctctacgggcgtttctctcacgccagcgtttataccccccccctccttcttacactcgggacaccaccactccctgtcggtggtgtgacttacacggcgggctgtgcccccccagagagtgggtgtagaaacacgcggggtacccctccgaggacaccgcctttccatgtccgagtcccctctcctcgggccttctctttctcttttggccagaagaggaaccttttccctaccaaccggccccacaggatggtcgccccaacttccaccttgagcgctctcagctttctagcaaatatttactgtggaagagccttcctcactaaggggcccacccggagagattttcccccccccccacccgctttcccaggggtaaacccccaaaaccccctggaggtttttttgggagaccccccccaaccccctggtcaatttgccctttttcctggtttgaggtccactttaaaatacattgaggtttctta

SEQ ID NO: 641364 - DNA, 200 bp, Homo sapiens
tttttcccccaaaaaaaagtaagtaaactaaaccccaaaaacatataaataaaatccctcccttttgtgggggccctgcaggggggcacccttaatccaaacccctggctatcaaataatcaaaatgtattgtttcaaacaggatttcagttccgggaggcaggggcataatgggggagggggccggaggttgaaagcca

SEQ ID NO: 641365 - DNA, 122 bp, Homo sapiens
ggctgcaggatcggcacgagagagagagagagagagagagagagagagagagagagagagagagagagagagagagaggagagaggagagagagagagatataatagtgcgatctagaggtc

SEQ ID NO: 641366 - DNA, 344 bp, Homo sapiens
atgtctttcatacagactttcagttggtgtcgaaagggtaattatattttattaaattttaaaagagcatgttttataatagcactatatcagacataatagtttaaccatgccataaatggttgtgaactgttgctattattttagtgccagcatttattggcttttacataaacctgttatgtgataagtttcatttttccccttatacctagttgctgtgtagtaaacaacacttccacattcttgaactcgtatacattgactgagcttttaatttgctcaggaagtgtaggatggtgaattagaactgttgtcaaacctttttccccaaggttaactgg

SEQ ID NO: 641367 - DNA, 448 bp, Homo sapiens
tattaatatagctacttctgctttcttttctctaatgtttctgtaatatatcttttttccattctttactttcagctggtttatatcattatagttgaaatgagtttcttgtaaatagcatgtatttgggccttgttggtaatctactttgccaaattctgtgtttaaattggaacatttagaccatttacatttaatgtagttactgatacattagggtgtaagtctgctattttctttcttgtctctttttaattctttctatcttttatatatatatttaaaaaaattttttttaagttttttgagacggagtctctctctgtcatccaggctggaatgcagtggcaccatctcagcttactgcaagctctgcctcattcctctccatgatgccccctgctctgggcttctctcctgttttccccaataaatatgtgcctcatgt

SEQ ID NO: 641368 - DNA, 248 bp, Homo sapiens
cggttaaggaacatctttttagagctgcaaagtatcgattatgattcagggtgacagcatgctaggggctgcttcattaggcaaatggtattcataagcagaatggagtagggtgttcagtatccagtggccagctcctcaaggacttgtctgtgaaccacattacttctgcttggcctattgctgggctggtgctgtagggaccggtgaagggcagttctcaggcaccttgggtttgcagggctctg

SEQ ID NO: 641369 - DNA, 108 bp, Homo sapiens
caggtctttcccctcaaacggctgctcttgaaagtgcacaccacgatcaggttcaacatattcaacagttgaatgtatattatatgcctggcatggttctaaaaatca

SEQ ID NO: 641370 - DNA, 815 bp, Homo sapiens
  misc_feature (128)..(128): n is a, c, g, or t
  misc_feature (345)..(345): n is a, c, g, or t
  misc_feature (353)..(353): n is a, c, g, or t
  misc_feature (355)..(355): n is a, c, g, or t
  misc_feature (718)..(718): n is a, c, g, or t
  misc_feature (729)..(729): n is a, c, g, or t
  misc_feature (746)..(746): n is a, c, g, or t
  misc_feature (752)..(752): n is a, c, g, or t
tactgtcgctgcagccgccggaaaggtctccgtgacaagatgaagctcatcatcctggagcactattctcaggcgagcgagtgggcggtaaatacatcaggaaccgatcatccagtttaacccagggncagagaagtacttcaccctggggctccccactgggagtaccccacttggctgctacaagaagctgatgaatactataagaatggggacctgtcctttaaatatgtgaagaccttcaacatggatgagtacgtgggccttcctcgagaccacccggagagttaccactccttcatgtggaacaacttcttcaagcacattgacatccacccagaaaanacccacantnctggatgggaatgcagtcgacctacaggcagactgtgatgcctctgcaagcacgcacgcatcaccggcctgcacggctgcggatcgcagcctactccgctccgcgcacggcactcggccctgcatggcaccacacttgccttcacacgagccaggctccagtctggctgtccacggacccgtgtgaaccacgctggccactggcctaccatcctggccaactgctaggtctcttcgatggagaactcaccacagtgcccaccatggccttgcacggtgcgcggtgggccactgtcactggcatgctagagcaggtgatgatccttatcacaggtgctcacaaggccattgctctgacaagccntcgcggcgggngtgacacatgtggccgngtctgncttcggcgcacccgccccgttggttgcggcagatccctgggtgagttgagccgtagtttccac

SEQ ID NO: 641371 - DNA, 156 bp, Homo sapiens
tcacttcctctacccaaattcatacctccattttccccgccctcatctctccccagtgtcctcaatgtgggaagagggagaggtagcaatccctacggaatccaggcccactccactcctgtctcctggcaccagctgggacaggctgatgtcttg

SEQ ID NO: 641372 - DNA, 311 bp, Homo sapiens
  misc_feature (285)..(285): n is a, c, g, or t
accataatgtagaatcagtgggcgtgttaagcttgttttcctgcaactggatggtcccacctgagcgtgatgggaggaagtgacagatcaataggtattagactctcattaaggacagcgcaacctagatccctcacatgcacggttcacaacagggtgcgttctatgagaatctaatgctgctgctgatctgagaaggtggagctcaggcgggaatgtgagcaaaggggagtggctgtaaatacagacgaagcttccctcactccctcactcgacaccactcanctcctgctgtgtggctccttgcggct

SEQ ID NO: 641373 - DNA, 124 bp, Homo sapiens
tctttgatctgattttctccaaggctccctcgctttggcttctcctcttcctcctcctccttttccttgtcttctttcttgctttcttcaccatccctccaatcattcttctggtaggacttgg

SEQ ID NO: 641374 - DNA, 1228 bp, Homo sapiens
cgagcgtctcagcgcagcgccggccgcgagagccagtacgaacgatcccagcacctggccggatggatgcgtcgcaagcccgacatgcatgccccaggatttgtcagaggccctgaggggaggccagccaaggagagtgcacacccatggcagagaagtgctgagttcatgaggaacgtttcagaagggcctaggtgacccgatgacggcttcaagctggtgatggctctcctctgtacctacatcttatgtggccctggaggaggagattgagcgcaactgaggtagagctccagtcttcgcccctgtctactttcgccaggagagtagctgcaaccgctaaggtctgcaccatggcatgcagggaccctggtccatcctggtagcgggcacccagcgtggccgtgaggtcatcaccgcatacatcgacctagttgctatggtccagtcgacttagtgatggatagcgtgcctcctagcagaggtgggaggcgcggcattgaggctcgcagaagccttgctgggtggggcacccacgaccgtatcacctcgtgtacccttggggtgaatcctgttcctgggggcgccgaagcgttgctttcccatcacaacggaatttcgcaccctatgaaaacgccccgttgggaccccttgctcaccaaggcatctgggcgccgaccgggcgcccgtgagctccttatcgttctacatgcgtattcacacacaagtatttttgccagtggttgttcgaaccgaagggttcccacatcgcccagtgcttcgttagcccggcgtacccccgggtcaccttgaaaaatacttcccccctggggacagcgaattggagggtacctccggccatggtaccgtgagccgtgaccaggtgggttggccgtttgaagaccttgacgcgggactatggggaaccttggcccgttttccccttggggcatccggattcaatgttccgaaagactattccttcactgaatgacggaacagtttgtccacaggtgtgaagaccttgggccgttaaagccccccaaattggaaacccatccccgtgagtgtggcagccaaagaaaaggtccccgcctattccggacacggtggagcagtccccacatagtgggacattttccggtcgccaagtgtcgcggggggcccactagacgcacagccaaaaaacgggtgtgcccaacagcgtaaatttcgtatgggcgactca

SEQ ID NO: 641375 - DNA, 198 bp, Homo sapiens
  misc_feature (14)..(14): n is a, c, g, or t
  misc_feature (36)..(36): n is a, c, g, or t
  misc_feature (172)..(172): n is a, c, g, or t
agagtagagcctgnaagtcgcaggactcactggatngatgttattcaactccttccagttgtcttgaacagcctgactcctgcccgtccctatggaagttccatgcattggaggaaaaacatgttggctctcttgatgtgggagaaattgaaaagaaggggaaggggaagtnaagaaggggaagaagatcaaagaagg

SEQ ID NO: 641376 - DNA, 191 bp, Homo sapiens
ccggtcctctgttagttccctgggtaggttctatgtgtatgtggactgaggtgtgtgcctgccctctcttctcccttgagctgcccctagcacctgctttgctgcaagctcccagagggcaagcaaggtgggatgcattatggtgcctgtacggctccttctctgggagcttgcagcacagcaggtcttgg

SEQ ID NO: 641377 - DNA, 817 bp, Homo sapiens
ctgcctgactgcttgttcgtctcactggtgtgagctccagcatccccttgctcgaaatggaccccaactgctcttgcgccactggtaagggaagctctgcgccctggaatccccatttcccagccctattacagagggtctctgggtttcaggaagtcgcattttaagttctgagcgacggggactccagtacttcgttagatgctttcttcctgatcacgcccctgagagcattgccctcatccctgggcctctacgtcagagttaagaatactgaggctcaaggctgaactgctccacatcacccagttggtcatgggcctgctggctgggccccagtgctctgtccaggctctgagcaatcagtgtggttgggggtgctggaaacattgactcttcagagttcaggacagaaggttctggctcgcagtctcaatattcctgggttgtatgtgcacgtgggaccttcctggtgcggtaaaacaggagggtccttgcccttcccagcgttagtggagaggacatggggcttctgttcctctgtcctgagtgggaaaggagctctgagggctgggcctgcacagaggagggggcacgtggagactcactgacccactgctgtaccttctgcatctcactcactgcccactgcgtattcctcttccttgtaggtggctcctgcacgtgcgccggctcctgcaagtgcaaagagtgccaaatgcacctcctgcaagaagagtgagtgcggggcatctccaggaatctggggctgtggctcaggttgggagggaactcaaggcgtgggcctgaatgcatc

SEQ ID NO: 641378 - DNA, 365 bp, Homo sapiens
  misc_feature (1)..(1): n is a, c, g, or t
nggtcttcctcgaatcgatcatagattccttgatgattatcatcactataagaaatattagaatatccttcaatcttcagtattactcgcaggtcgtctaagtgagatgcctgcagtatgcacaggtgtcagctggcttgaagaatagcacccacagtctctgaaccattggagtatagcattggatcttgatctcttaagctccagtctgcgggttgcatacataagaagctttggtcctggctctctgttccttacgatcgggaggagacagatagccagggcaagccgcaggcttctcccacattgcgggggttgtcacaaactcttccaacgggcctgcttccgttctctgtgctttactg

SEQ ID NO: 641379 - DNA, 705 bp, Homo sapiens
  misc_feature (319)..(319): n is a, c, g, or t
ctgcctgactgcttgttcgtctcactggtgtgagctccagcatccccttgctcgaaatggaccccaactgctcttgcgccactggtggctcctgcacgtgcgccggctcctgcaagtgcaagagagtgcaagatgcagccttcctgcataggaaggagctgctgttggccatgacgtgtccccctgtggtgctgtgccaaggtgtgcccacgggacatgacgatcatgctagaagggggcgatcgcgagaacgctgcaagactgctggtgcgctgactggtgggaagcatggctgcttactccgcaagaatggtaagantagcaacacaagccgtgcctacaatgcactggcaatatatgtattgtatggacatagtatcagacatctgagtgccactcttggcgtggcatttttctcttgttactagctaaacatgtactgtgcacctgatcatactaagaaaccaagttgtatgacgtttacagaaaaaagaacaccaaaaagtggtcggtcccgtattccttaaaagaatgagtccccgctccgaagagggcgccccaaaagtcgtgtacggtccgtttacccctagtcgttgtctctgggataccgcaaaagtgtgggttcccctataattacgtggcagttcggctaattacattaaagccttagggccaccagtgggccccgaacggatttttactgaa

SEQ ID NO: 641380 - DNA, 803 bp, Homo sapiens
gactcggagcgcacaaaccaggctcgccatgaagccaggattcagtccccgtgggggtggctttggcggccgagggggctttggtgaccgtggtggtcgtggagtgccgagggggctttggctggggtgccgaggtcgaggcggaggctttagcaagtgtctgtgggacgacggaggaggtggacggctggctggctggctggtggatgcgaggacgggaagagggttggtggaggcttccattctggtggcaacctgggggtcgtggtcgcggggcaggggaaaaacacaggatggggaaaaaacccgaggtccggcggtgcgcacacggacagttcgttgactcgggctggacgccagcaatctgcggcccattggacgcggcggatttgggtttcccttttccaaaccatctttgggtaccgacagggacaaccggaaccgaatgcacattggatccaaccgaaaaggaagaacccccatttgggggggcctttccccccccccttttagcgaggacggcggcaaaacaacttttcccgaagcgggcgctacttattcaactttcgggggggcaacggcaaaatggaacaaaccgcacacggaatgggtttccattaccgcggggaactttcttctcggggacacgcgacggcatcggacgcaccaatacttcgcatcgttcaccccagcaacggccccactttgggggcaaaactccgcccccattttttcccccggggccattctcccgaataccggggcacgctttcaacgggtctccacaggtggccccacacggg

SEQ ID NO: 641381 - DNA, 195 bp, Homo sapiens
agagggaggctaaggagaaaaaagagggagaaggaagagagggagagggagaagaataggaactggtacaacaaattgaatatcataacgaaattatgaaacaattaggtaaccatgtaagaaaagaagaagaggaaggagaagaagaaggaagaggaaggaggaggaaaaagagggaggataaggagaaaaaag

SEQ ID NO: 641382 - DNA, 376 bp, Homo sapiens
gccaaacacgcagtctgattattttattgtgtatattgtacgtatgagcatgatcacattatgtttcatggctttgaacactgtcatcttcttattcacttcctggtcatttgatcctagattactgaggagactagccctgtggagggtccttgtgggcggcccccttggggaggtggtccctggggctttccaggaggaggtgggggaggaacttgctgataggctccctgtttgggtgggccttgtgtgcttactcgaggaggacggggatgggctccctagtttgggggaggtccttgtgggcttccttgaagagggagggggattggctccctgtttggggttggccttgtgggtttcccttgaggaaggt

SEQ ID NO: 641383 - DNA, 100 bp, Homo sapiens
aagaagtagaagactcagaattagaagaggaacatggagctgatccaggacacctcccgcccgccactggagtacgtgaagggggtcccgctcatcaagt

SEQ ID NO: 641384 - DNA, 503 bp, Homo sapiens
  misc_feature (179)..(179): n is a, c, g, or t
agaagagactagatgcaattgaagacagagtaatttggaagatagagcttagggaacttcacaaaatgggttacagtgagacaggtagaaaatgtgaaagaatagttgagagcatagaataagagtctagttggagatccaggaatagaaagcagaaaaaatcctggagagaaaaatantcaaagagatggcaactgagaattagcctgagaaatgcatgcatgaggtcttaaattgaacaagtacatcaagttttgaattttcaagtttaatgggaatgataaatcctcagatccaagaagctgaacaaaccccagtcaggatggacacacacacacagtcacataagttaatcaaattactgaaaactggttgtattgagaaaaatctttagccagaggaaaagccacaaattacatgggaacaaaactgatgataattgtagacctcttgttggaaaaaatgctcctggaagacagtggaatttgatctttcacttggta

SEQ ID NO: 641385 - DNA, 429 bp, Homo sapiens
ggactgcaccgcccgccctgccagacccgcccggaacggggctcgtctgccgccagtagccgcagcaccgaggcttgggcctcgcgccggtatggccgtgcctggggctgagccctcaggttgtgaccgagattcccgacgagagcagactgaggggaagacgaggaaggcaggggcgggctccgtggcaaaagcaattccgcgtcctgagcggaatcctgcaaaggatggagcaaggaggaggagacaaacccggggagctgctgcttgccccaatttggcagggggtagtgggctcccccaccgggttcttgacccaattccggccccaaggagggggaccagaccgggggccgtcctttttgttgccaacgcgagggtttgacctcgcaaggaaagatttcgccctcttgtgggagagggtgcccc

SEQ ID NO: 641386 - DNA, 161 bp, Homo sapiens
agaatgccctaggacatttatatgtactataagatggacacgacgtgacccataggatggatttaagaagaatgatacatgagattaggagacagtgtgttgatagtcaaagggccagggataaagttcttcctgtggcctgagtcacacccctcagttct

SEQ ID NO: 641387 - DNA, 131 bp, Homo sapiens
tagtagacagcacagaggaggtcaacgatccctcccttaccatcaaatcaatttggccaccaagtggtaactgaacctacgagtacaccgacatacggaggactaatcttcaagtcctacatacttccccc

SEQ ID NO: 641388 - DNA, 373 bp, Homo sapiens
  misc_feature (372)..(372): n is a, c, g, or t
ggcccattgcaaaaatgcattcatccaaagcgacacatgtggcaacgtagccccccccagtgaaataagccccttggtgatcccctgactccagttctccgtgtgctccattggctgcggctgcaggagaaaaatgcttgacagccttcatgttttccgcaggggggcgttcacaaaaatgccaggggtgtttattgggtttatttttttaattactaaaatcagtagttaagaaagggtccttgaaccctcttaacttgggttggccctttgaaaaatatatttgtagcccatattatagatggaaaaaagaagatatttatttatccctgtgatgccaattgtcattaaaaggcttttcatggcttgccna

SEQ ID NO: 641389 - DNA, 246 bp, Homo sapiens
ttaaaccttccgcccggtgaggaaacccggggtggttgttcccccgttggggccgcccccccaaaccccggccgccccgggccgcccccgcaccccgcccgggccgggttaaaaggaaaaattccaaaaagggccagggtggggctggggctggaaaccacaaggaggaggattaagtccccctgtccctcctgggggggtggaatgttttgttttcctgccaaataaacagggtcagggttttta

SEQ ID NO: 641390 - DNA, 851 bp, Homo sapiens
  misc_feature (803)..(803): n is a, c, g, or t
agcggggggggttgactgcccgtgggcgtaagcggactgtatccgcgagctcctgtcaggcggggggatggatgcggcggtcgagcctggaaacctggccggcgtcaggcactatcatcctggtctctcttcatggaagaggggggctgttgggaaaagctagcatctccacggagctggccctggcactgcgccatgcaggccagacacggtgggaatccgtggcatgtggacctgtgttgccccagtatcccccgcatgctcgggggcgcatgggcagggtctgtgcactcacgtgcgaccgcggcatggagcatcgctcgtcttcgctggagccgcgtggagcagtagctagtctcgctcatgtctgtgtggcttcctgctgtgagaatacctgtgacgagagccgtgagtgtggagcaggccccaatgtaccacgtgctgatacaagcatgttttgctgtctcgacgtgtgcctggggcggagctgtattacctggtggtggacatgctccccggggaactctccgatggtgcactttggccgaggcatagaagccctgcgtccctaccagcccctgggggccctcgtggtcaccacgccccaggtggtgtccttgggggacgtgaggcgtgagatgaccttctgtaggaagacgggcttgcggttgatggcgaatcggggagaatatgagtgggttcacctgcccacactgcacggagtgcaccagcgtcttctccaggggcggcggagaggagctggaccagctcgccgaggtgacctgcttaggctccagtgcccntggaccctgagctcatgactgacccttgagggagggtcacgccttcat

SEQ ID NO: 641391 - DNA, 918 bp, Homo sapiens
gaggccttacggtagctcgtagtttctcggacgggccgctcccgtgggctcgtgggctctgctctccacactacaactcccacggggcagcgggcgcggctcccctgtacccaccgagctggccgggcagggcatccatttcgcggtcgggcccgccggctgcgggcacccgcgcgatgggcggtgaacgatggcggatgtggtctgtgggtaaaagacatatgggcggaggtaacgcagcggacttcatctcgcatgaccatcatatccctgtcattcccgggtcatccatgataggaaggtctcccccgagagtgtcctaagtcgatcaaccgaaggaaggcggttggtgctcagcggacataggcgcactagagtgtctttgttcatagtgcctagccacgctattcctacagaccacggcagtggaaaggacaaagaaagtactgacttacagttgattgacccaaacatctgcacagtcaactcagaaaagcttttcaagtttcttgcagatatattaccaacagaagattttacgctagtaacattacctgataccattgcttaacagagacacagtacagaaggacatgagtgacaggagaggacggtacagcgacgaaaaaatggcaaggggagcctggaaaaatggagggaagagaaggacaacgcaaaagagacacgaaaatgacagacatgacagaaaaggctgcggtggacagcaggagcaggaacggccacgggaattgctcgcgaggggggcaacgaaaaaaatcggcagattgatgacaccacagaaaattgtgctggcgcacaccgggtatacgaacaaaatgcaaaggaggccctgcgttagggtattccttccagagcacctgggtggaacaatctaccccacaattggcgttctgacaa

SEQ ID NO: 641392 - DNA, 416 bp, Homo sapiens
  misc_feature (384)..(384): n is a, c, g, or t
cctactactactcatctttcgggcacatcctcacctcacctaacctttcatgtcactgaccacagtgactttccacagaagcacagctgcttaaatgctgggtgggttttttggtatgtcttcacaaggcatgtcccaaggatacatatataacactcttattttaattggtttttggttttttggagacagaatctggctctgtcgcccaggctggagtgctgtggtgcgatcgggctcactgcagccttcacctcccagattcaagcgatcctccggccccagactcccaagtagctggggaccacaggcgcatgccaccacacctgggctaattttggtattttaagtagacacgcggtttcactatgccggccagacggntctggaactcctgaccttaattgatctgcccg

SEQ ID NO: 641393 - DNA, 126 bp, Homo sapiens
ggtctgcctcgccagctgtccggacatacttctggtgggcactgtgcggaaacttgaggataaatcagtgagctgcatgcactttatacaggcatggccctggtctccgtcacttgagatgcaagg

SEQ ID NO: 641394 - DNA, 225 bp, Homo sapiens
tcgcttaggtgtactagtacgtatatctaaaactgtaagcaaaaaaaaaaaatgtggggcacaaaacaaattgtggggagaggagaaccctgaattcccttattggcatcagattgccccctccacatttctcattccataacaaaaaattcctttccttatgtgagccaccactaattggtagctaatctcaatctcttcactgtgacacacattccctgtgac

SEQ ID NO: 641395 - DNA, 1921 bp, Homo sapiens
ggtacctactagacataacaattctcattctcgctttaccttacgtgctacactgagactatgccatacatgcttaactgcgctgtcctattagaccgcgtggtaatgactaggatcacgacgaccggctgagtcatagcgtacaactagtcatgggtattactaaccccctatcttccttcatctagctctctcgtacatcacgcacaagcttagcacatccctccatttgacgcagccttcgtaactactagtacgtggtgcgaccatatgcccgctcttctgatacctgtgtaaaactagcgtgcacactaacagcgtctgctcctgcactttactacacacgatggctgcagatatagcaacaagtatcgctgtgagagtagaaagcgtttacactgatgtgagccaactagctattaccaccaacgaatgacgctcatctatactatatatcatacgacgtgttgtaatggctttgtgtacctactggacctatctagagacatgagtattttgtaatttgttacatgaacatagtgacacgcgtaaacgtaattgtttagaactatagaagggtcggatatggtaaaagagcttaaagtatgcagtggctatatgagcaatatgtgaaagatacaaggtaagtgggtcagatggaacgcgattttaggggtggagagggcatacgaaatttgaaccagggcattgataccactacgtggtgtaagatcacctcgaggagacattcactgattggcttgtactacaatatagagacaaggaattcgaccagcataattctcgctagcctatatataacaccatcatttgtgaaccctataaatgtccggaaaatcaatacaggcggaatcgtaaacactcaaggagaaattacctcttttcactacacatagtatggagacgcgacggctgataagttaaataagagataagttccttagtggggatagttaatgaaatggccagttgaaggcaaaagcactctatgcaaagattaaccatccaaatagggtagaacaaggtcattgaaacattcacaattttccgttggggaactatccagtacatatgcgacgttgtggacatagtcaacagtggaaagtagatgtatgagggtagaacactattgggatggaacacaacagtatggatctctgttaaaacagagccaataaattaacaatttcacaacctacaatattcgtatacacaggtattacccttaagggaatcacaccatcctaaacatattgattagtaacagttgaaccagacatgtatacccatttacaacttacaccataacatctccccaaagaaacacaacagttgtatccatcgacatcaaataaaatattaacaccgaaaaaacagtatcaccacagaagtagatatcaaactatatcatacgtaaaacagacaacccagccctttaatacacatctacaacatatgattaacacaaatctctaatccacccataacatactacaataattcctcaagcaaagctacctatcaaacgagcgaccataaccagcaccattacataatgaaacaagaaggagaaagatggagcggagcaagaagaggaagcacagagaaggtgacaggaacggcggagcagggatgtcgaacgaccaagcagagagcacaaacagagagagcagatggagaggaacgcggagcagaaggcaagacgaacgagacggagaaggcagacgatcgaaagagctgagggagatcaaacgaagagagcgagagagcgagcgatgagcacagagagagggagggctagagagatgtgcctccggcggcgggagtcgtggatgggcgctgatgacggtcagttcagagggcatgatagcagaagagaaagatggagaggatgcaagat

SEQ ID NO: 641396 - DNA, 127 bp, Homo sapiens
gacgatactcttgacaaccgacaaaacaagaaaggggaagtcataataaatgtgctgggaaaagtggctagccatatgtagaaagttaaaactggatcccttccttacaccttatgcaacaaattag

SEQ ID NO: 641397 - DNA, 172 bp, Homo sapiens
cagtacagcccagcgctcaggggagcaggctgctgcaagggtttgttgctgtggttattctggttcactggccccatcgcctccagtggctatggaaacaggccattctgggccagccacgtctctgcatggcagtgcccaagtcttggagttgctagtgggcgacggagct

SEQ ID NO: 641398 - DNA, 786 bp, Homo sapiens
ataacagacttcactcctatgctgatttttctggtgccactgaaggtattttgggagcagaattaagcagaggagatggtggtgtcccttggcaacacacccatttgtttttacaaagcttagatgaccatgaagaaaattggttgggaataattattaaattcacggacctttgagaaccctgaaatttttaaaaaagctcgggggggggggatgactttctggggtgctttggtgggtagaggcgatgctttgttggcggttgcccacctgtgggaagatgtttgtttgggctagagataacaataaaaccctacttatagtctcggttttacccgggaaatttgcatgtgtttgtgtgccccctcgcctcgttatagggttttgaatagcagggtttggtcgtttaggcgtttgggcacgatattttattatttcgcgtcccgcgggaccatatgcacggtttagtggcccatattacgaggcgccatgttttttgggtcgcatcaccgtcccagattttgtgcattactggcccattttgcgtttgcactatctcacctccaaaggatctctccagtagtttttcgatgtatccgcctgctcgcaacgagggtgttgttttgccctgccgccgcctgagatgagcgtgtgtccgaagattgtgtcgcagttaccgcatgcggtgttgtgtggcgatgtgtgtatttggtagtcggtggctttgctgatattcttacatcgctgttgtaagaggctatgtgtagagttatatatgcattatgg

SEQ ID NO: 641399 - DNA, 200 bp, Homo sapiens
tatacgggacctacagggtcagctttgtactgaatagacgcactcgccttgatgcgctgcgaacgagaagttggctaccttacagtcgccgacggtcagggtgtccagccaataggtgcctccgacattcgaagtgtcgacgtagtggatggagaatggcggacgctcatcggtctggcaggtgttcgacttgctctggt

SEQ ID NO: 641400 - DNA, 866 bp, Homo sapiens
ggctcatgctgtcctcatcctccttctccatcctcttttttctcctccgcctctccccccgagactcgccaccagtcgcggctattgtgctgtgaggcgcctgctgtcattcctgtgccggaggaaccggcgctgccggtgcctgggggtcggggcgcggtgcgaagccgggccgcggaggacacaacaggtagagcctggggtgtgcccggccgctgctgcccccctgcgcatcatgcagctctttgtcacctctctcgcccccaggcaaaatcctgagcatgatggaagacaataagcagctcgcgctccgaatcgatggggcggtccagtcggcacagccaggaggtgaccaacctgcgagccagaaactcaacggcaccaacctggagactggcggaactgagctggcgagcggcggccccggccctggggcccagggagcctgatggacagcgccctcggcaggcaggggggactcggcggagacagagacattggagaaaccccccaagcattggaagccgcaaaggtaggattcggccccaggaagacacagggcgagatggaacggccgaagcaggatgacacggaccacgagcctcgagaagagtggccagagtggaacaccggaggtacccccacaaaaccccctgggaggcagaaaaatcggcattatgacagtaccatgagctttgataaaccacctttatacaggagaacaggagagtagagacacagccggaatgactatcaccaggacatagggaaattgcaagtgcacatacatagatcaattcaacgaaaaaagcccagagacgcaagatgatgcaacaggggtaaaacacgaataacaacgttgcgca

SEQ ID NO: 641401 - DNA, 699 bp, Homo sapiens
  misc_feature (18)..(18): n is a, c, g, or t
  misc_feature (70)..(70): n is a, c, g, or t
  misc_feature (110)..(110): n is a, c, g, or t
  misc_feature (116)..(116): n is a, c, g, or t
  misc_feature (119)..(119): n is a, c, g, or t
  misc_feature (122)..(122): n is a, c, g, or t
  misc_feature (128)..(128): n is a, c, g, or t
  misc_feature (175)..(176): n is a, c, g, or t
  misc_feature (184)..(186): n is a, c, g, or t
  misc_feature (251)..(251): n is a, c, g, or t
  misc_feature (266)..(266): n is a, c, g, or t
  misc_feature (414)..(414): n is a, c, g, or t
  misc_feature (424)..(424): n is a, c, g, or t
  misc_feature (438)..(438): n is a, c, g, or t
  misc_feature (458)..(458): n is a, c, g, or t
  misc_feature (461)..(461): n is a, c, g, or t
  misc_feature (482)..(482): n is a, c, g, or t
  misc_feature (492)..(493): n is a, c, g, or t
  misc_feature (508)..(510): n is a, c, g, or t
  misc_feature (515)..(515): n is a, c, g, or t
  misc_feature (520)..(521): n is a, c, g, or t
  misc_feature (560)..(562): n is a, c, g, or t
  misc_feature (574)..(574): n is a, c, g, or t
  misc_feature (578)..(578): n is a, c, g, or t
  misc_feature (681)..(681): n is a, c, g, or t
tcctgtgcatatatttcntcaactcaagattagtggcataaaatgtcaggctgtctatgccagacatgcnctgccctatggcagggccaagtgagaggattgtcactttnaaagtnggnacnctttanatggatgatacgataacactggacccacagaccaagagcatccttcnnagcccccnnnccgcccgtaggaatggaagagggaaattggaagcagggtcccttttcgatcttcatgtgaagagncccagcctcttcaanggtatccaagataaacttccgttccccaagcccaccaatccctgttcagttcctttgcttcctgccctcccaaataggacattctccttttgttcccatcccccctttgcacagatcctccaaggggatgtcccatgatccacaaggnagataccttnatatgcagtagggnagggcaggtacacactatcnttntcccttattctatgtgtttgncactgacttnngcccttcatcacaannntctcnaatanncactgggagccataacaataaatctggaagtacggggannncatatcaaaaangggnaggatggattcccttgatgcccaggattacagggcacctaaagcacattttttttttttctgagccaaccagctaaaggatcactgcagctaaatacagatanagaagcaacaaagccagg

SEQ ID NO: 641402 - DNA, 216 bp, Homo sapiens
acttaatggagaaggactggatgaactgaggatcagccggaggagaaatgaggacccagagacatttattggggagtaggatgtggctaagtctttttttggccagattagcggattaagtcctggaagagtgtctcatatagtgggccccaggacttggaccctgggtgggaaataagggacaaggattggaaccccatttcccatggggatata

SEQ ID NO: 641403 - DNA, 269 bp, Homo sapiens
gactcgagttcggtaccctcggatagggccaagtaatgacaggtttcaccatgttggccaggatggtctcgatctcttgacctcatgatccacccacatcagactcccaaagtgctaggattacaggcgtgagccgctgcacctggcatttctttttttttaaaaaaagagacaaggtcttgcttgcccaggctgatctagaactcctgggctcaagcagtcctctcacctcagcatcccaaagtgctggaattgttggccttatcgag

SEQ ID NO: 641404 - DNA, 140 bp, Homo sapiens
cagtaggattagtcctctagctccatacttactcagttactgcagacccctctagctacctccttcattcactatacatcttgtattcccgaggatgtgaatctccctcaagaaagatccctggcgacctggagtggtgt

SEQ ID NO: 641405 - DNA, 381 bp, Homo sapiens
  misc_feature (17)..(17): n is a, c, g, or t
  misc_feature (20)..(20): n is a, c, g, or t
  misc_feature (23)..(23): n is a, c, g, or t
  misc_feature (38)..(38): n is a, c, g, or t
  misc_feature (57)..(57): n is a, c, g, or t
  misc_feature (61)..(61): n is a, c, g, or t
  misc_feature (71)..(71): n is a, c, g, or t
  misc_feature (105)..(105): n is a, c, g, or t
  misc_feature (110)..(110): n is a, c, g, or t
  misc_feature (119)..(120): n is a, c, g, or t
  misc_feature (138)..(138): n is a, c, g, or t
  misc_feature (146)..(146): n is a, c, g, or t
  misc_feature (151)..(151): n is a, c, g, or t
  misc_feature (168)..(168): n is a, c, g, or t
  misc_feature (179)..(179): n is a, c, g, or t
  misc_feature (183)..(183): n is a, c, g, or t
  misc_feature (185)..(185): n is a, c, g, or t
  misc_feature (231)..(231): n is a, c, g, or t
tttgtatgtctgtgctnagnggnatttactatgttccnttatacatggtgtttattnaggnttgagagtcncttgactgtgagaatgtacactgtctgggtttgncagcnattctgtannattatcattataatctgncaaatagnaatgntgcttctagaaaatttncctaggaggcnaatntngggaaggtgaagcactcaccataattccctaaattcatgttagaanatttcttgctatggttaaaaatgctgcttcctttgacctttatgaatttctgtacctttgtcattctgttacctttgtcattctgttattgcgctaattatattttaatgtctcctaattaaaattaaaatttggttgttggctaaatac

SEQ ID NO: 641406 - DNA, 258 bp, Homo sapiens
  misc_feature (17)..(18): n is a, c, g, or t
ggtcctcccccccaaannattttccccccccccccgggaaaaggccagccaccccaatttggccccccccaaaacccaaaaaaggggggcccttttccccgggccttgggaaaaatttttttcccttgccctcctcccccccactttggtttttttttttgcccccccgccctggccccaaacccaaaggggctttcccccccccccaaaaaaaaaaaaaaaaaaaaaaattaattaattaccttttttaaaagggga

SEQ ID NO: 641407 - DNA, 324 bp, Homo sapiens
tggagcctttgatgccagcagtcttagccagcgaaagagaagcaggtgatacaagagatgaacggtgaaggagacgaggacatcgtgtctaggaggccagcgaggccccagcctttggtacgaaggaaaatgactggcagtcgcgacttgaataggacttttaccccgattccatgctcagaattcccatggcatcgacccaccgagacaggaccactgtcagtgaacgcagagaggtctgtggtgggcctctgctatggcggattcgatccgttcccccagggaccatccacggatggcttcttccttcatgtaggcagggcg

SEQ ID NO: 641408 - DNA, 823 bp, Homo sapiens
gggagtttcctgcgagctcggcttcctacaacatggactgcgcccttgtccagtggaggtggagttctggagagtggtgcggagctccatgtaaagacggatattaagacactatcgagatcactttgcctggacagggacggaacccatgggacatccggaacctgctccatctggctcaaaggaagaattccggctaacaagagcggcccagagttgtacactcacaggggagccagcagtacgcgcgccaggacaattctggtgctcgatcaacagatagaccagacatggaagaaggctaagctggcgatgacgccatggacaaaaccaagacacattcagcgacccaagcgaccaacgacgaatacacataccatgtccataccctcaaacattccatgccaacagagcagagcatgacaggacccccatcaatcctaggcggacactgggaaacccaccattaaaaagaacgaagcaagacacacggacagccaaacgtcaagactcactccccccatttgggcccacgatggactaccaaagaggtacacacccgtgattcccaccggtttgcctcttggacgattacttacaccattggcatcatggaccgcgccgtaacgagctacaccatacaagagcaagagagcagaacagagggacacaaggtggcctcacaaaatggacaccattcccctcccaggcaccgctgaaacaacagagcacacgcacgcacacaggggccgacgaaagtccataggcaatacaccatatattacacggacgccaggtgagccggaggaaaggaactcaccac

SEQ ID NO: 641409 - DNA, 124 bp, Homo sapiens
agaggatacctgagtcgctgtatcagggggagtagtgtaatgggaagaaaagaaaggaggtcctgtggggccgagtctgccgcgagcgggcagtgattggcgttgactttgcaaacagaaggca

SEQ ID NO: 641410 - DNA, 1158 bp, Homo sapiens
cttagatatgtctctcccccacccgtagcactggcttttctggtctctttaccattgaattaggcctggtctagacttcacgatctttatacctgagagtacagaaaagaggcttaatcaagaatacgtcgagttctgttcgaataagatcccatccgtcatcagatacctttctacagcttctctgtcacgagtatttgatcactgctcatagaacctggcactagagatttcatgtggcgaatgtactcccattcaaaaggaaaaacattcaacaattctaatatttaattgattcacatcacatgtgctttgctaatgttaaggtattcatagtcacagccccatcacttgttgacaagtcctatatcaagtaatcatagtagattcaaaacaaaaccgagagtcaggaatcagcacaatcaggctttccactgccaaaaatgaacatcatattaacttcactgacttgatttaaaagagagagcacctcagaccctaattcaaagactgtaccatctcagcccacaaacatcgaaatatcagactgagaaacatatgagcaggccaggtgctgcaccacaggacgcaaacgtccatgaagccggctggcctgcacacgccacaggaggaaagcgtaaacagatatgcagccagcgactacacaaagcaacaacacggtgcacagcacaatggtgcaacatcccaggggccaccacaacagagcatcgggacaaagaactcagagggcacggcaaaacactcagaagcagcacactacgacccaagaaggataagtgccaagatcacaactcaatgagaagaccacgacccagaagccttacaggaacaggaaaaacacccgtacataggaacaagacaagaacggcaaacagacccgtagaaccacataacgaaaaccaccgatgttagggcacccggagccacataacagcacgaaacccaacccaactgagacagaaaatcctactagagcagaacgtaagagaaccaggaacaacaaacagcctacgacagctgagcgataacaacacagaaacatgaaacaactcagctacaacacagaaaaacgaggacctgcaacgcacaaacccgtaaagatacccgcacaagaagacaccaagacatcaccacaca

SEQ ID NO: 641411 - DNA, 93 bp, Homo sapiens
gcggccgcctactactactactgctcgaattcaagcttctaacgatgtacggggacatgcaactaattcaataaaactgtcttgtgagctgac

SEQ ID NO: 641412 - DNA, 347 bp, Homo sapiens
tacttttttttttaatttttttggctttttgagatggtcacgctctgttgcttaggctgaagtccattggcacgatctcagttaattctggttcggcttcccggactcaggcgatcttcttgcttaagcttccggattagctaggactccagttacacaccaccttgcccagctaattttaggccaatttttttgtagggccaggttctcactatattgcccaggctggtcttgaactcctgggctcaagtgttcttcctgccttggcttcccaaattgctgggattgcaggcttgacccactgtgctggttcttctcttactttttattaaacccttttattgcgg

SEQ ID NO: 641413 - DNA, 387 bp, Homo sapiens
tgagaggaacaggagaacagctgtttgcaagagagaggagtaagagggagagcgacacgtctgcaaaaaaggaggatcaataacaagttctgaaattgaggcagtaattaatatcctaccaaccaaagaaagcgcaggaccagatggattcacagccaaattctaccagaggtataaagaggagctggtaccattccttctgaaagccttccgaaccatagaagatgagggtctcctcctcacctcattctatgaggcccgcctcatcctgataccaagacctggcagagacacaacaaaaaagggccacttcaggccagtatccctgacgaacatctatgtgaaaaccctccgtcaaatactggcaaacagaatccagcagcacat

SEQ ID NO: 641414 - DNA, 1090 bp, Homo sapiens
ctcgtgtccgtgcccttcctggggacctcccggagtttggtattctgccctttctttcggtgcacccgcgcgtgttttccgtccccgtcctcccgttttccgccaccgcgtctctatgtgtctccccccgcgcgtgccttttctccgccccggtccccttggtccaaccctgtctcctctctcgcgccccgtgcattaatttctttctccccgtcccggtatatccccataccctaactcttgctccgggaggccatagaccacttggacacatgggagtggtgcgactcatgcgatcacgtggcccttccgtagggcgccctatgggcgggcgcaccaataaatgatacagtgcgggagagacgtagacagccccagcataatatgcaccgccgctacccttaatcatccgctatccccaccgtgcgtcaggtatggcagcaagactcgccacactccccggctaccaatagggtagtgatctgctacagtgctctgcgccctcggactcatctattcgtaatcagccgctagggctggaccctagactaggcgaatgttatgtagccaaaaacttccattcactagacatcgtacgtacacgacacggtactacggtgtcgtagctcacttccagcgtatgtcctatcaatacggagctgtactgttgccatacataggaggcttcagttcactgatttcccctattgctcaggctacaccctagaccaaacctgacgcccaaatccactttcactgatcatacttcatcggcgtaaatgtgaatctgttcttcccacaacacgttctgcggcctatccggaatgcccactgacgttacatcggactaccccgatgcatacaccacatgagacatcctatcatctgtagggtcatgtcatttctctaacagcagtaatactaataattttcatcatgtgagaatgccttcgcttcgaagcgtaaaagtcctaatagtagacgaaccctccataaacctggagtgcctatatggatgccccccaccctaccacacattcaaagaacccgtatacaatgaaatctagacaattaccaggaaggactcgaa

SEQ ID NO: 641415 - DNA, 645 bp, Homo sapiens
tcacccacccccaggctcagatctaccatctcagctcctgagtagctgggactacaggtgcacaccaccatgcctgcctaatttttgtattttagtagacaacaaaggtctcgccaggttgcccaggctggaggattttttaaaaatgaaaaatggtaatcctcttccaactccacatttcagttctatgctaccaactatctttctctgacaagatgctcaccaagataatcttcaacatcccttttattcattactatctgggctgctgcctccagtttggctctgtactttcaagaaggtgtctaaatacttctatcatggtgcttaccattacttattctctcacaagctcttcttccttaggatacttttcaggatcctcttagtaagctagtcccttaagaagtacattctttagaattccctaccaggctatctcttcttactctacattcagtacaattatcaatgactacaatagatttcaattatcttcaattggtcaactgacttccaaatcttcatagacagctcatatctcactgtcaagtaccacgtatgtgtctacccaatggatatgctacctgggttgtccatgggctcatctgggtgtgtggagaacgggggtcccgagctcgaatc

SEQ ID NO: 641416 - DNA, 453 bp, Homo sapiens
  misc_feature (422)..(422): n is a, c, g, or t
gagtaatgcagcattagtggatgctcacggtggaggatgggagagtaatgcagcattagtggatgctcacggtggaggatgggagagtaatgcagcattagtggatgctcacggtggagggtggaagttattttaggtcagctctattgggaataggagaggagagtgagatggacttatgtatatgtgtatgtattttggttagagtattttgatatttcagaatggaactaaattataatctagtacttagattttttttgttgttgtagtctgtccctaatcacattgataccgtgtagaatgatttagaataatctcaagtgtatttaataataatgagttgttctttgtaatttaatgtgcagattgtaaaatgctgtattttattatgtttaggatcttaaaacttcaaggggtcnatttgaagaaatgaagaaaacagcaaaccac

SEQ ID NO: 641417 - DNA, 1622 bp, Homo sapiens
  misc_feature (63)..(64): n is a, c, g, or t
  misc_feature (511)..(511): n is a, c, g, or t
taaataaatagtttatttattcaaaatagttttcttaccttattcacagtttcaagtttgaanntgaaaaaaaggggtagtaccgtggttcttgatcaacgtgtcatataaagtcaaaaggtgaactcctttcagaaacagtgcattaaatacagccaaatgtgcacaacgagcctcgctctttggaaaaaactccgtgccacgtgaagctttattgaagaaacaccaccttttttctcgtggaacaattataaagaggaaacacgtggtagaagtgttccagggaggctcttccttataaccccaccttgtgaaacctgtgttaatgtggtctactctgtggaattatagagagttctcctcttgtggacacacagagtttacacattctttatctctcacaacatataatctcatatattcttatagaacccgcgtgtgtatagcttgtgcaccattaacttctcaacaacacatatcacggtgacaaagagggtgcgtaaactgtgcnatatctacagagacagagagctctgtggttctaaactcacccgagagggacgtcactctacacatataacttttctctcaaaagagacacctttcacacactatagcgtgagaacaggcttctttaaagacttgagaatctctccgtgaagtgtctctgaggccactgtctccaaagtgtgtcacagacaacacgcccacgaagaaaagtctctaaacgcggcggtaaatctgtgagtccgtgggtcccacacttttacaagagtcacacgtcgtgggtggttttctccccaccgtgtgattatttacgccgtgggtttttcaaaaagtgcgggactatatttttcccccttaaactatcacttctcaacattgggcaaacaaccaaaacgagccaccgcaggaacacttagaacaaccaaaaccccggcggcgctcccccggctgatttgaggatcacggggcccaccctgtaggacacaagagcagcttctggttcactcgccggcgaccacaacgcggccttcacttctcgttgcccaacgatcacacaactgagaaacacgagcggccaatttacgagacacggatcaccgcgctctatgcgcacactgaggccccgggccgggaacaaaaacgatgtgtcgtccccccaccagaaggtgggttggcgcaacgcaataaacccgcgctatggacatactgcttctgcccgagaaaagaacagttgcgaggggaataacaaattgggacgacaggtgccatccaacaaacgccggcggagcaaaaaaatgtgactcatgagagagaggcttgcagaacacaggtggtccccactcacacagaagatactaagaacgagagaccactcattcaagcgagaaagataaaagccataaaaggaggcagcgcacacgcaacgcaaacaccacctcgcgcgcacacacacacactccatagcgagagacgaagaccaccctatgccacgctaacaacgcgcgacacacgaccacacgccacgaggaaaccacccaaggtagcgcacgacatatcaaacccgtcgcggacgatgtcacccaccccacaccaccacaccacaccacacagtataa

SEQ ID NO: 641418 - DNA, 663 bp, Homo sapiens
aataaggaaagggcccctctcaggacatcctagagaaggaaggcagtctggcccaccatgcccccagtgcaatcctccaggtaggaacagaaccctatgtggcttcccaggtactagcactcagccctcgtcacccatcaagtcgcagattcaaggccaggagtagtttcatcttgctagggccaagctgagagctcatggaggaactatagctgccaggattgggagtcatcaggatgtagtgtgaatagagatgtcatggggtatttagaggactttagcagtgatgttagtctagccctgctacccttcttgggttgggctgtatgtgggaaacttaccccagctaccacgcctggagagcttggctctgagtacggccagaagctccattggctcccaacgccaggcactgctgcctcttggtcctgctgcctctgctctcctgacccctccccagtcacttcattttctctgttgttcccttgaacacacagaagctgttgacgaattcttttttttgctgtgccaaggcaggtcaaaagcagatcagtggataagagcaagttgtcccaaggagccagctgtcttcctccctcttttgacctccactggacacagcctgattaatttactttggttaacaaaaacacaacaaaaaag

SEQ ID NO: 641419 - DNA, 1135 bp, Homo sapiens
gaccaggtccaaagcccccgagcaggcccaagtggtgcgagaagattccagctgaggctggttgcaaggatgatgcctgtcctgactcttccccgaacagcgtcccagaaacccctggacgatgctcgtctgacattcactgtctgcgtgttcaggtgcaatggacgatcagagaggccagtcctccacccgagtttatgtgtccagactcacttcatgtccaccccacataaagagtgccatcagagcgattccgggcaaatggaggtgtcgtcaatgaacgaacgaacgtcgcggaagcatcagtcctgtcaccctgtagtagccaaccaggtacaaaagtacccgactttccatggacctgcccgggagtccacgcctcaagggtaatggtaaggttcgctcaatgactagtgtgtgcggcctgtaactaaggaagccacttatcctgtctgtgatgtacgaagaacggtgctgactgtgtgatcgcccctgactcacgcgatgcagtctcgaggtcagtgctcctgtgggaccaggctggtggaccaagtgagttgtgtaccaattcagtgcttactaaccaagtgggatacgtgagatagaggcacatcagtagcatcagcctaatggaactggaggacttggatgagtctgtggcatgtggccctgagtccccagacccttgttgcatctgagggccaccagacgccttggaggctacccattcgggattgactatggcgtgggaacgccagaattcactagccggtggccacttgccacaaaatttcgcttcagacgggtaagcagtcgtattggcccttccctgtatggagaggacactcttgcattcattgggaggaacaccattcaggcgaggcatagggctggcatcccatgtccggccatagaaccgggccccccttggggacattaccggttagaaagcccgttggcctcaggccattccacgccctattgtatagccatgccctgggagtgccaaggcacagcttaggggacttaaagtatgaaggcccccgaagcgcctagggggttgggcatggatccctggtcccgttggggcaacaaatcgcttgagcaacggggaagggaactttgtaaaacaaaa

SEQ ID NO: 641420 - DNA, 131 bp, Homo sapiens
cccaccaccaacagagcaatacattttagtatgatatttcaatactccactttctgttatacaacaagagagaatattatgtaacggaaacagaagactagaaggcagtagaaaaacaattatctttaata

SEQ ID NO: 641421 - DNA, 252 bp, Homo sapiens
tatctcaggatcttagtcgctcggacgatgcgggacttgggataaaagtgagcctcggtggggcaggtgaagggcaggtagtggtaggtatcctggggctcccgggtgaagaacctgtcccgtggggtacaagagctcgtctatgaatgctgagagcgcgcggttaagtggccctgcataatcagcattcgttgcgccggtcgttcccagcagggagtcgatgcggtggtccgagcggaccgggtaccgagc

SEQ ID NO: 641422 - DNA, 886 bp, Homo sapiens
aagctatgttgtgaacggtgtcagcacggctggtgcacctatcgtgacatcctcgttacgccatatttactcctgatggtcgctgcccgatgcgcgacgctatgcgagactggcatcttgtagcacatatcagcgtcttgtccgtccggaattcccggttgcctctcgcgcggttgggtgttataaaacacaggccccgcatgttatttgccttcgcttttggctgtattgtctgcccacaaaatgttatggcgccgcacaatggggctttgccccgcccacgccctaatggtgctcatgtgtggtgcaccttaaaacggtcgcccccccccgaaaacccccggttgttcccgtcccgtgtgtttttgagaaggccccgtcccccaaagaaaggaaaaaaataattggggcgccgggtcccccaaagccggttaccgggtaaaccggaagggtcctaatgacgcccgcccccccggaaaaaaaaatggaattgggcgccaggtctaccacaaagcccaaggaccgggggacccccgaaagggtcccgggtcctaccaccaaaaaaacctggaatctgggtacaccgaaaggaatcccatagcgcttttattcccagcgtattaaaacttaggatataaatattctgttcgtgtgtaatacaaaaaagagaagggtctggtaacctgtttgtgtaaaaattcctatgaggggagtatttaatcaccaattaagtgaccggaagtcgtaccaagttaccaaaacccggggtgaatttttgagattaagcgcttttactgagaccaaagggggttctgtctccacgccagggtaatttaaaatttttccttgagaaaaaccaaaggcccacccgtttggtccaaaaaaa

SEQ ID NO: 641423 - DNA, 137 bp, Homo sapiens
tagaggatccccctgcgcggaactaccgcgcactgagagcgcaagggtgacgatacgcaaaaccattgacacgatcatcgcgacgcgggtgcatcgaggacgacctgcctttgctttacagcgatcgggatttcgat

SEQ ID NO: 641424 - DNA, 384 bp, Homo sapiens
  misc_feature (200)..(200): n is a, c, g, or t
ctaggggctccattgtgaactaaaacattgataactaacctgaacaacagtatacaaggcatattgacatttgagagagacatacagcgaggcatacagtaatcacaggtgttgaattgggaaagctagcacaacaacagtaggtaaaagtgcgttgactaggcaacggggccgacagataaaacaaacaagcagaatgnagtaccgtgattaatggacagtccagcgtgcatcagctatgtagccaagagatcagtgtccagggggcagcggtggatggggcagggaagctggactggcgagtgtcatccaggttaaaaaaaactaacaataactaaatagcttgtagctagttagctggtgtcgacgcggccgcgaatttag

SEQ ID NO: 641425 - DNA, 278 bp, Homo sapiens
  misc_feature (79)..(79): n is a, c, g, or t
gaggatccttttgtcatcctaaccaggcacagccctaggtagcaggtagacacacactctaaaaccaggcacagccctngggagcaggtagacacacactctaaaaccaggcacagcccttgggagcaggtagagacacactctaaaaccaggcacagcccttgggtgcaggtagacacacactctaaaaccaggcacagcccttgggggcatgttgacacacactctaaaaccaggcacagcccttgggggccaggtagacacaacactcttaaaac

SEQ ID NO: 641426 - DNA, 331 bp, Homo sapiens
cctctaggcatcatttttaaaaaggtatgttatactgatgcggtggctcacgcttgtgatcccagcactttgggaggttgaggcaggaggattctttcagcccaggagtctgagactggcctgggcaatgtagcaagaccctatctccaaaaaaaaatcatttttttttaattagctgggcatggtggcatgtgcctgtagtgctagctatttgggaggctgagatggaaggatccctgaagcccaggagttcaaggttacagtgaggttactgattgcgccactgcactccagcctgggagacagagggagacccaaccctgtctcaaaa

SEQ ID NO: 641427 - DNA, 169 bp, Homo sapiens
agtgtgacgatataggtgttctccatctattatcctcttcctcatcctcttcacggctccccatctgtttgctgttccagttcctctttgtgttatcatttcaaacagtcatttccatttccactactgtgctgggatcgatcatcttccctcctgtcactgtccgtgt

SEQ ID NO: 641428 - DNA, 444 bp, Homo sapiens
gtgtccccacccacatctcatcttaaaacccagtgggaggtaattgaatcatgggggcaagtctttcctgtgctgttcttgtgatagtgaataagtctcatgagatctgatggtttttaaaagagttctggctgggcatggtggtgggcacctgtaatccaaactactagggaggctgaggcagagtgaattgcttgaacctgggagaaggaggttgcagtgagccgagattgcactgctgcactccagcctgggcaaaattgaagacttggtctccaaaaaaaaaaaaaaggagttcctctgcataagcgctctctctttgcctgctgccatccatgtaagatgtgacttgttcttccttgccctcactatgattgtgagtctttccccagccacgtggaactgtaagtccaaataaacctctttcttttgtaaaaaaaaaaa

SEQ ID NO: 641429 - DNA, 764 bp, Homo sapiens
ggagctgccatgagcctctgggtggacaagtatcggccctgctccttgggacggctggactatcacaaggagcaggcgggccagatgcggaacctggtgcagtgtggtgactttcctcatctgtaaagtgtacggaccatcaggtgctggaataaaagacaagaattatgtgtattctacgtgaactttatggtgttggagtgggaaaattgagaattgaacatcagaccatcacaactccatctaaaaaaaaaattgaaattagcaccattggcgagtaactaccacggttgaagttaatcctagtgatgctggaaatagtgaccgagtagtcattcaggagatgtggaagatctgtggcccaatcacaatcaacttgaaacaaattctcaaagggatgttaacatgtggtatgatggacagaagttgaacaaatcggccaaagatggctcagtatgccttgctgaagaaccatggaacaagtttatgtctacctgcagatggatctcgtgctgcaaatctacgtctaaagtgatcccacctattcgtagtaccgtgctgggcggcacgtggtgcctgctcccaggcattgacagatatttggcacgtgttatctaactgtgtgtacgaaggacaggtctggaatcttccttcacaagtgggtcattagagtggcagagaaagtcttgggagagatctcagaaaaggccctgattatgtgtgaagcctgagagtggaacatatcctttgaatgagatccagaa

SEQ ID NO: 641430 - DNA, 1063 bp, Homo sapiens
tggtggccggcgtggcgctagggactagggggtgtagagggtgcctgaggaggtgctgcataggactgtagggccctggagcgcttgagcgccttcgtcttcccgggcgagctgctgctgcgtctgctgcggatgatcatcttgccgctggtggtgtgcagcttgatctggctggcgccgacagcctggaccccggcgcgctcggccgtctgggcagcctagggcgctgatctttattcctcggtcaccacgctgctaggcgtacggcgctcggagtagggcttaggcggctggctcttgcagcctgggctgccgcctccgcgcgccatcaacgccatccgttgggagccagcgggacagttgccgacaaatgcccccaggcaaggaggatgctcgactacagttcctggatcttgcgagcaaatatcttcccttccaacctggtgtcagcagcctttcgctcatactctaccagctattgacgagaggaatatcaccggaaccagggtgaaggtgcccgtggaggcaggaggtggaggggactgaacatccttgggctaaggaaagtgaatgccatcgtactaagcatgatggccgctgcggaagcctgggggcctgaatggggacgctgcatcaatcacgctactacaactccttaaatgaggccgagcaatggtgacaggatacatcacatggaattcaatgatacaagccccatggaggaacaataattgtacctatgatagactggtcaaaatacatgacaataggaaggaatgttggatattaactcctatatgacccgcttagtgccagataacatacttgtagcatgcctggaaggggtctcaggcgccaattccaatgtggcatccaatggtaagatggcgcccttaaatcaaactattctttatacaacgggaaataaacccgaaacggggttactagagggggacaatgtgtgacgccgtacttcactatgtaattgagaaacccataacaataacgcacagtacgcacttaagataacatgcgtggtgaaacaaacaattgtaggaaaaac

SEQ ID NO: 641431 - DNA, 324 bp, Homo sapiens
gaaattaaaaatttttgacccccggggggaaaaaccccaggcctggggtttggttattaaagaaaaatttttcccccaatttctaatccccgggtggaggatggccgtgtaccctaaacggggggtttttttttcctcccaaaccgccgaagggcctccttaaaggtttttttttgggggaaaaactggtttccttttaaccgagaaaaaagggccgaaaaaaagggggggcccttaaaaacaaagaaaaccaaaaaaaccccccggggctggtttttttttttcctgtgggggccggtaaaaaaaagggtttttttttgttga

SEQ ID NO: 641432 - DNA, 96 bp, Homo sapiens
catgggtttgctggtgcagtacaactaggcttaatagggactcgaattcgagcctcgaattcgagctcgaattcgagccgcaagggaaaaaaaaaa

SEQ ID NO: 641433 - DNA, 336 bp, Homo sapiens
gtttgtttgtttggttttttgtttgtttttaaccgaactagtcttatcagtgaagcaaccgggccagtggctcacacctgtaatcccagcactttgggaggccaaggcaggtggatcacaaggtcaggaaatcgagaccatcttgttgaacacggtgaaaaccctgtctctactaaaaatacaaaaaattaatcggacatggtggcacacgcttgtaatcccagctatttggaagcctgaggcagaagaattgtttgaacccgggaggcggaagttgcagtgagccaagattgcaccactgcactccagcctggtcaacagagcaagactccatca

SEQ ID NO: 641434 - DNA, 358 bp, Homo sapiens
  misc_feature (349)..(349): n is a, c, g, or t
cagaagaggacatattatgactttggctacatttagaataacagcaaattgtagtgcttctcctctttatacagccttacatatcacactgaatgctaaacattagatccttttgaatctcctattacttctcacaatataatttttccttttgtcatagcgttttcccttatgtattatctagcaaattctgttagagttttaaataagaaaatagattaaattctaaaagaatccataaaaatgaggggctcttggtctgggttagtgatgttggaaatggaacctgaacttgaactcttttgccatgagagacttgtcgtgtttccctttgtggtccttgattatnagcgtttgt

SEQ ID NO: 641435 - DNA, 560 bp, Homo sapiens
gaaactaataaacatgaaatgaggagaggcattactcagatgtgctttagcaaggggtggggtttagcatatgctcccccacaatatggcagcatggcatttgagaaaacagcagaagcagcaaagtcactctcatcttcccctcctttcttctccccaaagcaggtcgtaagacctagctgcccttcctctaaaggaggtcataagactttaattccagagataccctccctacacccagaggaaaggaacaaccttatcctcaaagacacagagatgccaagaagaatctgaacaggacttgcaaagtgcccttcagtttagataatacctccttggttcaatcatacttttgcacaattgtctactcttcatcaaacttgtcagaaaaatacatagaatttcctgttcctttgggtctttatttctgaagggtcctgtgtcatatcaaacttatactaaataaatgtgcatgcttttttcttgttaatatatcttttgttattgggatctcagccatgagcttagcaataggtgaggaaagacatcttctctattat

SEQ ID NO: 641436 - DNA, 1485 bp, Homo sapiens
  misc_feature (984)..(984): n is a, c, g, or t
  misc_feature (1037)..(1037): n is a, c, g, or t
  misc_feature (1086)..(1086): n is a, c, g, or t
  misc_feature (1138)..(1138): n is a, c, g, or t
  misc_feature (1231)..(1231): n is a, c, g, or t
tattgttctcccccgctcccccctacaagaaaaaaagtagggtgcgccaataagaggcacatcagcacaccccccgagagaggttttggcgccacacagggagaaaaataagtagggggaggatgaatatactgtgctcgtccgccagcgtccggcgcaacaaaaaaagagagggctctccccccttgcgaagagacgccttgtgggaccacagccactgctcctcccgggtgagatagaaggattggcctacccgtctcaggaatacgccacacatgctgggaagagtgcggcccaccacacccgggggaagaagcttaggaaaacacccccgctgtccaaaaacccacaggaaaatgggctaaagtgccttctccaatccacccaccccacaggaaaggttcgcaaacaaatgggtttcgagggaagacttttgtggttgggttggattccttgggaagatgtgttttccggctgggggaaatgaacaaactttccggtttcttgggagagaaaaacttacccagcgggttccctcggtgggcctttgggttggccacaccccctgggtggttggttgggaaaaaggtggccccaattgggggattggcttataaatgggatatttggttaataagataggaaccgccaatattttggaagttgcgttggaagactcacccaataagatatttttgggggaatttcacacacaccaatcacacaggtcgtgtcccaaatagttttgggggacaccccatggaaaagggggaaggagaaaattttttgggagagcgccaagaaaaggctttctttgggccccccctatattgcgcccgggtgagagagcgcgcacaaataacccttttcgcgcaatacccactccggagaacccccacacagggtggcccctatattgcgccggggtgtctccacagcacgggccacgccacgctatggcttatatggggccacagcgtgggncacagagaaagagattgtctaacatatatgggggagaacccacacaaggcttntatagctcacagcgagagagaggagagagagccccacagagagagaagntgagcacacgggggagaagcctaccacagcggttacacacaccacagagatnttgtgtgagaaacctcacagccacaagcaacacacagttggtgggacacaggggccctatagctggcgtaccacacaagagaagaacacatgntttgtatagagcacagaatatactacacatgtgttatatggcgccacaaaaactcgagaggagcctgtatttgtgagctaaattggataaccacggttattttaagtgtttctgtttctgtggagaaagtgtaaaagcacttcccacaccaaagggttttaaatgtaagagtttttttttttgcacccccactgctgttgagttgctaaatgtaacagtctgatcgtgacgcctgaataaatgtctttttttta

SEQ ID NO: 641437 - DNA, 216 bp, Homo sapiens
  misc_feature (46)..(46): n is a, c, g, or t
  misc_feature (78)..(78): n is a, c, g, or t
  misc_feature (184)..(184): n is a, c, g, or t
  misc_feature (189)..(189): n is a, c, g, or t
cccgcgcccggagctggcgccaggcccaggttagatctgcaatttntccagcggttcctgcagatactgaaggttttntttccttcttggtcatcacaaaatgcctcgatgttcctgacccttttgtgcctgaccctactggctgaagagctttgatcagttcacctgcaacctgctgtatgtnagctngaggaaggacctcactgagcaccttca

SEQ ID NO: 641438 - DNA, 211 bp, Homo sapiens
gcctatgtacgacatggcccaaaacccgcttctaggagctgcattctgccaagggaacctgtgctcggggaaccaaacctcagccccaatgcgtcttggctcaggattgcagcgcgagcctggtagtcgcctagccctaggctccacataaaaggccaaggaggctctgggctgactctggatccgagggcactgctgcttcgctgcacaa

SEQ ID NO: 641439 - DNA, 217 bp, Homo sapiens
  misc_feature (38)..(39): n is a, c, g, or t
ccgatcgtcttcttgaccacttcaggctctctgtatcnnctcccaactagaccttaacttttttacctccaggtccatctctgcaccaccctattttagcaagaatcctgctgttaaataaaatgtatgagaggctactgttctggactgagcttctgcaataggcccccacaggccagaacagagtcatctgtgctaggtgccacgtaattgaact

SEQ ID NO: 641440 - DNA, 297 bp, Homo sapiens
taaacagtgatggtgtcactagaagcgtaggacgtgttgacagtgtgagagtcgcttgtactttaggcataagccatatagaaattttgccattctgttttccattacttataggtgatatacaggaaaactccgtttgttattcctcagtgaatagtgagcttttcatgcatcaattgtcaatcagattattctaggtttccgtacataatttttgagcctcttgcaaacggttaaccattaagcatactttctgcagtaggttgattggatttttttctgaggtacagaccgtcg

SEQ ID NO: 641441 - DNA, 129 bp, Homo sapiens
ggtttgggtccaggaccatgatcggagaaactgtgaagaaattttttgattctgccgacctcgaaccgatcgcaataggtagatttttcatattaaaatataaaatctacctaaaaaaaaaatattttt

SEQ ID NO: 641442 - DNA, 890 bp, Homo sapiens
aagacaatcaggctaggtcgaggcccgggtgtttaatcggccgaagggagctagagctgccatcgtggaccggatgacagatacgagggatatgcactttgctcataagaggggcttcgctggcagtctgaacggcaagcattgaagtcaggacccttcattaagatcctcaattggctggagggcagatcctcgacgagatagggacaacgcggtaaaaatattgcttcggtgggatgacgcaggatacagctgcccaaggggcgttcgtaaacaggagaatgccgaagacgatgggaaaaatgggagcggatggcggaagacggggatgagctcaggacagagccagaggccaagaagagataagacggccgcaaagaaaaatgacaaagaggcaagcaggagagggcccagacacctgatatagagagacccccacaaggatcaagaaaaaacatcacacacaagatggcaaacacgtgacacacatcaagaatctgatctagagaatagtggatggagctacgagccatggaataaggaaggaaaggcatagatatgggtaaagggaagaagccccaagaatattactagtgcacctatcaaagaagacacagaaattgttcagacgaaccaaacataccagactgaacttaccggagcatgctgaaacaatctctcatacaatactggtcagaatacctcgggacaaagaaggagacaagggaggtgaggccagataaccagacagaagccgagacaaagaactaaagaaaaagcaagggagatgaacaggaagccgggtgaaggaagcaaagaaagaaaggaagaaagaaaaactaaagacaaaagaaacgaacaaggagaaacaaaaacgaagcgaacaacat

SEQ ID NO: 641443 - DNA, 102 bp, Homo sapiens
tcgggagctgtactaccatatgctctgagtgacccatgttccttttgaaatcctcctgtcatccccccctttattctgtacgtcccaggatcatattccaac

SEQ ID NO: 641444 - DNA, 795 bp, Homo sapiens
  misc_feature (58)..(58): n is a, c, g, or t
  misc_feature (72)..(72): n is a, c, g, or t
  misc_feature (107)..(107): n is a, c, g, or t
  misc_feature (113)..(113): n is a, c, g, or t
  misc_feature (147)..(148): n is a, c, g, or t
  misc_feature (167)..(167): n is a, c, g, or t
  misc_feature (171)..(172): n is a, c, g, or t
  misc_feature (174)..(174): n is a, c, g, or t
  misc_feature (204)..(205): n is a, c, g, or t
  misc_feature (335)..(336): n is a, c, g, or t
  misc_feature (373)..(374): n is a, c, g, or t
  misc_feature (427)..(427): n is a, c, g, or t
  misc_feature (482)..(482): n is a, c, g, or t
  misc_feature (586)..(586): n is a, c, g, or t
  misc_feature (646)..(646): n is a, c, g, or t
  misc_feature (668)..(668): n is a, c, g, or t
taacgggcatcgagtcctgcagtcggagtgccggctggcttggcgtgcgctcgctccncgaagccggggctnggccggagccgggcgaggtgctgggagctgggccngtgtcngggacagcgggcgaggggcagctgcctggagccnnggcagccaggccgctcagngcanngngacagctggcgccggttctgcgtgtctccnngggcccagatgtgaggcggctggctccccctgtgcccgagagcgcactgatgggggccccgctcgccgtagcgctggtgcgccctccactacctggcacttttccttgcaactcgtgcggcgccacgcgnnccgccggccacgcgccctgggacaaccactgtctccnngccacgccctgttcacagagacaccccatgacatgacagcacggacgggcgangacgtggagatggcctgctccttccgcggcagcggctccccctcctactcgctgnagatccagtggtggtatgtacggagccaccgggactggaccgacaagcaggcgtgggcctcgaaccagctaaaagcatctcagcaggaagacgcagggaaggangcaaccaaaataagtgtggtcaaggtggtgggcagcaacatctcccacaagctgcgcctntcccgggtgaagcccacggacnaaggcacctacgagtgccgcgtcatcgacttcagcgacggcaaggcccggcaccacaaggtcaagggctacctgcgtgtgcaggccagggtgagaactcccgtcctgcatctgccccgaaggccaca

SEQ ID NO: 641445 - DNA, 820 bp, Homo sapiens
gtccccacatgaaatgtttagatctagtatactaatgcttcgtacctctttccgttctcttataacagttgacagccgacagcagctcaatcagtattgtatcagtctgtcttcgaaatccgcgacgttatccattcagcctgtgagtcatctatacactcctgagtgtagtgttatcctagtcagcatggctttgagactgcaaggcgacgatgacttcactattgcttagaccgcctagtagtgactaccacttaccctctagatcatcagcgactgaatgtaacttcatcagcgaagcaaccactgagagctcgctgaaacgatgtctacaactcacatcatcactcgcccagagaactgagtccaatagctccatggaggccaagcaaggtgtgaagtaatgacgtacgtcgttacatcgaagttatgacattgaaataagtaagaggaataccgtctttttacggacgtccgactgtaggtgacgtacccataggatgccccgagtgtcggaaaggcacccctagtcgcatggaggtcatgatagatacgtttgcccgcagcaaactcgtgtaaaaacgtgaggaccggggtaactgagtttatagataccgtcctcacgtctcattctcagaacccctgaagcaacagaacagcagtagtgctagtccactatgccatagataacgaatcccctttatggagttcataatttataagcgaaggctccaatctgtctcttaagaccaaacaagtacctgaaaaatcggcttcatagacatagtcttcaatcaggccagaataaagccctcgtgta

SEQ ID NO: 641446 - DNA, 152 bp, Homo sapiens
ttgctgggggtggatctagaggatccctaatgtggatggggacaggatgagacagagacagaactttggagagttctcaaattagagtctgtgaaaggctgtgaagcaaaacgggaaggtgaacatgaaagggatctagaaaagcacttccc

SEQ ID NO: 641447 - DNA, 654 bp, Homo sapiens
agcggggtcgggctggagcgcctgaagccgcgactgccgcctcagccgccctcagccgcggtcgccgccgacttcggctgacttagggctccgcccgccgcctcctcaccctgcctccgccactgacaccctgcccggacctcccctgagcactcatcacgcgacaggccctgagtgcctcagacctgtccgtggcagtggcagaacttcacacttgcaaaggtcaatattcgtatacatgcactttataaatatagtggaaaggggtataaactctatgaattcgaaggtttcctattggcggcaaattggccctaagcagaaggacgaaagaaatgctcactccgaacgattggggatacccgggaaattgggccccaggagttgagtcaaccaccttcagcgggaaaacaaaagcgacgggcacgatgggacaggcgcacaatgaggcgagaaccacacacgggcaccaggggaaagcaaggaggaggaacacaagacgcccagagggcacccgatcatacggagtattaaagccaaagataccaggggtaggaacgcaggaccagggacgcgcagtagcccgcacggacaagaagagcaccacacacgacactgcacaagcgagtaccaacacaaggcacagcgcaccat

SEQ ID NO: 641448 - DNA, 118 bp, Homo sapiens
agttggcggtgagctggtcagctgggtatcattagtgaggctgaccagagccggttgacttctctgctagaagagaccttgaacaagttcaattttgccaggaacagtacggcgccca

SEQ ID NO: 641449 - DNA, 314 bp, Homo sapiens
cctggtacccaagctctcacacaccaacacaagcttttctttcctctgtctctttcccttagccctatgaagactcctcggtatctattaagaagtaatagtaaagtaaaataaataagtactcttttgaatccacccttgttctttattcctttttcccaacttcaaaataagaagcctgcgctcaccatttctatgtcctcattcccgttttcaatctagcctctgattctgccacaggactgtaactgacaaatccagtcctttgtattctctcactgtgagcagcgttgggggatcctcagatcacctcg

SEQ ID NO: 641450 - DNA, 171 bp, Homo sapiens
ctctctcctgatgctaggtcggggcccaccctgctccctgttcctgctagggcctgccaggtgcccctgagcttgctttccacattctcccaggggtatggagacctagacctgtctttggggccatgagcatctgggttatagcagagagtgggagcatgaactctggct

SEQ ID NO: 641451 - DNA, 195 bp, Homo sapiens
ggccccggggtgggggccccccccaaaccccccaagggggggggttggggaattttttggggtgggggccccaaggtgtttttggggggggcccccccccggagggtttggggccccccccccccccccccccccgggggtttttttttttggttccttggggtttccccttttttttaggggggggggggggga

SEQ ID NO: 641452 - DNA, 364 bp, Homo sapiens
tgtgtgctacatctggcacaattctatatcacaatacttcccactttagaaacgcagggtacactattctgcattatcaaacgtgtcgagggaactatagaccttaaaataactgacacattttattaaaggaactgcaaactctgctcattaatgcctgtcttggatgtggcctttgagattcatagcctcttttaaggaaacagggttgacacactttgattggtcccaggctttgaggcaatgctagatgtaatagcatcatctttcaatctgaggaaaatgtttctttaaaaaaacctgtctttcaaaatacaacaaaaaacaagggctgggtaatcggcgaattcttgcatggcactcc

SEQ ID NO: 641453 - DNA, 118 bp, Homo sapiens
tcgccggttctaggaataatgggggaagtatgtaggagttgaagattagcccgccatcatcctagtcctcatcgccctcccttccctacgcatcctttacataacagacgaggtcaac

SEQ ID NO: 641454 - DNA, 1010 bp, Homo sapiens
cgcggtggctcacgcctgtaatcccagcagtttgggaggccgaggcgggcggatcacaaggtcaggagattgagaccatcctggctaacatggtgaaaccctgtctctaataaaaatacaaaaaaatttagccaggcgtggtggtgggcgcctgtagtcccagctacttgggaggctgaggcaggaggatggtgtgaacccgggaggcagagtttgcagtgagctgaaatcacgccactgcactccagcccaggcgagagagcgagactccatctcaaaaaaaaaaaaacaatttttttttttaaaggaattacttaaaatgcgggcgggggggggggggctcacaccggtaatcccagcacttgggggaggccgaggtggggcagatcacgaggtcgggagatcgagaccatccgggctaccagggggaaacccggtctctactaaaattacaaaagaaatttaagccggggcgtggtgggcggggcacgcctggatagctcccaggcatactccggagagggctaagggcagggacgaatggggggtgaacccgggagagggcggagacgctggaagtggacgccaggagatcggggccaaaggaaattcacaggctgggggccgaccagaagcagagaactccggagcctacacaacaaaaacaagcaaaacagacagacgaaagacaaacatatttggtgcgccaccacatcgagggcccctgagaagaagagttgtacagaacacacaagacgtaatggggggcaggcggcgccccacggaaggggtggtagagaagacacgggggcaaaagagtgtgctaaccaagaaagaaaaccgtggggcaacaaaacaacggggcgggaagagtttcccaccaaaaatataaaaacccgccgggggaaaaccgcaagcggttgtgtgacaaaaaccacaaagtaggaagcgaaggagaccaaacggggagcttcaacaaggggagaccccacagagaggcgggaaataat

SEQ ID NO: 641455 - DNA, 896 bp, Homo sapiens
  misc_feature (121)..(121): n is a, c, g, or t
  misc_feature (128)..(128): n is a, c, g, or t
  misc_feature (166)..(166): n is a, c, g, or t
  misc_feature (172)..(172): n is a, c, g, or t
  misc_feature (174)..(174): n is a, c, g, or t
  misc_feature (176)..(176): n is a, c, g, or t
  misc_feature (195)..(195): n is a, c, g, or t
  misc_feature (207)..(207): n is a, c, g, or t
gcctgaagctagtgagtcgcggcgccgcgcactggtggttgggtcagtgccgcgcgccgatcggtcgttaccgcgaggcgctggtggccttcaggctggacggcgcgggtcagccctggtncgccggnttctgggtctttgaacagccgcgatgtcggatcttcanccccancnanccagatccggcctaaccanttgtggccgtgntacggatgaagcgtgccgggaagcgcttcgaaatcgcctggtacaaaaaacaagggtcgtcggctggcggagcggcgtggaaaaagacctcgatgaagttcttggagacccactcagtgtctgtaaagtgtttctaaacggtcaggttgccaaaaaggaagatctcatcagtgcgtttggaaacagatgaccagaactgaaatctgtaacgcagatttagactaaaggagaagttcaagtatcagatacaagaaagacacacacaagttggagcagatgtaagggacagttgcaactattggtgggcaggacaaatgtgtgaatcctgaaaacaaaggagaccatacagcgtgatccttattgagaagagtcatgaaaggacatccactattcgcgtgaataccaaacaaagaagtacaacagaaagcgaggctgtggcaagttgaatagaggcaggtttaaacgacgaacattgccgatagaaacgtgctcacgatttaagcgtgtcggggtcaaaccttccggtccaaggaagggcaaaaagcgtgagaccaaaggttcaggccatggatcagggccacacaaagtgcacatatttgccccacgttataaatctatttttttttacccggcagttccgcagaaaaggagcgcaaaaaagcgagaacagggaagcgtttgggagaccc

SEQ ID NO: 641456 - DNA, 312 bp, Homo sapiens
  misc_feature (121)..(121): n is a, c, g, or t
  misc_feature (128)..(128): n is a, c, g, or t
  misc_feature (166)..(166): n is a, c, g, or t
  misc_feature (172)..(172): n is a, c, g, or t
  misc_feature (174)..(174): n is a, c, g, or t
  misc_feature (176)..(176): n is a, c, g, or t
  misc_feature (195)..(195): n is a, c, g, or t
  misc_feature (207)..(207): n is a, c, g, or t
gcctgaagctagtgagtcgcggcgccgcgcactggtggttgggtcagtgccgcgcgccgatcggtcgttaccgcgaggcgctggtggccttcaggctggacggcgcgggtcagccctggtncgccggnttctgggtctttgaacagccgcgatgtcggatcttcanccccancnanccagatccggcctaaccanttgtggccgtgntacggatgaagcgtgccgggaagcgcttcgaaatcgccttctataaaaccaaggtctgcgtctgcggagagctgtgtcaggtgcacaaaaagagagactcatcat

SEQ ID NO: 641457 - DNA, 158 bp, Homo sapiens
caggaaacagcttataccaacttacatgcatgtgcatgccaagtgcgtacacacacacacacagcacacacacacacacacccctacctctcatcctgccctgcaggagaagtcatcccgattctactgatgctagttttctaaatttcttgtcagat

SEQ ID NO: 641458 - DNA, 321 bp, Homo sapiens
ctgtgtgtagcacaataaggaagggtcccaggttggtgagagccccaagttgcgaacaataatgaacaattattgtatgaacaattgttagaaacagctaatcacaaacaacctgcgggcacaatgacctcattccacacgtagcacccttcagcaggaccctataaaactttcctccagcccttgcctctttgcaggtagccccttctctgctgagctgcccactgcaacatattttcacaatttctctaataaatctgcccttctttacctacaactatcttggtaaatggctttaccacctgcaaaactgaccctagg

SEQ ID NO: 641459 - DNA, 792 bp, Homo sapiens
ggaaaacaggcttacgacgagatgatgtgattatattcaaggtcacatagaggggtcggtgacagaggcagtgctcaagcccaggtctcctgacctgcagcttacacggccgtgctgactcagtaaatgatggcgtgcttcagcaggaagcccagggacagcagagccggtcgcctctcattctgtacaaaggtgtgcatatggcattggtggggtccccaaccagatagcctccagacgccacagccttattacctgcagcttttcctgcttgatatagcacagatccctgccgaccaggtgtcaacttgttctgtatgggggaaaagtgtctgggagcggctgctgaccctgtggcatgggttcttcatcaacaggagccagaggaccaggggtctggacggcctcatgccttgggtgctgggctgaaccaccacttcatcgacctggactacttacttcctgatggttccatgccccccttacacacagaccatgagaggcctctggtacaagacatttctactgcctgttccaggccctgggccacagggatgactgtgagcagatggcgggacacatgatgggggccactgtcgcacagggctacaacgaggatcggagcccagcgagaacccacaagagtgcgagggacaactagcgacccccggggcccagacactggactaccccagaattgcaggcaaaaagtcactgggaatgcatacagacaccatgaaagcccagatgcgaaggccacgaacaaggacaaaaacaaccgaatacagacaa

SEQ ID NO: 641460 - DNA, 239 bp, Homo sapiens
aagacatagttacaacaatgctacaacggacaaatgtacttttaataaggaaacatatagcagttactatccttagcgaaggctgatcaactatggttaccacaagtagagacaaactgatataaactgtaaacctgcacatgacgattatagtaagtaacttataccaaaaatgtctacactcaacccaatcatgaggcagccaatctgaccaatcctgattataggatgggacatct

SEQ ID NO: 641461 - DNA, 732 bp, Homo sapiens
caccttacaacacataagacaaattcatacctgacgtggtctacagttgctttcagaaaccactaataagaatactggttctgattgaataacttaaacgcatgttatgctttttcacgtgagctaaacactaaaactacgacttgacaacttaccttgagttacgtaaccttacaccactggtggtttacacgtgttactttaactacaactacctgtgacacgtttactcttaaacctcacttttacacaaaagtgaccttcgtggtttttacacacttctacttacggacaacaacaggtacttacacaacttgaggttacttaccacaggcctattcaacttttacttcacgacatctaacatatttggcggctaaatcctttaccacacgaactcatggtagtgggcttacgggacattaattaaaacagggccttatttatcatccacatttcaccaaccaactactatacgacgtaaaactaaactggggctattgtcacgggtaacagcccaacatgtggggacaaccgtgggttgacaccctcacccacaattacttacacgggcttacttttaacagacctacttttaacattacccttaattcaacccctaagaaacttggaccaccctttattacgagggtatctcctgggcacttgtttgtcacacggctctaggtttataaaccttgtaattatacgttttcaacaaaacttacactt

SEQ ID NO: 641462 - DNA, 330 bp, Homo sapiens
ctatgataacttctggcagaggctactgtctgtatggagttgcatactccccccatctctgggtggatctctctcagtactctggtttccccctgacaccccaaagatgtgcacgttaggttcatagtcatgtctgcaaggacccagactgagagaatgtgggtgtttgttaatgcaccctgcaacgggatgacatcctacccagggctagttcaagtctggcaccctgaatagtcgggacaggctctggccatctgtgaccctgaactggaataagtgggtaaattatcatcttattcaggtttcttaaatgtatgttaccgctcacat

SEQ ID NO: 641463 - DNA, 1253 bp, Homo sapiens
ggagcggtaacctaagctggcagtggctgtgatcctggcaccaaatctggcccgctggtgctggtgcgtgagactccatgagtgccctgtgacatgaacaagctgagtgtgagtgcgggcgtgtgctgcagtgactcgtgtgtgtgaatggtggtgccagctttgtgtgtgcgctgatgtgagttggaccctgaccactggtgagactatgtcaagtaatgcccactgctgtggtgcttggcttgcatcaccaactgacaaacgtcattgtggacccatggtgcgttttccatacgttgtgttctgtgtacattggtgtttgtgttggacggtccatccgagtacaaattgactgtagacccatggaacttcagaccagcgcctgtgatcatcaggtgtcacccaaggtggcaaggatgacaatcaaagttctgcggttgttgatagacagtgtcataggatgcccatgagaggttgacgtaaacagtgtgtgtagctagcacaaactggtggacggggacgaaaactgcacacattgggtaaagcccggcccctgcattacaaggcctaccatagtcccattggggtgtgaaaagggactggttagaacccaatggcagacgcggtcgtgtgggccactttggagacaaagatggacaccaaaaagatcaagccagtcacattctagcagccaggagataggttcgactaaaccaccaaatgaccaaatgccgcgttacctagcaagcaccgcgatcccaggtttgtgacctcaagcagaggatagaaaacaacgacaccgaatatatgtgggaggcacgccaacaaaagcaaagagaatacacatgcacgccgcaaagcatgggtggagtgaacaacgatttttttcgcccgatgaaagaagatcatttaccacgacagtggggaaacgcacagcagccccaccgggagaagagaataagagagaggagaaggcagactaaaaaaggagtgccagtacgcgcggaagaaaaacagcgacgtgaagataggtagtttttttatgggtgaggagcccgaacaggaaaaggagaagacaaaaggtgatttattatcagacccgaggagttattaaagaaagagagtggattatttaccaagcagagatttaattttagccaccgagaagaaaatgcgagttatgtaaagatgtatatagaatgaattagggggagtcgtataactagacgtggaaacgtgagtattgtttagcg

SEQ ID NO: 641464 - DNA, 257 bp, Homo sapiens
gagtcatatacacactcagtgatttcttcagcccaatacaaatagcagcaaactgctacttaaagatgaaacagttacgccaattttttttttggaagacggtagatctagagccaatcgtatctggccagtctcattttcaagcccttactggtctacttccacggtggcccataagtatccggataacaattccgggtggtcattatggtaaccatagttcaccagaatagtcaccacctggcaggtggcatagt

SEQ ID NO: 641465 - DNA, 1285 bp, Homo sapiens
ggcgcaagtaaagatggcagtgggcctgatccgtgcgcccggtcggcggggatcactgacgcttcggcgtccgggtcgctcgagcatcccgagcggcggggaggcagaccaggtgtacgtgacgggtggcctggggacggacgcctgtgagtgtctgctgcgcgtgtccataggtgtgcgccgcgtcggcactggctgagggcggggctcttgcgagggcacgtccgccgacactcccggaccacttgagtgcatgcggagcattcgtctccgtgtctcgacatcgtgcctcttgacgacacctgtgtgcagacgaagcgtcctgccagcctaggcgaggggctcaccgcgggagcaaggtgactacggtcgcgatcgatcgacatggaccgtccgccggtcgcgtacgtggcactgtgtctggtctactacctatactggctgccaagagaaaccatatcgaagtgtgcacgcggggaagagcggatggtcccaaagggggttcctgtgttgagacgtcagcgttctagtctgggcgacggcggacgcttagggacaaggctagcctccgctttccctgtcgctctgcggctttccggcttcctgaaccgtcgttggaaccactcaatcccccgacttgtgaagcgtgcttgtccccagtcctgcgtgccagtcctgtggtgacacaagagccctccgtggatgcccggggattggattggagccaggacctcagttctcccctctgtgccctgtcccctggcccttcacaagaatcgctggggcccacaagccctgcaggccggcccgcatgggacatgtcccctggagtggacgactggcgctcaacgtgggacgtaccactcagattagcgctagagtacacggaacagacatatgagatcattgggagaagacacatttaagtcgggaaagaagatataagacacacggctgccacaaccaccgcactcatcctaccactacagaaaaaagagaacaccagacaaacagggagacaaaactagcacagtataggcgcccgcaaaacacgataaagggaaggaagaaccaacaacgaggaggagaacaacaacaacgaaggagtcaacaacaggagagcccagagcatgcgcatcccgactcgacacgactaaaaggagaacgcgaaagcaaacagacacggcagcaagagaagacaaaccacagaacggaacagcgaactactcacacgacaccacacacaccgcagaaagaaacaagacaaaacacgaagcaacaaaaa

SEQ ID NO: 641466 - DNA, 454 bp, Homo sapiens
tgtgtgaaccccaacaccggaaattatccaggaagcccccaccatcgggggggaccccaagtgtctttttttttacaattaacagcagaaggctcgcggggtgcacacccaacggatacagtagaccgcaaccaaccggtgcttggggcccttgccccccgccccttttcaaacaccggcaaaaaacgaaaagtgcttgggtggtgggtgctggaggattttccagttttgacacacgtatttatatttggaaaaaaaccagccccgagctgggcccctccccggcctttttttttccagatgcaaatgccacacctgctccttttttctttccccggggaaggaagggggttgtggtcggggaactggggtacaggtttggggagggggaaaaaaaattttttttttttaacccctgtgtcccttttgcataaaattaaagaaaggaaaagta

SEQ ID NO: 641467 - DNA, 228 bp, Homo sapiens
aaagtaagtgcccttccattgcgggcctcctcatattgtacttgtttcctgccaaatctgggggatcatttgtatttccccccctgaaaaatatggctctgtactaaaaaaaggctctcaattctgtggggtctccttagtatgtatgtgacttttcatgttgcaatatcacacgatgggatggcccgacttttgctcttaataaataatctgaatgagtaagaaaaa

SEQ ID NO: 641468 - DNA, 376 bp, Homo sapiens
  misc_feature (1)..(1): n is a, c, g, or t
  misc_feature (18)..(18): n is a, c, g, or t
  misc_feature (27)..(31): n is a, c, g, or t
  misc_feature (33)..(33): n is a, c, g, or t
  misc_feature (36)..(36): n is a, c, g, or t
  misc_feature (42)..(42): n is a, c, g, or t
  misc_feature (45)..(45): n is a, c, g, or t
  misc_feature (51)..(51): n is a, c, g, or t
  misc_feature (55)..(55): n is a, c, g, or t
  misc_feature (59)..(59): n is a, c, g, or t
  misc_feature (62)..(62): n is a, c, g, or t
  misc_feature (64)..(64): n is a, c, g, or t
  misc_feature (68)..(68): n is a, c, g, or t
  misc_feature (72)..(72): n is a, c, g, or t
  misc_feature (81)..(81): n is a, c, g, or t
  misc_feature (91)..(91): n is a, c, g, or t
  misc_feature (97)..(97): n is a, c, g, or t
  misc_feature (100)..(100): n is a, c, g, or t
  misc_feature (111)..(111): n is a, c, g, or t
  misc_feature (114)..(114): n is a, c, g, or t
  misc_feature (127)..(127): n is a, c, g, or t
  misc_feature (133)..(133): n is a, c, g, or t
  misc_feature (137)..(137): n is a, c, g, or t
  misc_feature (158)..(158): n is a, c, g, or t
  misc_feature (164)..(165): n is a, c, g, or t
  misc_feature (241)..(241): n is a, c, g, or t
  misc_feature (252)..(252): n is a, c, g, or t
  misc_feature (263)..(263): n is a, c, g, or t
  misc_feature (285)..(285): n is a, c, g, or t
  misc_feature (293)..(293): n is a, c, g, or t
  misc_feature (295)..(295): n is a, c, g, or t
  misc_feature (297)..(297): n is a, c, g, or t
  misc_feature (301)..(301): n is a, c, g, or t
  misc_feature (303)..(304): n is a, c, g, or t
  misc_feature (306)..(307): n is a, c, g, or t
  misc_feature (309)..(309): n is a, c, g, or t
  misc_feature (311)..(311): n is a, c, g, or t
  misc_feature (314)..(314): n is a, c, g, or t
  misc_feature (374)..(374): n is a, c, g, or t
ngttgaaacttaattttnttgttaaannnnntnttntttggngtnacagcnggtntttnttntnagcntttncccagagtncctgggggtntttttnttnttgtggggggnatngggggtttggggncagggngggnggtaccatgggggcagggggncacagnncacacacacacacacacacacacacacacacacacgttcacacacacatccccccacaactacagccgccaaaatnaccagcatggngttgttacatncccccagtggggggtagaattncccatggngncntgtnanntnntncntgngagaggggggggcaggggggttaggggggggggggaggagaacatttttttttttttttntt

SEQ ID NO: 641469 - DNA, 112 bp, Homo sapiens
aatcgatttcaaagacggcacggtcgcgccgctgaagacggttttcctgcacgatccggattaaaaagtgccgttccacatcattaacgagagtaccgagcagcgttatctg

SEQ ID NO: 641470 - DNA, 400 bp, Homo sapiens
ctttccaatgtcacccttccctactttcttagatggaattacttatatttctccaaagttcttatgcaatttgatgtttccttctcttcactcttcttaaaatgtccatcacattctttatcaatttgtgaaattcccaattccagaatcaactcaaaataatcattaatcttcctcaggattctcacatgagcaaaactgaatgctgtcacttccatagttccagaacaaaatacttacatattcctgtattttagcataagactactaatttaaaaatccttttcatcctttcagtattccacaaagacagagacatggtctgtttctacattcctggaacatgtacaaaatcaataaaagtcatccgaatcactggatgagtgaatgaaacgtatta

SEQ ID NO: 641471 - DNA, 139 bp, Homo sapiens
  misc_feature (20)..(20): n is a, c, g, or t
  misc_feature (23)..(23): n is a, c, g, or t
ggggcacccccacgatgcanccnaatgtgatggaacagaaacatccatcatcctgaaaccgagcagtgatgatccgctgaggaatgtttaattttcatgtattaaaaaatgaagaatgtctgacctactgttaatgacc

SEQ ID NO: 641472 - DNA, 110 bp, Homo sapiens
gattcattcattcattcgtacatacattcattcattggctgtgccagcactgtgctgctcagggcatagattcagcagagaacagcctcctggagctctagagttcccag

SEQ ID NO: 641473 - DNA, 235 bp, Homo sapiens
catcggtgctggcccatctctagctaatataaagtacaaaattagctgggtgtggtggcatgcacctgtcctccttgctactcgggaggctgaggcaggagaattactatgaacccgggaaggcggagttctcgagcagtgaagctgagatagtgcccattgtactccagacgcgggtcgacagtattaccgctcttcgtctctaacatataccttactcctcgttattcactct

SEQ ID NO: 641474 - DNA, 1634 bp, Homo sapiens
  misc_feature (283)..(283): n is a, c, g, or t
  misc_feature (1036)..(1036): n is a, c, g, or t
cagagcacgaggtgtcgtggaaagctacccctagaaagccgaaaatgggaaaggaaaagactgcatatcaagcattcgtcgtcattggacacgatagattcgggcaagtccaccagctactggccagtctgaatctataaaatgcgagtggctagtcgacataacatgataccagttgaagaaattatgaggaacggagcgctgcatgacgtatggtgatagagggcgtccgtgtcaagcttagtgcctggagatcatatgggtagtaaaactcgacacatgncatgtagcgttagaagcggttgcgatgtcaaccagtgtgactagtacttcactctgctgagacaaattttgcatgatcctaggcgaaatgattacgtaatagatagtagctaaatcactcttgaatggcaccaccacgggaccagcaagataggtaccatttcattcgaaaatagcggtgattgtacagggtagcatatcgtccaggcctgagcctgctgcgctgtcctctgaagtccgcttagctgacgtggggtgattgcgctggacagtccttgaaacgcatgggtatactcgtcgcgaatgcatatcggaggcaagaacgcccggaagtatgccaatggcaccctgtgcaggcgtcctattaggaccaacatgggcgctgggtggaacatctacaagtggaagttggtcctggtggtttaaaactacagaaattcggcagtgttcccaacttgaagtcccatccacctatccaggcacaaagcacaagaagtcagtagtgcagggacacactgggtcgtaaacgggcatacgtttcaagacgagcctttgaccaatcttaaacgtcacagagcactatggggcgtaaacaaaccaccccagtaagctaacaaagcaaaggccaatatcaggcgtgcaccacaacatcccaccttgggcacgggcacacactgcgcagtgacaccaaagcgcactgccctgtggaacaccccacacggacggactctagaaacgacacttagcacactgnggagcgtccaacggggcgaaatggcgaacaagcgttccacccccacgcaaccagggggaatggggaacaaagtgagccatagcgagaacaacactagcgcctgaccatgtacagggcaccgaggaaagcatggacaaaccgagaacacacacagaacgcaacacgcgacacaacacatggaacaaacgaccacatattggcagcacagtgcacgacctacccagagggagagttattcacagcaccactgcgaggcggcaaacacggcgccatcgacacacagagatagggcccgacaagcgagcaaacacgggagagtcgtcaacaacccccggagacacaggcgcgagaccacccatcagacacacagaacaagaagcaagaagcgagacactaataacatagccacaagagcacacgagataacaagtcgacagtacaccccatatggagcaaaaagagggaaacagaccaagagcatcgaaaacgacacaacaagccatatgacaagtacaaataaacaacacagatataacgaagagcagaacaagaaacacacacacgaagcaaccacagaagcaagaacaagcagcagcaa

SEQ ID NO: 641475 - DNA, 546 bp, Homo sapiens
tactgggttttttgttgttgtttgtttggagacagagtttgctcttgtgcctgagctggggtgcaatggcgcaatctcagctcactgcaacctccgcctcccaggttcaagcgattctcctgcctcaccctcccgagtagctgagattacgggcgtggtggcgggcacctgtagtcccagctacttgggaggctgaggcaggagaatggcgtgaaccgaggaggcagagcttgcagtgagccaagatcgcaccactgcactccagcctgggcgacagagcaagactccatctcaaaaaaaaaaaaaaaaaaaaagaagttttttaaatttttaaggggcgggggcagagggtgggttaacactgtgtatattccaggctttggggaagggcgaggggaaacaggatttgagtagaccggttggggcaaaaatgtggttattaaaattgcaaaaataaccgggggctgggtgggtttggccccgtgtaattccaaggatattgggaagggatgggggaggagagcatctttggacctgggagaattt

SEQ ID NO: 641476 - DNA, 284 bp, Homo sapiens
ggtcccccacgtgtgtccagacaacttagccaaaccatttacccaaataaatataggcgatagaaattgaaaccgggcgcaagggatatagtaccgcaaggggaaagatgaaaaattataaccaagcataatatagcaaggactaaccccatataccttctggcataagtgaattaactagcaaataacttggcaaggcagagccacaagctaaagacccccgcaaaccatgacgcagctaccatacagaacgagctaaacagagcacaccgcgtctatgatag

SEQ ID NO: 641477 - DNA, 157 bp, Homo sapiens
tttgtaccttctggctggaagtcctagtcattccttctctgaatcttagctgtgagaagtcagtgagatcatgcatgtaaaagtgcttagcacaagtcaggacatatacatgtgccttgttgccacccaggctggtttgagagcatatgttactgca

SEQ ID NO: 641478 - DNA, 199 bp, Homo sapiens
atccagaagttgggcccccacaaggcaatggatttgctggtgccccaaagttggacttcccagcctggagaattatgagggataaaaatctgttgtttgtaagtcactcaaaaaatggaattttgttaaagctgcccaacaggattaagacatacactaaggaatgaaagacattttctacctttatgttttgttttca

SEQ ID NO: 641479 - DNA, 301 bp, Homo sapiens
atactagggctttagtgagtgtcaaaatggcttagatgttgttcatgatcctgaattccagcaaaagagctattgccaaccagtttgaagaccgccccccgtctctccccaagaggaactgaatcagcatgaaaatgcagtttcttcatctcaccatcctgtattcttcaaccagtgatcccccacctcggtcactccaactcccttaaaatacctagacctaaacggctcagacaggcagatttgaggtttccccctgtctccttattcggcagccttatgattaaacttccttctctgc

SEQ ID NO: 641480 - DNA, 580 bp, Homo sapiens
agtagtacttggtctgttaccagtgataaaccaaagaggagtatctgcagtccttctggacattttcaagcaatatctttataccacacagcagagaataagcaaaaaacaaaaacaaaattgaaaagcagtaatgcacttagttcttggccccatgtcgggcattggggagaacctgtggttggaatgtccagcctgcacaatgccattttattacccttggtgcgtgtacttacgtgacaggatatgggtctgtgcacaaagatatatcgcagctataaagggggctgggagggtcgtttttcccttggggatgctgaataaactttggtgcacctacgtatggacctcgacctgtcacataagctcaagtgtggaattttccacttgtggcatcacattggcactcaagaagtttggggattggtagcatttaagatttgggattttctgattagggatgctcaacctgtgtgcctaattattggttataaatatggaaatgcttaacacattgtacatgaagttgtctgtgcacgtaatatacttttccttatttcttaggtgatgctcaaagatc

SEQ ID NO: 641481 - DNA, 488 bp, Homo sapiens
  misc_feature (424)..(424): n is a, c, g, or t
cctatcgaatcgacggttctcgaaaagggggatgtgtcagggtcacaagacaatagtggggagagggtcagcagacaaacacgtgaacaaaggtctttgcatcatagacaatgtaaacgattaagtgctgtgcttttagatatgcatacacataaacatctcaatgctttacaaagcagtattgctgcccgcaggtcccacctccagccctaaggcggtttttccctatctcagtagatggagcatgcaatcaggttttatatggagacattccattgcccagggacgggcaggagacagatgccttcctcttgtctcaactgcaagaggcattccttcctctttttactaaatcctcctacagcacatgaccctttacgggctgtcgcggctggatggacgagtcaggtcttatcccatcccnacgaggtccatattctcagacttatcacatgggagagaaaccgttcgaattcgaaggggtaccg

SEQ ID NO: 641482 - DNA, 153 bp, Homo sapiens
  misc_feature (73)..(73): n is a, c, g, or t
  misc_feature (75)..(75): n is a, c, g, or t
  misc_feature (102)..(103): n is a, c, g, or t
catagggtgggcggtttaggagctaccagcactgaggggggcaccaaggggggcaaaccagaggcctgtgatngntaaaactggaggggggtagagcagggnncgggtctgtgggtgggggtctaaggggagcgaggtagcctttgaagttag

SEQ ID NO: 641483 - DNA, 146 bp, Homo sapiens
cacagacaacaagtcccaggtctagggcacagttgtctcattcctatgataccagtatgtagagagattgaggcaggagaatcgcttgagcttaggagttcaagatcagcctgggcaagacagtgaaacttagtctctacaaaaaa

SEQ ID NO: 641484 - DNA, 451 bp, Homo sapiens
tggcccctttccccttgggtttttccggttaggcaaaaccacccgtttcctttttccccaattttccaatattttttccccgtagggttttttttgggccggtttccttgtggttatttccccgctttggaaagggggttttttttttttggtggggtttttttttttttttttaacttggggccccccagttttaaaggttttttttttttcctggccgtttttcccccggttggctttccagttggggggggtggacccataacctgtttttttttttaaaatttaatttacccctggttgggggttcttttttttttttgggggttgcccctggccccttgtttggttcccttccccttttggggggcctttttccccccccggcctttttctttccctgggtaacttttttagtggtttaaatgggattaattgcttttttccctta

SEQ ID NO: 641485 - DNA, 1145 bp, Homo sapiens
gggcgagccgcatccggtgtccttccatgctgtggaggctctgtatgtttcgactctttctactgtcgttactcttcgggtccacactgcttttatgagctgtaacactcaccctgaaggtttgcaacttgactcctgaagccagcaatgaacacgagccccagggaggaacgaacaactccagacgcgctgccttaagagctgtaacactcaccgagaaggtctgcagcttcactcctgagccagcagaggccacgaacccacacagacaggaagaaactctgcaacacatccgaacatccgcacggcaacaaactccagacgtgccaccttaagagctgttcaacactcaccgcgagggtccgcggcttcatttttgacgtcagctgagaccaagaaccaaccacacttcgggacacaatagcaactctttcatgccaggagaagctccttcccacactttcggcgattaaccagcagccacatgggtccacaatctcctgacacagttgcagccacgggcagctgtcacacagaattcctccttttctcgcacatgcaaatctacatgatatcagcacggcgtccctggcccacagaaggaaccacgagcagggcgacaccgacgcacagtccacagggaacttcagatgcccatactgcagccgtcagacaaccaggacatgagactgcgcacccactcacgccctggagcgcaagccggcctcacagaggtgacggaaagtgcggcacgaacaaaagcgtgtggcccctccccccggcccgaaggggacccattgaaaaggggcaaagcggggacacacggacagggctgcccccagagggaaaccaaaaggcccagaaacaccacgggacggaccacgggacagcgggccaatcaggaagatataggcaggggccacagtcgagaccatgccaccgatgaggtcaaccgtgtggcgaacaaacacaccggggagaccaaccagaacctacggagtctcagcctaaaatagtatggacggaagtcaaatcaacgaagaggaggccgacacgagagcacgcgggccgacatgcgatcatcgtgtctcctgttgctgtttgttcttttcgtgcgcccacagcgcggcagcccagagagcacc

SEQ ID NO: 641486 - DNA, 493 bp, Homo sapiens
gccgctgcgtgcctgcggttggggacccatgtgcagggacccgggtcgcgcctgtgctatggccctgtaccacactgaggagcgctggcccaagcccttgcttcggccagaaattaccgggccttcttcttttaagacatggttaacttggggtcactacattttcaccccttttcagtgatattcctcttgaaggtgaacctctaaaagaaggcaacaagtggcatttccttatgaaggaaaagcacgaacatgattgacattatgagaaatcgtgtttaagtaatgatgtgtcagaaaattaccctcgggtgggaaccaacattgcttacacacatgcgacgcattggcccaccaaaaggaagccaaattgaatttccccatttaaagcaattacttgtacacacggattgcgacaaagcctaccgcatatttgttgtgcgaaaataatctttcccttatacaaaggggtaaataatattggaaattactg

SEQ ID NO: 641487 - DNA, 162 bp, Homo sapiens
tgcaacatagagtacttgcgggatgcaaaactgcttaaagagagaatgacataacatatacgcaggttcttccgagactggctacatgaacttcagcaatgtgagagatacggtgtctctgcatgagcagtcataggaaccagatcctccattgtatatcga

SEQ ID NO: 641488 - DNA, 1698 bp, Homo sapiens
gcttgctccagttggcccatttaactgggagaggtacttgcgcctccgaaggactgaatctggccgagaatgactataaagtccagaataaataccgcacatgttcaaaacacgctcgacctcctcttgaccgagtataacgaagtcccataacccccgagttggtgtggccaggtagaatgacagaatagctctctactagagcattgtgacccctggaaggtactagtcacacctccgtacctaggccagctgataccacatgttgcgcagtgcagcctgctagcagtgcgctgccttctcgccctgactggacacgccacttgaaccccacgctgtaaccgcacatctgtgacaatcgtaccaataccacatttttcgtacacccaactcttccacaacccaccatggactcacatgtctgtacgccatgtacgatcggacccaaataggacgacgcatacgtgtgtaattgcgcagagagccattggtgcgcgagatagcatataggtcatacgtcgcacacgttgggtagctgaatggcctcgtcgcccaagcgtgaccccgcactacttgacttcaggaccccgtcccctttgcggagcgattgcccctggcgtgttcctccttgttgctccccactgtcttcggagcacgttaatacacgcgtctcgcactgctcgtagtccacgcggcctcgatgccaccattggtggcgtccttggggcaactcgtcgcagtcgacccaccagagggacgataccacggggacctccccttcaaatgtagcccacaacgatcgcaccaaatcgttgcgggccaaggacagcttcttccgacggcggttcattcatcgtcccttgtccatgccccttgcgccggccactacccttccaaaccagacgcccactggcatgcgaatagaccgttgcacttccaaagggtgactgcgtgttgtccctacaagcaccacacgtggcgccacacgtgcgttccatagaactctacccagcgtctacccccctgtaaacagtgaggaagcttaccagcgcgtgactcttgggcgaagacgccccgttctgtgcaccagcacgaatggaagggagtctgacgaaactggggggagatcacgcggaggacgcctaggccacagatcactagagcacccccagcagattcgcccgaacagtgcagcagaaagacaccgccaacggcgggcccaacgacgataccagaaacgaaacgaggaccgatggcagcaatgccggtagagcccctgaaaccagccgacatagcagcaaaccaccgtgcacccttgccgccagcatcacacacgcaacaccggctggcgccaaagccacattcggcaagaccgagaacgcccacaacaccactcactatgaacgcagcacgcaaaagggcatgcgcatgggagagcgactaacacagggagacgagcaccagcccacgtccacgtccatagcagacgaacaagccatcaccaccgagcccacctagcgcgacattgcgcagctcgacctcgaacagccccacaccatgtaagacatcccaccgatggaccccgaagaaacacacaggagcccatcgccacacgtactgacacgcacaatgcacacacgatcgcatgcaactccggtacaacggacaaacagagcacacactacaaagacaccacgc

SEQ ID NO: 641489 - DNA, 119 bp, Homo sapiens
ttgtcattagaggccttttatggagacaaggtaaacattgggctgaaaatattacaggctgaaggaagggtgaggaaaccggtatgaaggcagctcaaatgatgaactaaatgtcgacg

SEQ ID NO: 641490 - DNA, 259 bp, Homo sapiens
agctccagttttataatcaaatttcgaccttccattttattccactgaacttctttgaatggcccacgaatatactccatttgttatcttgtatatcatcactttctggaaggtctttaccttggttatcctcggataagggccaaccgaggctccgcggcgctgccgtatcgttccgcctgtggttgagattctgacccagaagcgttcagtcataatcccacagatggtagcttcgccccattggccccttatcgag

SEQ ID NO: 641491 - DNA, 283 bp, Homo sapiens
aagagccttcaaggggccgagggaatcgcggtggggtagaagactaaggaggtcatggcactgggaagcccgctccccaaagacaatggctgagcagatcatccgaggagatctacagccagatccaggagcaaaagagaagatcctggacaagccctccacaggaggacgcacccgcggggacattgccaacatccgcatgccacagatctggcccagctactaacgtgggggacagagagccagccgcaaggcctacgggcaggcactggccaagctgggc

SEQ ID NO: 641492 - DNA, 175 bp, Homo sapiens
catctctctacaagcagctccgggatgcacaaagtcatattatagtcttctaaatactgaccaaactttgcgtcttactcagttcccagaggtgaccaacccacttggttaccaccatcacagtcataaagacatagtcccagttccctgacatcgctggctcccgactcctgca

SEQ ID NO: 641493 - DNA, 897 bp, Homo sapiens
  misc_feature (897)..(897): n is a, c, g, or t
gagaaataagaatcacggccgggcgcggtggctcacgcctgtaatcccagcactttgggaggctgaagcgggcgaatcacgaggtcaagagattgagaccatcctggccaacatggtgaaaccccgtttctactaaaaatacaaaaattagctgggcctggtagcacgtgcctgtagtcccagctacttgggaggctgaggcaggagaatcacttgaacctgggaggcggaggttgtagtaagctgagaccacgccactgcactccaacctggcaacagagtgagactccatttcaaaaaagaaaaaaaaaaaaaaaaattaaaattcactaacggctcttttaaaatttttgatttccaggtaaattatggaaaataaggccactttagttttccaaatttcactagtatttctccctcgggagatagtctccatctattttctaaattggcaggataatatactagtggagtatggtataactgatgactggagtatatctgatgaatatccgtgtcctttatagaatctatttatgagagatcccgtagacctattttatagattaccatagcggtctgtctatgggtagaaaagacgcggattaaattcgggggtgcaagatcattcaactcgtagtaatggagtcatctcaccactactggaatatgtcgtaatattatagtccattgaattaaattccaggcgagcattgaaactacagagtataaagcgaccggggggggtgcgtgtacccttggacagggggggcagaggcacatcgaccaggcaatgtaacgcgccaaatacaggcggggacgtacaccaggggaccacaagatgcgacacctgtgaaaaaacgcgcccgcgacgaggcatttgtctcgagaccacgn

SEQ ID NO: 641494 - DNA, 1205 bp, Homo sapiens
gagccacgtcagttcgagctgaagtactgtgagcttctttggggaatggcgattttgtgtgccattcacactggtctttatcacatagttttgagcttattgcagtatatgttttggggatttatctgtaaaatgggtgtaatatttcctaatacgaggtatgtaacaacaaaagaagttgcctgcatgccggtccaaattgttctgtataaagatgctcttaaaagacacaagagttatcctagaaccttaattcttttttatttgaaattttaagtcaagtcctttataaagaccatagcagtggaaaacagtgtactttttaaaaaattgctgaatataaaatctttgaaaattttctttatgtgtgaagacacaaagtatgggggaagacagcaatcaaaactaactttttgtagatagccatttcatttctttaaactgtttcaacgccaatatgtattctacaaaagagaatggttttaggctccagtgttatacttttttttatatatatatataaaaataaactttacgtagtgaaatcttccaagtcttttctggaattattataaatactttagttttattttctcatcttaatctctccataatttcccatttaaaggtttacaaatatgagtgtgtggatgctttaattcatttaacctcactcctcaaaggtaacatgcaacttagttctgttatatgagagtctttttctttaatgtactggaaaaagcctatgtgaatctgttgatagaatttaaaattccaggccgggcgtggtggctcacgactgtaatcccagaactttgggaggccaaggcaggtggatcacttgaggtcaggagttcgagactagcctggccaacatggtgaaaccccatctctactaaaaatacaacagccaggtgtgatggtgcacgctcgtggtcccggctactcgggaggctgaggcaggagaatcgcttgaacccggaaggcagaggttgcagtgagctgagattgtgccactgcacgccagcctgggcaagagagtaagactctctctcaaaaaaaaaaagggggcgctagaatcccagggggccataagcaacaggtttggaacgggccaagggggtaaaaagaggcccttaagcgaggaagcggacggggacacggggaaaggaaccaacaacgaaaaacaggaaccgtggataaaa

SEQ ID NO: 641495 - DNA, 982 bp, Homo sapiens
tggaaacaaagtctcactggtgtttgcccaggctggagttgcaggggcacgatctcggctcactgcaacctcgtgcctccgtgggattcaagtgattctccgtgcctcgagcctcccaagtagctgggattacaggctcccaccatcacgcccagcttacttttacagtaattttcaagtagagacggggtttcatcacattgggccaagctgggtctcaaacttctgacctcgtgatctggcccagcctcggactcccaaagtgctgggattcacagatgtgagccactgcgcccagccttcttttaatatgttgtaaacagtggtgtcttccccaaatattaaagtggtgggataagcattgccaaatatatttcaagtaagccccccctccttaattttcttattgtggtggaaggtgaggcatctcccctatgtggccaaagcgggctctgtgaaccccgggtactcaagcaatcctcctacctcagccatccgtgagtgtgtccatctacaaattggataagagtgacaagtcataatcctacaggaggataaccctattattcaaaaaccctattgtgatacgggaattttgacaatacaggggaattacgaggcattgttgttgaacacccgtacagtaaagttagatgttaacacataaggtatggggaggaatatgacagagtatatataattacaaaggttgttgccaaagattttaaaagttcatgggtgtcaacaaagatgttcaaaagtttgggttcttgcacaaaaataaatttgcccaacatagttgtgttatgcgttatattaaaagtttgcaagaggatttgtagccgtttgtagaggagagttagagcacaagggggaaaattataagtagggggccaaatagtggtgggatcgtatacaaacaggacgatgcgatcaatgaagagtagcagtggtggtacaagagagagagatatatgataga

SEQ ID NO: 641496 - DNA, 172 bp, Homo sapiens
ctcacttccactatgtcctatcatagggagctgtcatttggcatccatagggagcttaattcactgatttcccctattctcaggctacaccctagaccaaacctacgccaaaatccatttaactatacatattacatcggcgtaaatctaaccttcctaccaacacaattct

SEQ ID NO: 641497 - DNA, 164 bp, Homo sapiens
gcaatgttaggacacggcggtggagcggtgggggaggggtcgtggggtcctgcaccgtagaaattccctcaggtccgtgctggtgtggcttaattccggtaactcttgcactaccgtaccgttcacgatggagccagaatgaccctatcggtggttcacgagcc

SEQ ID NO: 641498 - DNA, 360 bp, Homo sapiens
taaattggggcttttaccgtttacctttttattaatcttttagttcgtaattaattgttgagaggggtttattctttctaagggtggtattgtttttcacaaatcggtgtgtacccgatatatagtgtcacagagcttctaagtccgctccttataggccgtttggggttttccttatgttccccctgaatctcaaaatatccttactagtggggaaccctgtcttttaaaagggtctcctggacattagcctgttcatctcattcggaacatcgttttttggaggggctttaattactgttctttggaggggctacgggtgtcaccctacgcgttttttttttttatcccaaacattcg

SEQ ID NO: 641499 - DNA, 314 bp, Homo sapiens
cttagatcatgctttggctatgcaggctcttttttagttccatatgaattttaggatttaatttagttctgtgaagaatgatcatggtactttgatgggaattgcagtgaatctgtagattgcttttggcagtacggtaattttcacagcattgattccacacatccatgaccatttgtttgtgtcactgatactctctttcagcagtgttttgtagttttccttgtggagcatctttcacctccttggttcagtatcattcctaagtcatttatttattttttttttgtagctgttgtgcaaggaacaaatct

SEQ ID NO: 641500 - DNA, 192 bp, Homo sapiens
gtcctcaccgccccccctcctgccgactgcttcggtatgaagctgagcctgctgagggcctcaggggtcctgccttggccaagaatagccgggaatatgtgaggccggggctgcctgtcaccttcatcgatgaggtagactcggaggaggccccccaagcagccaaactaccctacctcccgcaccctgcca

SEQ ID NO: 641501 - DNA, 103 bp, Homo sapiens
tacaggatcccagactgtcgacaggttggctgatgccccgactactattgctgccatactataacctttgcggagattgtcagactcgcgcgtcaatcgattg

SEQ ID NO: 641502 - DNA, 500 bp, Homo sapiens
aagaggaggatcgcttgaatccaggagttagagaccagcttgggcaaccctgtctctacagaaaatacaaaaactatcgggctgtggtggcgcatacctgaagtcccagctactcaggtggctgaggtgggaggagatcgcttgagcccaggaggtcgaggctgcagtgatccctggtcatgccactgtactccagcctggtgacagagcaagactccggctcttaaaaaaaaaaaaaaaaaaaaaaaaagagagagagagaataaatagaaaagaatgtggctgggaattgtgaatcagaagattataccccccaatttttttcaatccccttttctcaaataataaattagttaaatcagtttctgagttatgccactggctgatgaagagttgagaggtctctttgcagaatgatctttttgtttcgttttgtttcttcttctgcatttaaaaattaaaagattggtttgaggatgtgatgaaattgagactttttg

SEQ ID NO: 641503 - DNA, 195 bp, Homo sapiens
gtgccgttgttgggccaccttccagtctgtgtaggctggaaggctcagctctccaaatgtcctatcctgggaggagtgggtcttagaggtcctctggatctagatggatgaaatgcgataccatagggcagcgacacacatgcatgtgcgcacaaggcatgtgttgagcacatatcgagagcagagtctgcgtcc

SEQ ID NO: 641504 - DNA, 769 bp, Homo sapiens
agattccctgtgatttgggccatcaatgtggaggggccaacccaacaagaggagtcctttcccagagtagaagacacaagctgcatcttgaagaatgagtagatgtgctcctgagggtgcaaaatcaatcaatctgaagtccaggggatgaatttctgagagccacaaaaggggtcctccttactcaagaccaaagacctgaagagtccttcatcagggctctgacctggggtctgggcctgagcttccttctggattgatgcttattgtaacatacccaagatgctcacagatgctgaggacctccagccagttccaaatgagtttgcggtaggaggatctttaataggattgactctagacttagcatttgctccaaatgccttcctggctgcaggataaaacctatgacagcccgaaccatgcaagagccaatactgttctccagtcccacatcatttccactaactgcctgcacctctatgaatgccagtgtttgattaactcctcccacacacttacttggctcccctcccttccttttcggcccacaccttaagtccagaccctgtttacccatacgcccgcttttttaaccatgccacaactattcacccagtgttattttcggccgagccgcagagcgtttagtgccgtcgccccctttccatctgcctttatagtatgcacgcagtcgatccatcatttctcacccgccgctggagctgccccgcttccccgtcccgtcccgtacttttcctcgatcacg

SEQ ID NO: 641505 - DNA, 391 bp, Homo sapiens
aacgtgcacatgttagtacatctccgtcataggctggattcctggcagtgaaggagcacgcctgcaaacagatctccgtgcctgatctttgggtcttgagtggaataccccctgcgggagttggtcgtcccgtgcgactcccgttccagccgaacaactctgtactcgtagagaaaaaagagcatttctggagttttgaccggtcggaatgtcgaatcccacccaggccgatcagttcagatatcggaaaatgaccagttttctgctggattactactttggtcgcctagaacttgacttgcgtcacacgatcattcctgctaaatcaccagagaaatgcaggtagaacattattccggatctcttagccatgaacccccttcatgcccag

SEQ ID NO: 641506 - DNA, 228 bp, Homo sapiens
cagatatgaactcactttatatagtactcagagaacaaagagcagaaatatgtctcgcatcccattcctcagcatagcgtgttaaagcagaaacctaatttaggatctggcacccttgtggcaaggcagacacagctgaggttgggctacatcttagcttccaatgccatagctgtggttcgagttgggatggcagctgctccactactggagcagcagggaaagaca

SEQ ID NO: 641507 - DNA, 127 bp, Homo sapiens
atctagaggtccccgatgttgtatcataccccgccgccccgatacagcgactaagtatgaataacagtgcaggtattaacaacagatgcaggtataacaacagtgcatgtagtgaacacacagtgca

SEQ ID NO: 641508 - DNA, 312 bp, Homo sapiens
tctgcgagattcggatcctgacaggaactgggtgcttcccttccaaacagtgggttcccttttggtccaaggtatgtctaataatgtcgtccgggagcctcagggttctgcctgatgctctatcctgctgtggctgagctggtatccaagctgcaagacaaagccctctttcctctcctcttattctctagcagaaggaaggagtctctcctggaggtgcaggctgcactgcctgtggttgtgggaggagtctcactggagctgcaggctgcactgcctgtggttctgggaggagtctctcctggagctgca

SEQ ID NO: 641509 - DNA, 130 bp, Homo sapiens
tcgattgtcgtacttactgtttgactacttgatgatcattagaaacaaactgtgcatccacgctgcacgtgaagcaccaaccgcagcatgcaatacatcagcaatggggaataataatgacgatcagggt

SEQ ID NO: 641510 - DNA, 1349 bp, Homo sapiens
gacaacatcttgagtgacagcgtgactcgaatctgccgacactgggcattgtactccctgtggacatctgctgctgacattgaactgtgtgtacatgcgctgtggcggcacttcactcgatgaacgggtggtttgaatgcgcatactggccaacgtcacttagactagcctcctgacctcaatctcccctatgcgagaggagtgcgagtgcactccatcgaaccatcgtgtgccaggatcgtccatggcacagggtctccgtgcatgaccgtggaacctatctagtcccatagttatcaatgtgtgtttacgtggattgaagtgcttgggtggctgatgtattggactgaggtagggggctatcatgcttagcaatgtagtttgacgctgttcctgggacatgcttgctccaatgcttaatggaatgctagaacgtcgtggatagttaggtctgggattgaatggacattgggaacaaggacaatggaaggggaaataaggaaacccgtggatgttgttggggacagccccttgcggattaccagcggtattcgtgggttgcatgagcgtgaccatgaaccgcggcagaagagatatgatggcacttccatggatgaccccgttcacaccagacccgtatatcacacatgaattgcttgctccctcggagaatagcgcagtaggtgtcaccatgaagcttgttgacgtgctcaaagatgttggccaaattaggaaaccatcggtgctattcaattcaaccgttcgagtgagagtcggccacgggtttaggggagacctcttgaagtaagaccgtcatgggtttgtcatcaccctttaggtagccaacgggaataccttaggaagcacagtgggatcccaaccaaagcgggctttatgaggtcgcacgcctattggggaagaagcatgaggttagtgtaaaaggtcccttagcaaacatcaggtttagttggcacttacctacaagcggtgtatcgccctttcacaccgttgtacccagcaacatacgcctcaaaaagacacatttttggtcccaagattggtacccctctaaagtggtgattcacgccatccgcctttggtacatttattacacagaagggacactgtttgcattaacttcggtggggcattggtccttatgatgaccccgcgttactcaggaatatggccagaccacttcttgagcccaccgtggcaccaaacgcctatcatttagcacaaagcatggctatacatcggcgaaataagcgcaaaaaagtatagggacatcatacttacaacaccactctttgagaggcgcatgaaatgctaggccctcgcgtggaatt

SEQ ID NO: 641511 - DNA, 104 bp, Homo sapiens
gtttaaacagctgacattatgaacaagcagtacaacaacttgaaagtcgtctggatgagatactttctagaatgcagctgtgtaatggagctgttgtaactgag

SEQ ID NO: 641512 - DNA, 1043 bp, Homo sapiens
  misc_feature (50)..(50): n is a, c, g, or t
  misc_feature (66)..(66): n is a, c, g, or t
  misc_feature (71)..(71): n is a, c, g, or t
  misc_feature (76)..(76): n is a, c, g, or t
  misc_feature (93)..(93): n is a, c, g, or t
  misc_feature (97)..(97): n is a, c, g, or t
  misc_feature (106)..(106): n is a, c, g, or t
  misc_feature (123)..(123): n is a, c, g, or t
  misc_feature (130)..(130): n is a, c, g, or t
  misc_feature (153)..(153): n is a, c, g, or t
  misc_feature (155)..(155): n is a, c, g, or t
  misc_feature (161)..(163): n is a, c, g, or t
  misc_feature (171)..(171): n is a, c, g, or t
  misc_feature (182)..(182): n is a, c, g, or t
  misc_feature (195)..(195): n is a, c, g, or t
  misc_feature (202)..(202): n is a, c, g, or t
  misc_feature (211)..(211): n is a, c, g, or t
  misc_feature (215)..(215): n is a, c, g, or t
  misc_feature (246)..(246): n is a, c, g, or t
  misc_feature (252)..(252): n is a, c, g, or t
  misc_feature (255)..(255): n is a, c, g, or t
  misc_feature (259)..(259): n is a, c, g, or t
  misc_feature (273)..(273): n is a, c, g, or t
  misc_feature (280)..(281): n is a, c, g, or t
  misc_feature (284)..(285): n is a, c, g, or t
  misc_feature (307)..(307): n is a, c, g, or t
  misc_feature (319)..(319): n is a, c, g, or t
  misc_feature (323)..(323): n is a, c, g, or t
  misc_feature (328)..(328): n is a, c, g, or t
  misc_feature (338)..(338): n is a, c, g, or t
  misc_feature (349)..(349): n is a, c, g, or t
  misc_feature (356)..(356): n is a, c, g, or t
  misc_feature (388)..(388): n is a, c, g, or t
  misc_feature (405)..(405): n is a, c, g, or t
  misc_feature (409)..(409): n is a, c, g, or t
  misc_feature (412)..(412): n is a, c, g, or t
  misc_feature (436)..(436): n is a, c, g, or t
  misc_feature (463)..(463): n is a, c, g, or t
  misc_feature (473)..(473): n is a, c, g, or t
  misc_feature (480)..(480): n is a, c, g, or t
  misc_feature (515)..(515): n is a, c, g, or t
  misc_feature (599)..(600): n is a, c, g, or t
  misc_feature (615)..(615): n is a, c, g, or t
  misc_feature (625)..(625): n is a, c, g, or t
  misc_feature (675)..(675): n is a, c, g, or t
  misc_feature (681)..(681): n is a, c, g, or t
  misc_feature (742)..(742): n is a, c, g, or t
  misc_feature (816)..(816): n is a, c, g, or t
  misc_feature (829)..(829): n is a, c, g, or t
  misc_feature (836)..(836): n is a, c, g, or t
  misc_feature (1005)..(1005): n is a, c, g, or t
tattttaaacaaaaaccaacgggtgatataaaatgatagccaccccgganatgacacgaggctcanatgantctanacacttggtggaaagtnaggngagaaaaanaatgacttgggcaaatnacacgantgcaaagctagagctgccaacangnctccannnagcttggnttctgtagaantactaaggaagcngtacganctccacggnggtngggcgctaactagcagggacccctgcaagtnttggtnggnggcntagagctgcctganctgacannaanngaggggtctgtttagccaacangtgaccgaagtntttntttcncacagcttanttggccaaggngtttctnaagttcctgccggcaaacttagccttgctgcncagctcctcttcaattnttanganctggttgtacttggccaagcgctnagatcggtaaggtgcaccaattttganctgcccagtncacaganccaaaaccaggtcagcgatgaaggtatcttcagtntcccccgaacgatgagacaccatgacgccccaaccattggcctgggccagcttgcacgcctgaagagactaggtcacggagccnntctggttgactttgngcaggaggcngtcgccggacttctcgttcacggccttggcgatcctctttgggttggtcnctgtangaacatcccccactacctggattcctgcactggctgtgaacttctgccaagctccccagtnatcctggtcaaagggatcttcgatagacaccactgggtagtccttgatgaaggacttgtacaggtcagccagcnggtcaggcgagangtacctnctggggtcatcgggagacttgaagtccaggtcatacttcccagacctgaagaactcggaggccgctacgtccatgccgatgaccaccttatcagtttagccagccttcccaatagcagttttcagcagctccaggccttctttattctcaggatgttgggagcaaccgncttcatccccacattggtggcatctttccatatttctc

SEQ ID NO: 641513 - DNA, 255 bp, Homo sapiens
acatggaccccaagaaaactgtaaatcagacacaccagaaacctttagaaaaaaaaactacacctgtgctattaccacagtcaaagcaagagacacaaaagcaggcaaatggagtcgttgggaatgccgctgcatgtacacggacagactgaagacacgaccgtttccgatacacgggctgatgattctgacacgacacgacagacaccccaataagagacttcccaaacgtgagaacagactgatggtacgtga

SEQ ID NO: 641514 - DNA, 202 bp, Homo sapiens
cagatgatcccgctatctgttatcggctgagatcgacggtagtattgacatgacagtcgacgaaataccctggagtggtgcctgcctgtgattgatgccaggaataacgagtggcagcctggagtttagcattgcttgggcatcccagtgacttcttccctgttcaagtttcctttgtctcctagaaaaattactgtaacat

SEQ ID NO: 641515 - DNA, 203 bp, Homo sapiens
taattttgcggtgcctttcctactcagaggtatgagtgacagacagcagctggaacatcaggtcactcccaccctaatactgcgctatttccaaggggcttaaaaaatggcacaccaggagattatatcctgcacctggctcggagggtcctacacccactggagtcttgctgacttgctggcacagcagatctgacgatcaa

SEQ ID NO: 641516 - DNA, 417 bp, Homo sapiens
cttgttgttattgtacagaaaaaaataaaaaacaggactcccagcaagatgaatccaatgaccgtattcttatccgtcttcatagaaacttttattgagcggcaaaggtagggcatggatcgaaaactgggggttttcagtattatattccgttaaaataaagacatgaaactgtacagggaagaacagttcggtccgctcatcccagtggtgcctttcgacagtctggaagaacccatcgaatacctgattgagtctacgcatggtcagcaggtaagtcttttcagtaacgacagcaaagaactcgcttccctgattgatcccctggtgaaccaggtaagccgtgtgaacatcaaaagcgcggatatggccgggtgcggcagtagcatcttccgctacacggactcaggtggtgtg

SEQ ID NO: 641517 - DNA, 1029 bp, Homo sapiens
  misc_feature (698)..(698): n is a, c, g, or t
  misc_feature (822)..(822): n is a, c, g, or t
gggaccacaccaaaatgtcatctcaagatggaacatcgggccgaatggcaaaccatgcatgtttacattgtcacagaattcgtctgggcgataaaggctacgttaacaaacggaggacctgagagtactcatgtcatccagagagttccctggtagtttaagggacacatagtctagataagagaccctctggtctgtggtagctaagatataacactgtaaggacctggatcagtgtacgagatggcaaagtgggctttcccgagatgacttcgtttctcgcacttaattagcgggcgctcatgcatatgcatggcgaatgagctactttacgtcggtacaacattgaacgcagaacgggagaacgcaatgtagagccagaaagtgaagcaaggtatcggatccatcccatgactaaagagattgatcccagaagggatcgcgttaatggagatctggcccataaggcttcccctgataagaacgggatggtcatcgagcatgatcatgagacgatcattagcaagaatgtaacaataggtaagtatcctaaacttgtacatttttgagaaaaggctagaagaaagagaagaatgttttaaattacctcagattaaagctttatgatcctcccgtaatttggttgcgcgattccccttttggccctttccattcaacacttcaagggtctcctaaanaagtaaagtgacgcgaaaaaagaaaacccttggagaccggttaaagtttttccgagagggcatttaaaaaagaacggagggatttattcgccccatagagagaggggaaatgcagacatagatngggccatcaatggtgccatagtacaaggttgaaggactttggggacgcaaccgtttttcactgaagcgtcacaaaagtggggagaaatagaattcacggagagggatattcagcaaagatatagagacgactaaggaaagttaagataggagtagataaggacgagagtattaaccggggatattactagagaaagagtgaaaaaga

SEQ ID NO: 641518 - DNA, 684 bp, Homo sapiens
  misc_feature (620)..(620): n is a, c, g, or t
gcaggataggcaaacccatatccggagtaagcatctattcgggtgaagacagatcactgcccttttcatgaaggaagaggaccaatatatcaacctgttaccaagtagctggcttatcaccccaaggaatggtgccatatcgaaggctcagtgtttgtttctgctgctggcaaattgggcattcagcagtgtctgtagccaggtcagccttggtgagtggaagtccatgttgctgaatccatgtgtaacctccatcgctgccaccatggccactttgttcatgggctcattggatgatgacaggagtggctggggaagaagcctggggaaggaggctgagtgggtcatcccatccacttgattatttcctcctctgctgaagtcacccttttgtgagcattctcatgagatacaaatatcttaacaggttttgaccattcagagaggtccatccacatgcctcttctccaaatttctttgtcaccgattttccaatcatgcttcctccaagtccctgaccatccagtcaaaccacttgctacagcccatgaatcaatatataatcgcacatatggccattttttcttttaagcaacgtgctcacccagtgcactgctcanagtttgcccactgggaagattgcctttggttttctcggaggtgtatggttgacctgtcactttg

SEQ ID NO: 641519 - DNA, 2187 bp, Homo sapiens
ggcaacacccaggtagtttaggctgtcagacacaatgccttctgatgtgcttgaggtgaccaagaagtacatagcgggaccccatatcggattcttgatcaagacacggaacacgcttgacccctggacgcggtatccgccacgttctacactcaaccgtgcgaaccgagacgggacgtggacacagcatggaccacacatacctgctgacattgctactgcaaccccaatagacccactcaccacagggcaagtccaatcttatcatcacacacccacgcgatggacaggcgatggcacctatgggccatcaacccagaaacgcacagcatagcccatcgcctccagcagacatattcaaacacttaggatattcccagacacacaatgcccacttgagcacaacaataatatgcgacacccaacaaccacacaggggacaaaccagccacgcaccggactgaactttgacctatcgacacagaggacacaagattcaaacccaagatcacccattcgtagcaatccataagagaccacacagcaccgaataactaacaaccgaccataacacaacaccaccgcaccacagtacacacaagcacccaatagacaaccaacataggtagaaaaccaaggcgacaacgggcaaagacaaatagacaactcggctatcggcgcaaaaaacgacaccgacagaacaaagaacgatacaagtaccagcccgtacaaaatatcgcacaagccaatcaacatactggaaagccccgaatatgcccgagccaaccacgcgcaacagaactacaaagcgggcgaccagcacgacacgccagtttacacatacacatgtcgaccaacgcctaaacagaagagacgcagttagagggacgaacacccacgaacgagcacgcaaagcgagccaaacgccaggaggaccaatcaaaaacgcgacagccaccaccacgcgaggacacaccacaacacaggaaggaacaacaccgacattggagagaccacagcagcaacgaccaacgacaacagacccaacaaatcacagggaaaaaagcaacaaacacacagagcgcaccaagagcgaagacaaaaagcgaagcgacacacacgtacaacacacgccacaacaagcgcggacaaagcacaacaatgaccaccatactaggaacaccacagcaggacaaaccgaccagcaacacacccccaaacctacaacacagagcacacaacagcaacaaccacacaacacccaatcacacatcaaccactgtaaacaactcacccatacacgcaacatcgctcaagaaaccagaccaacagcaataccaccacacgcaaacacatataactcggagacagcacacaacacgagcagctacacatccaaaacaacatatgccatacacaccaccatcaccacaactattaacccacacaaacacataaatcagacatctattaacctcacacacacacgccacaaaacaatacaccctgactcataccccaaacaccgaacaacgatatgggagaaacaacgaatggagagtgagtaacacacgacaactattgtgacgacatcaccacaagtatagtgagcaaagaagaacaacgcacggagccacacaccaacaagcatgaacacacgacacagcagaccacacacacacaaggcaagcacacgcacaaaacgagaggaagagagagaaagccgcaagaaacacacgcaaacacacacgatgcgagacagcatacacggccagattgtacagcacagaaaagagaagcaagtaacaaagaataatagagacatacgaccaagacgaacaacagaccacaacaacacacgagacacaccagcgcagcagtagcggaaacacatcgaacgaagagcgacgacgagacgagctagagcatcagcacagaaaagcaggagggagacaacgccacagcgagcgacggcgacagacacacggagaccacacaacaacacaccaagacgaatgaagcatataccaacaacagaggcacgagacgaacaccagaaaccgcactcagccgcgacgcagagtgcacaccacgaacacaagcagacacgaagagcagagcaggagagacgagatcacaccagaaccgacacagcaggagcaaccagcacaaaatacgagagaacgt

SEQ ID NO: 641520 - DNA, 385 bp, Homo sapiens
  misc_feature (13)..(13): n is a, c, g, or t
  misc_feature (60)..(60): n is a, c, g, or t
  misc_feature (86)..(86): n is a, c, g, or t
  misc_feature (88)..(88): n is a, c, g, or t
  misc_feature (331)..(331): n is a, c, g, or t
gcatcacagacanttcaactgttttctgcctgagcagaattaagacttggcctcctaaantcctcccatcaccattttctccactntnttcccttggccttcatcaccaacaccacctcatcaaccgtgaaagattcaaagagtaaggaaaaccatttctaggaccatgaaatgtgtcactggatctcctgcagaaatctgccagagctacaatgtgactggtttctacatgtctgacaaatttctatttaaataagtatttttcaaaatgcaaattgctacctattctttggccatcaaatcactttagtgggttgcaaccggctttttnttcttaatagaaaaggaaatgtgttgcatttggtaaacatggaaattgttttat

SEQ ID NO: 641521 - DNA, 151 bp, Homo sapiens
gcagtacggtgagaccctgtctgcagacaaaaaaaatttaaattagccaggcatggtggcacgggcctgcagtcccgactacttgggaggatgaggtggcacattttttatcatttcaccactcagaaataagcatgcttaactttctggt

SEQ ID NO: 641522 - DNA, 200 bp, Homo sapiens
gctgttcagacttgaagattcgggacctcctgacgcggtgcttcacaaaggtcacaccacttctgtgttcccacccaaagtgagcaacaggactctggtccggcagatgaaaactgaggggaaaatccacaaaaataagatacacttccaaaatgcaccagtcaaggaagcaagagaagacaggagaaaggatgacaggg

SEQ ID NO: 641523 - DNA, 183 bp, Homo sapiens
cgctttggggggctccttgggtggctctttgtgtggctcgttgtgtggcacttggggtggcgcttggtggagcgatttgtctgtttgattccgaggcgcatcgtgcggctcgtcgcggggcgtttcgggtggctcgtggggcctcccacttattctacacctctcatgtctctacaccaagag

SEQ ID NO: 641524 - DNA, 504 bp, Homo sapiens
agtgataagattgtgaggtatgtatgacatcccatcgcatcacggagtgggaagtcagggtaggggttttatttgcttcttgttatgagacagagtcttgctcgtgtcagccagtgctggagtgcagtggcgtgatctcagcacacgtgcaaactccgcctcccaggttcaagcgattatcctgcctcatcctcccgagtagctgggataacaggcatccaccatcacgcccagctaattttcgaacttttggtggagacggggtttcgccatgtaggccaggttggtctccaactcctgacctcaggtgaccccccaactcagcctcccaaagtgctgggattacaggcatgagccaccacgccaggcaaatcatgggaaattagagttcgataaactgatgttatctggtaatactgtttggcccaagtgttttttgacatctgacagtttgctgttgggtgggaacttggaatggcattccatgtatccagggtttgatgc

SEQ ID NO: 641525 - DNA, 855 bp, Homo sapiens
agcggaggaaggctgaggctgcagtgggctgtgatcatgccactgcattccaacctgggtgagagagaccccatttttaaaaaaatatatagggccgggcgcagtggctcacacctgtaatcccagcactttgggatgccaaggcaggcagataacctgaggtcaggagtttgagaccagcctggccaacatggtgaaaccccattcctactaaaaatacaaaaattagctaggcatggtggcaaatgcctttagtcccagctactagggaggctgaggcagaagaatggcttgaacccaggaggcagaggtttcagtgaaccgcgattgtgccactgcactccagcctgggcgacagaacaagactctgtctcaaaaaaaaaaaaaaaaagggataatccattctgggcttggatttcgaaagacagagtggagaaattggaagaaatttcgtggtgccggggtaaatcaatttccaacgaagaatcgaaaggaaaaaaaaaggctttatgaaatctatgggtccatggttaaaagaaattggatggtggatggcaacgaataattggggggagcacaacatttattgaacagaatgtggacagcttggcattggcttgggaaaaaaggggacataactaggacaacatttacactatgggctattataaaaaggggtatggatttgaatcacttttcccagggcgaacgtgggagggtcaccacaaatcatggccccagggcggagagtcgcaataagggggcacagcattgaagggcacataggagccttgagaatgccgggacctcacaagaaatcctgccgggcccacgggcctcagggaaaaagctggg

SEQ ID NO: 641526 - DNA, 193 bp, Homo sapiens
  misc_feature (82)..(82): n is a, c, g, or t
  misc_feature (142)..(142): n is a, c, g, or t
  misc_feature (146)..(146): n is a, c, g, or t
accctcttctgataaatttgagggcccgtttgtccttggagaccttcagtaactccatggcgcgccatcgtacggggcaaanacacacctcccgaatcatgtcccgcacgaacttggtgtgtttggtcagacgcccgcgttnggcntgtgctgggcttgctcacgttcttgtcactttgtggcccttgttgag

SEQ ID NO: 641527 - DNA, 103 bp, Homo sapiens
ctgtttagttagggtaagcagatggaggtaggattggtgctgtgggtgaaatgagtttgatggtggtggtggttgtgtgtaaacatttaatagctgtagagaa

SEQ ID NO: 641528 - DNA, 359 bp, Homo sapiens
  misc_feature (359)..(359): n is a, c, g, or t
gagaactagtctcgagttctagccatgtggtcatgctgtgcatactgtttgggggccatacacaccaccaattatttattaaattttcctttgttaacaatagcccataaattggactgcccacccacaaacttggcctaaccgattttctcgctctaattactttccggggccattggatgaattgctttaaccattcttgagcctcttctagagattcatttacatctgaagactgcaggacctttacaagcattcctatggttagagcattttttgagatccagtttaagggccccactcaacactttgagcgcttgtgtacttccgcttatttcaactgccgcgtggtgcccccn

SEQ ID NO: 641529 - DNA, 304 bp, Homo sapiens
  misc_feature (41)..(41): n is a, c, g, or t
  misc_feature (46)..(46): n is a, c, g, or t
  misc_feature (77)..(77): n is a, c, g, or t
  misc_feature (287)..(287): n is a, c, g, or t
aaatccggctaactaaaaggaagtcacactggccgtggtgncttantcctgtgatcccagcgctttgggaagccaanacgggtggatcatgaggtcgggagttcgagaccagcctggctgacatggggaaacccttgtctctactgaaaatgcaaagattagccaggtgtggtgtcacacgccttggttctcagctgctcgggaggctgaggcaggagagtacctcgaaccaggaggcagaggttgcagtgagccgggattggcgccattgcgctccattctggggnacagacagctccgtctc

SEQ ID NO: 641530 - DNA, 758 bp, Homo sapiens
gcccaaacggtgcacggtaagagtgatggtgagctggctatgtgtagggggcaacacgattctcctccctgagttcgagcagatgcagaggcaacccatccctcggataactcacgccgaaaatcccctaagttccaatccattatccactctctgttttactgtccaaagtccctgggacactgtaaatgccacgatcggcgattctggagacgcatagacacgcagcacacagaggactacctgcgtgtgcgccagggaacgctcgctagtgagacactccgtgcgctgactcgtgtctgacgtataggaacagtgcatgaaggagtccgagcctgcaccctgagatgctgcagtctgacgagagtggataatgcgcagattcatatcgctgaacgatcgcctgaacgcgggggagagaaccagttcacccgtggacagttggacgccacaggtgaacaggcaatcggaaaagtgttgaacgtgccaaagaatacaggaatacgaagcaacgcggatagcgtccctcacgctgaacacccagacaagaacgggccatcgatcctttgctgacaagtcgcaatgccacggacatgaccaggtgaattgggtgccctgctacgtccttattcgtgcactctcacaagctattccacagtaaatgggatgttcagaagccattggcaggccttgtgtacacttggcagtattcccgaaaaacacgtggcgtaattgacagaatactatcgggtgaacag

SEQ ID NO: 641531 - DNA, 215 bp, Homo sapiens
  misc_feature (124)..(124): n is a, c, g, or t
  misc_feature (133)..(133): n is a, c, g, or t
  misc_feature (169)..(169): n is a, c, g, or t
  misc_feature (180)..(180): n is a, c, g, or t
  misc_feature (199)..(199): n is a, c, g, or t
gggggtggaggttgcagtgagctgagatcgcaccactgtactccagcctgggtgacagagcgagactccatctcaaaaaaaaaaaaaaaaaaaaaaaaaaaagacttgcttctgtacttaaatnccagtttancttatagattgtctttaatcacaaaagggtcatcanttgaaaaaaancgatgtgttttatttgggnaaagtaaaataggcct

SEQ ID NO: 641532 - DNA, 377 bp, Homo sapiens
gctgactcatcgctgacatcgtacctggaggctactggcatcccatcagcatcagccctttgattctgtgcctgcgcgtgctgtgggtgtgcgttacatcacgttcagcttcaaaaatacctttagagctgccatgcgtggacacaagaacagcagcccatcatccattccacggctgacaagctactggttcaggcttttgcggtaccggcaaaaccaccacactggtgttctacgccacacaacacgcctcggttgaaaatgctctacctctgctacaacaaatcccgtcgagctcgctgccagggccgctttccacgcaggaaacgtggtgtgtaagacggcgcatggcctccgcattattgggtaaaagaccg

SEQ ID NO: 641533 - DNA, 666 bp, Homo sapiens
agcggatcccggatccctggatgctaagggtgaagtgggacctgcagggtctccgtggttcaaatggtgccccatgtatcagagctacattccattacatgactaaataatattccattgtgcatataaaccacattttgtttgtccattcatctactgatgcacacttgggttgtttccatttttgaatcttgtgaataatgctacaatgaaccttgccatacaagtatctatttgagtcactgctttcaattatttggggtatatacctaggagtagaattcctaggtcatataatacacagtattttttttaatcaagtacattcaatagttttaaaaaaaacttggacttttttcctgattaaaaagcaacacatgttcattgtaggaaatctggaaaataattacaccacccagagaaagtcgctgttaatatttcagaatattcccttaaaatcttactgtctagttatacacatacacagagacagacatacatggatattttaactaaaactgggttatttccacttatcattgtatcaagagcattaactccactgtcattaaatgttcttcagaggccgggcacagtggctcatgcctgtaatcccagcactttgggaggcaaggtgggtggatcactgaggtcggagtcgaacca

SEQ ID NO: 641534 - DNA, 938 bp, Homo sapiens
gacgcctgcatgggatcgcaaggcggttgaggtgtgagaggttttcgtcgcactagggagattctgcatagcgaattcactatgtcgatcgacactaggtgttcccttccttcatatcaggaagatcatgtgaatcagtagattccattcgttgaaccgctccaggaagtgcactcgtgtcgtaccacgtttgataatagcaggagtttttgcattgcgggtttgtggcatattggtattatataaactgtaatgagacagggtggatacttactataatgtctcattcatctgatccacttgtcttgtgtgtaaacccatggctggttgtgggagcaatcgactgttggtcatggcctattccatgtctcgggatattcttggggctaataaattagtgcctcttatgaagcaggcatgaattggtagttattggtcgttgtccgtgggagagcgtgtgttaaacttagatgtcatttttatttaatagttcccttattgtcgttggaaatataagtatgacgtatggggtaaagatgattaactatgggctttttgaaatgatttggctttcttgtctttgctaggctttattattcggttggttgatccgagattcacttcgttggtaaggtcaacctagtgaggttgcagtacaaggtaagctgagattagttaatcatgtcactaatgcgctcgatgggcttgaaatgtcaccttcttagatttcaagatgacttcgttctaaggagattacgggccagcctaagggatccggtgctgagaaggggcaaattggggagctaaagcttgtgcccgtgaatacattggttccttttgggtgcgacgttacacatcccaaggggatatacgcggcgtcccctgttattttgtgtcaccccgcacgaacgcctgtattaaggccgacaaaagtgtgg

SEQ ID NO: 641535 - DNA, 427 bp, Homo sapiens
agtctcgacacccgagtctgtagcgtctttggtgtaggatggcagcaactgctccagcactaccagctccaagattagttcttttgtgtgcgtctctggcctgagccacagacggcaaagttctcggagctggctcacagcctcacggggcccaggtgaatcctggtatccaaactgcctgaatcgctgtcggaaaatctctgggtctgggagatggttccaggggatacttgatccctcttcgccatcaggatcctcctccaatttcactctcagaattttttcctcttcatctggagttgggcagataagtattgaatcttcttccactgactgtgcagacattctgatttataatatatcaagaaaagacaaatgaggcagaatataagcctcagggcaataccccgtttactacacaggcact

SEQ ID NO: 641536 - DNA, 346 bp, Homo sapiens
  misc_feature (300)..(300): n is a, c, g, or t
atctgtatatgttgtaataaaacttatgctagtttaatttggcgaacacgtgttcaaaaataaaatcacttggtctataaaattagctggccaagaagaaatgttcttaatgttcagaaacctggttgctccacctaataagaagtcagctttcaaccaggagaccacgtgaggccctagactggccagtctgggcagaggttggtactgaaacattcacacagggtctttgatggaccccgaacgtttagctttctcagggggtcagcagagttattgaatcttaattttttttaatgnacaagttttgtataaataataaagaactccttattttgtaaaaaaa

SEQ ID NO: 641537 - DNA, 204 bp, Homo sapiens
atatttttagaatctctcaaataatggaaaagatattctatttactgcataataatccgggatgtgactaggagggaggaaagaatggagagagagagatagagagagagagagagagagagagagaaatagttagataggtggatagtctcacatacttctgaaattttatagtgaatatgactgtgtggggcgataacatca

SEQ ID NO: 641538 - DNA, 153 bp, Homo sapiens
gcgactctagagggatcccctctaaaagctacccgcgctgcatatcaaacaatgttaaggcaggcccatccatatggaagcctaacgagatgatacaatgcttccaaatgttccatgtcatgcaagctttctggtgtttgtcccatgagatgc

SEQ ID NO: 641539 - DNA, 175 bp, Homo sapiens
atcccgttcatcttgctacacaatattcatacttgcatacatatgtgtacgtatgttttttaagtaacgttacttgttaccattagaataaacctagacactacagggacaactctggtggaacatagccggtctgccattaacatacccttctctcaggttgcagggtgtcaga

SEQ ID NO: 641540 - DNA, 134 bp, Homo sapiens
gaaggcaggacactggcgctcacgtcttcacgtacgggtgtcccagatcaccggccatcgaggcacagcacttgctcaagaggaaaccagatattggtgaccccgcaaggggctggaatggtgaagaaagtttt

SEQ ID NO: 641541 - DNA, 281 bp, Homo sapiens
tagtctcttaacgcagctgttgaatgggagttgaggtcttcatacagttcagcctctagaatggtaacaaatcagccacattggattcgaaacaaagaggactaggtgaaactcacccatcacactttgagagtactcactggttggaagaatatagtatagcaggagatcctgtatgaaagagagatgtgggcttcctttaagagtcttgggtgaggtgctgagagcttttacatgggcttatacagggagagagtcttcaacaaatagtctagaaggag

SEQ ID NO: 641542 - DNA, 520 bp, Homo sapiens
cctggtgcagcttgtgatatcatatgttctagctatcttcacgtgagtggatagcaataccagtatatagttatagaaaaaaacacgacacagcaaaaagcaggcacaaaaactcaacgcacataacgtcaggagccatgaattatacagcaggcaacaattcttgggctactgtgaacccctgaagccatcagtaaattcaaacaagaatcacaagtgcttctagctccaggagtctatcggagttagtggaccaggcacaggcttgtacggcccaccaggtccggttctgaccccagatctgctccttctgggctgtttaacttggcaagctgcttccctctcctaaagcatccgtttcccgaatgtgcaagatgaggttacacaaatgccacctccagggtggcccatgacggaggaaatgacaccggtacacgctgccagcacatagtaggggatgactgcgtgtgtctcccttaacaaggctgggacattagtcacctttgtccaggtgtctatc

SEQ ID NO: 641543 - DNA, 224 bp, Homo sapiens
  misc_feature (28)..(28): n is a, c, g, or t
  misc_feature (142)..(142): n is a, c, g, or t
  misc_feature (147)..(147): n is a, c, g, or t
  misc_feature (150)..(150): n is a, c, g, or t
  misc_feature (164)..(164): n is a, c, g, or t
  misc_feature (171)..(171): n is a, c, g, or t
gctcatcttatgtggcacgggggggagncagtgagtgtgtgtgagtggggggggagctgccaaacacttttaaaaccaatcaatctctggtgagaattcatgcactatcacaagaccagcatgggggaaaccgcccccatcntccantcncttccctcccttgncacgtgnaggttataggtccttccttcttctcgtgggtttttctttttgtgttgtgtttt

SEQ ID NO: 641544 - DNA, 131 bp, Homo sapiens
gctaagtaaacccccaaaaaaaaaaagctttgtaggccccttgtacttagtttgggaaaaaaaaataaattgaaattgttaggcttttgtattcccctttcttccaaaaaaaaatttttttttaaaaagta

SEQ ID NO: 641545 - DNA, 868 bp, Homo sapiens
actccctcttagccaatatgtgcctatgccatactagtcttgccgcctggacagacaggtgggcctagccctatagtctcaatctccaacacatatggctagactatgtacataactaaacctactccagtgctaaaactaatcgtcccaacaattatattactaccagtgacatgatttccaaaaaaacaccttatttgtgaatcaacacaaccaccccacagcctaattattagtatcatcccttctattatttctcacccaaatcaacaacaaccttattttagttgtccccaaactttttcctccgaccccttaaaaaccccctttcttaatataaactacgcttgattcctaccccttcaacaatcattgccgcaggaagcgcgcacaacggccacttataatccaggtgaacccactttattcaccgaaaaaacatcaagccaacacacacacctctttgtgcgggccgcgcccctggcccccctcttccgcgagtaacaaacacgggtctttctctacccacatacacataggcaaccacccttaccacaataacttgtagtatgagtatctacagtcctggcgagtattcattttataatgtagacttatataaggtgggaggtagtcacgagcgactagtcctcgtgctctcctgctctaccctcatctgtaacgctgactcgtccgcgctacctagcccctctcccccccgccctctcccccagcacccacccccacagtatgacactcacaccggctctgctaacacctacatattacatgacgtactaccacatacccatactcactgcctatcagatactcgtaccaaccacataccgtagctcctggccctccc

SEQ ID NO: 641546 - DNA, 206 bp, Homo sapiens
gggggggccacaggcacggagaaggcctgtatactggtggtgggattaaactggtgcagccactgcagaaaacggtatagaggttcctccaaaaagctaaaaacagaactactgtatgatccagaaattccactcctgcgtatataccccccaatgaaagtcactgatttgaaaagatacatggaccccttctccggtggcgtggt

SEQ ID NO: 641547 - DNA, 1976 bp, Homo sapiens
  misc_feature (1)..(1): n is a, c, g, or t
  misc_feature (1268)..(1268): n is a, c, g, or t
ntgcggctacatgtctgcagtcgtctgggtgcgtgtcggtcgtgcatgacatgtagttggtcagcacaggcgcgctacggtagtttgtctctcacccgctcgacgtattgtggtgctgccagagagggcgctgatatactcccggtgtgatattgtcgctcgctgactgtgtggtgtggacaccgcgcgcgactcccgttcgggggacagttcatcatcaatgagtggtgcgggtgttcttcgtgctcacgaccgtgggggccgcgccagtactgctccccgaccggtcgtttgctggtgtgaaaattgcgtgttctgtgttgtgcggtgcgaacagaccgttgttgtggttgacgactctcttcagtggaggacaccatgggagtctgtgcaacacagtgggtggccagcggcaataaaaacctttgttggagagccacaaaagttgattcgcggagagctgatggggtggttactagtaggcgttccagattgtgccgttcctcaaagaagggatagatatgtgctctcagaccggtgattcttcatggagccccactcaaataacaacactgttgtgtggaacactccagattgtggtggttaccacaaagccagctgtgtgtggtgggaagaagtctgcacaaaccgacgaggcaggttgattgaagaacacagcccaccacagtcttggggggagaggggtgaaaaaacacgcgcttccccccgtttgtggggggtgtgtttatcctcaagtattagacgctgagtggtacacaaatagatagcgctccttcgtggtggggaataaaatagcccgcaccactataattagggggcccttgtctcgtcaagaagctccgcttgattactgcagggagaaagtggggaccaccccgctgataggagtgggggaaaataaatattctcccgcgcgggcggtgaatttttgtaacagaagacgcccccaccaccataggcgccaatatgtgggggggaaagagtagaagattatgagacgcgccttgttcgtcacaacgctgcgtgtggtgtgtccacaaaaagagtggtgggtggaacatcacacgacgacacacttctattagtttatagagagtaagagggggaaggatatataatatggggacacccctccctcggtgaaaagatttgtctacgacagcacacaccgtcttgggtcgtctgtttgaagagccttctgattagtcgccaagagatgtgatcctcttgtagaatatgagtaggangacgaccacgcctgcgtgggaataaggttgttgtatgagggtgagaactcctgtctcttgtctcctgtgaaaaaaataaggagttgggggaacaaaatagtggcgccacaccacactctcggcacccacaggagcagagagagaaaattgtggggaaatagaaacacacgccggatatacttcacagagatgtgttttccagcacccacacataatgataatgatgggggggagacgcacacgtagtgagtactctccaaaagaaacacacccgagagtgagaaaaaatagagatacccccaaaaacttttgagagcccgtgtgagagagaaagagaatagagatataaaagacgacacacagagataagagaaaaagtgatataaatataagagataccacagagagatatttgtatattacatccatatttggggcgcacaccacacttcacagggttaaaagcacagtcctatactgtttccaccacactaaggggaaggctcttaactcttttgttatagactcggtggcacagtgggggaaaatataggagcacattaacacaaactgaaattgggtgccctgtgcaattttgtgcccacattgtaatactttattgtaaccatgatgggtacccctcatggaccttttaattttcccccccccacccccttttttgggattaaaatttgggaaatgggaatt

SEQ ID NO: 641548 - DNA, 250 bp, Homo sapiens
tgctgggattacaggtgtgagccactgtgcctggccgggattcaccattttaaatgccataaagaacatttgtggttcatgggaagaggtcaaaatatcaacattaacaagagttaagttgattctagccctcacggatgactttgagaggtttaagacttcagtagaggaagtaaactacacgtgcagtggaaataggcagagagtctccggcgaactagttcgacggagactctcctttataaatcat

SEQ ID NO: 641549 - DNA, 429 bp, Homo sapiens
gacaatttcacagtggcagatattagcttgcaaaattttaatcttcgcctaaaagctctcattttttcttaaagtaactgtttcactttgtacatttaaaaaaatcattgtttgggccgggcgcggtggctcacgcgtgtaatcccagcactttgggaggccgaggcgggtggatcatgaggtcaggagatcgagaccatcctggctaacaaggtgaaaccccgtctctactaaaaatacaaaaactagctgggtgtggtgcagggcatggtgctgggcactgtaatcctagctactcgggaggctgaggcagaagaattgcttgaactcgggagacagaggttacagtgagctgagattgcgccactgcactccagccagggcaacagagcgagactctgtctcaaaaaagtcgacgcggccggcaat

SEQ ID NO: 641550 - DNA, 298 bp, Homo sapiens
  misc_feature (235)..(236): n is a, c, g, or t
gggcggacgcgtggggcagaaatgcacgaaggagagagagtgagaagtctctagaaaatgaaacactcaataaggaggaagattgccactctccaagcttctaaacctcccaaatcctgatcagcccctaaagggtaagtgccaggcccgctccaccaaagggaggaattgcttgtggtgcaagcgaagcttctaaccgctccgtgctcggatctcagatgctctagacacaganngcagcagtcccgcttacaagtggtggggcggcaaaagtacgctccagcttcaagccatcgtg

SEQ ID NO: 641551 - DNA, 249 bp, Homo sapiens
atccccagtactgtgagtgcagttcgtagtttgacgtttgctaggcagaatagataatgagcgatgtaagtccgtagggcaattactagaatgactgcgccggattaagcttcagggggcttggatcacgaatggctgttactacatagggctactgtggctcattgaagagtatgcaatgagcgattttaggtctgtctgtcgtacgcagatcgacgcttgttatacttctgcctcatagggatagta

SEQ ID NO: 641552 - DNA, 369 bp, Homo sapiens
ggtgtactgggattgctggtctgacatcaaatgaaggaggagagaaagatgggtgaggcagcaggaataggggcagtcacaggaagcgggggcgggaaggaagatgatgagacctgagcatgtgattccttttcctgcagacagaagcggccagggtgaggagggagataatgcaagagcaatggcagcagaacagcactcatgctgtgaatggcagtgcagtgtcaagcacactgaataccagatcccttatgtattagtccgttctcgcactgttacaaagaaatgcctgagtctgggtaatttaagaagaacagaggtttaattggctcatggttctgcaagctgtacaagaagcatgacagcttc

SEQ ID NO: 641553 - DNA, 329 bp, Homo sapiens
gggtgatctacagatctagctctcaccacccggatagtagctaagcattgcgagacccgtgccgcggtgagcagaaaaattactcgagtcttaaatgaggacgagttgccagcgctgtcggcagagggaggaaggcgagaaagaaacgcaggaagaagaggtgctgtggaggaggtggaatgcagctatgaaatgcaaggccacaacaaaggtgggatggccagagttgtggaagcccaaaagagaagcgtggtctccagaataaagattctcaaaagaccagggtgcccaacttaagctggtgaaatcagactatttggttgcgtggc

SEQ ID NO: 641554 - DNA, 323 bp, Homo sapiens
tggcctcccaaagtgctggattatagcataagccaccatgcctggccaaaacgaagagatatttgaaagagagaaacaattctcattatttagagatgacataatttgttcttcaatagttgtacctaatatgaattacttgtatcagtctgcagtttttatattttatgacaaaattggaattactactctaggacataattgctaactatgaattcactcaaacctcaatgatgtgtgtctaaatgaaaagttatgatagcacaggatgttctagccaatgaaatatgacaagaaaaacacaataaaaggaagagttttta

SEQ ID NO: 641555 - DNA, 384 bp, Homo sapiens
tacaagaagtgactaggtccgtagtcatattcactgtatctttacctctaatgtcacttttcccagtatcccactcttgtgcccggggggaggtcccaaaataaactacctacatgcaaggcccgtgcctcaatatggattttctctcagtaactagaacttaagataggttttttaaaaagtctttaaaagctgggcatggtggctcatgcctgtaatcccagcactttgggaggcgcgaggtgggtggatcacctgaggttgggagttcgagaccagcctggctaacatggtgaaaccccatctctactaaaaattcacaaaaaattagccgggcatggtggcacatgcctgtagtcccagctacttgggaggctgaggcgg

SEQ ID NO: 641556 - DNA, 473 bp, Homo sapiens
  misc_feature (391)..(391): n is a, c, g, or t
  misc_feature (431)..(431): n is a, c, g, or t
  misc_feature (439)..(439): n is a, c, g, or t
taaaaggtgggtcatagtggagctctaagccaggcagagaaatcatacccctcagagtttgaatatgtagaaaacagcttcaaaagctgtgagaagcaacagaaactgaaatctgcttagaaacatacatgattagaattggttatgaaaaactgtgtgacatttgtaaaatgaaaacaaaaggaaactgggtttaagggaattgttttgaaatgtgagttacaagttgtttctggactttgggtggcctagagtggtggctacttcaattttccctcttaggaatagtttttatgggtagaatattccagatccctcttccagtttctgccaggtttgaaaagcactaggggtgggaggccaggggctgtgccaaacaggtttttcccgnagtctttttttgagccgtttgccctgctcttgttggtccntgttggcntgttaaagacacatttcttttccaaaagcaactt

SEQ ID NO: 641557 - DNA, 130 bp, Homo sapiens
gttttggagctgtcgtgactgtgaacgcctgcgctgaggagtacatgcgcgtcagtggggctcatgcatctggctgcactggagtgcctggttcctcttgttctctcctcattacctcctacatacgccg

SEQ ID NO: 641558 - DNA, 1037 bp, Homo sapiens
gcatacgtgcgttatgccaagctgtgaggaccgcttgcgtctgaaagtgagcgtagcaatggatctaatcatgagcagagagtcatcgcacaatcactgggcagaaccggtgaacgggtccggaaatgcgtgacaaatgcccaggagtcatcatcaattccagaaccagcgcaaacaagagtgacatggtcctagtctcagaggacctaagaatgaggtggaaatagatgcagctaaaatacatgtcatgaagcatggtggtcagagtccttggtgtgaagaatacgctattcgaactctctcgtgtggccgaatacttgagtaccagtcttcacaagaatatcatgggcgagaggaggcgcaaagcattgaagagattcgtgcacgaaagcgaaacctaccaaaagagtgcgaatcgtgtccagccagagaatagcaatggcagagaccatgtagtcgatcatcacgcgcgaacgtcgagccaatctgtcgaagctcgcccggagacaggattcttgtctattgagaaagacctgggcaacataagaccgaggtaggaggtctgccatcgcctgccaagctgcgcaactccctcattgggaccaagggccgtctgatccgctccatgcatggaggagtgcggcggggtccacattcactttcgcgtggaaggttcaggacgcgacagcgttgttatcagggggccttcctcggatggtggagaacggcaagaagcagctcctgcatctggcggaggaaagcaaccaagagttcactgttgaattcgcgccagcagatacacgaaattctcatccggaggggggggcagatcgaggggcgaagctgggcagtgtactcccggggtgaggcccggccagaccgtcccccatgggagagacgcggccgagcccaagacgggctctggccaaccggaggtgtggagccccgggggcacaacaaccctccccagcggttagaagaaatgggggccccgggaaacggagggggaaacacaagggggggcagaataacaggaa

SEQ ID NO: 641559 - DNA, 203 bp, Homo sapiens
ttacaaccacgctcaccctgctcacggcttcagcagcacctccatgaactctggggacccgagtggcccacccaccaggatcaccgtgctcaatctcatccagactcatttcaggcactctggagggcctgctgtacaggcccaggaacccgatcaaacaagtctgcacacaactcctcaaattccccacgagccacttcaga

SEQ ID NO: 641560 - DNA, 5812 bp, Homo sapiens
gaggaggagacggcatccagtacagaggggctggacttggacccctgcagcagccctgcacaggagaagcggcatataaagccgcgctgcccgggagccgctcggccacgtccaccggagcatcctgcactgcagggccggtctctcgctccagcagagcctgcgcctttctgactcggtccggaacactgaaaccagtcatcactgcatctttttggcaaaccaggagctcagctgcaggaggcaggatggtctggaggctggtcctgctggctctgtgggtgtggcccagcacgcaagctggtcaccaggacaaagacacgaccttcgaccttttcagtatcagcaacatcaaccgcaagaccattggcgccaagcagttccgcgggcccgaccccggcgtgccggcttaccgcttcgtgcgctttgactacatcccaccggtgaacgcagatgacctcagcaagatcaccaagatcatgcggcagaaggagggcttcttcctcacggcccagctcaagcaggacggcaagtccaggggcacgctgttggctctggagggccccggtctctcccagaggcagttcgagatcgtctccaacggccccgcggacacgctggatctcacctactggattgacggcacccggcatgtggtctccctggaggacgtcggcctggctgactcgcagtggaagaacgtcaccgtgcaggtggctggcgagacctacagcttgcacgtgggctgcgacctcatagacagcttcgctctggacgagcccttctacgagcacctgcaggcggaaaagagccggatgtacgtggccaaaggctctgccagagagagtcacttcaggggtttgcttcagaacgtccacctagtgtttgaaaactctgtggaagatattctaagcaagaagggttgccagcaaggccagggagctgagatcaacgccatcagtgagaacacagagacgctgcgcctgggtccgcatgtcaccaccgagtacgtgggccccagctcggagaggaggcccgaggtgtgcgaacgctcgtgcgaggagctgggaaacatggtccaggagctctcggggctccacgtcctcgtgaaccagctcagcgagaacctcaagagagtgtcgaatgataaccagtttctctgggagctcattggtggccctcctaagacaaggaacatgtcagcttgctggcaggatggccggttctttgcggaaaatgaaacgtgggtggtggacagctgcaccacgtgtacctgcaagaaatttaaaaccatttgccaccaaatcacctgcccgcctgcaacctgcgccagtccatcctttgtggaaggcgaatgctgcccttcctgcctccactcggtggacggtgaggagggctggtctccgtgggcagagtggacccagtgctccgtgacgtgtggctctgggacccagcagagaggccggtcctgtgacgtcaccagcaacacctgcttggggccctcgatccagacacgggcttgcagtctgagcaagtgtgacacccgcatccggcaggacggcggctggagccactggtcaccttggtcttcatgctctgtgacctgtggagttggcaatatcacacgcatccgtctctgcaactccccagtgccccagatggggggcaagaattgcaaagggagtggccgggagaccaaagcctgccagggcgccccatgcccaatcgatggccgctggagcccctggtccccgtggtcggcctgcactgtcacctgtgccggtgggatccgggagcgcacccgggtctgcaacagccctgagcctcagtacggagggaaggcctgcgtgggggatgtgcaggagcgtcagatgtgcaacaagaggagctgccccgtggatggctgtttatccaacccctgcttcccgggagcccagtgcagcagcttccccgatgggtcctggtcatgcggcttctgccctgtgggcttcttgggcaatggcacccactgtgaggacctggacgagtgtgccctggtccccgacatctgcttctccaccagcaaggtgcctcgctgtgtcaacactcagcctggcttccactgcctgccctgcccgccccgatacagagggaaccagcccgtcggggtcggcctggaagcagccaagacggaaaagcaagtgtgtgagcccgaaaacccatgcaaggacaagacacacaactgccacaagcacgcggagtgcatctacctgggtcacttcagcgaccccatgtacaagtgcgagtgccagacaggctacgcgggcgacgggctcatctgcggggaggactcggacctggacggctggcccaacctcaatctggtctgcgccaccaacgccacctaccactgcatcaaggataactgcccccatctgccaaattctgggcaggaagactttgacaaggacgggattggcgatgcctgtgatgatgacgatgacaatgacggtgtgaccgatgagaaggacaactgccagctcctcttcaatccccgccaggctgactatgacaaggatgaggttggggaccgctgtgacaactgcccttacgtgcacaaccctgcccagatcgacacagacaacaatggagagggtgacgcctgctccgtggacattgatggggacgatgtcttcaatgaacgagacaattgtccctacgtctacaacactgaccagagggacacggatggtgacggtgtgggggatcactgtgacaactgccccctggtgcacaaccctgaccagaccgacgtggacaatgaccttgttggggaccagtgtgacaacaacgaggacatagatgacgacggccaccagaacaaccaggacaactgcccctacatctccaacgccaaccaggctgaccatgacagagacggccagggcgacgcctgtgaccctgatgatgacaacgatggcgtccccgatgacagggacaactgccggcttgtgttcaacccagaccaggaggacttggacggtgatggacggggtgatatttgtaaagatgattttgacaatgacaacatcccagatattgatgatgtgtgtcctgaaaacaatgccatcagtgagacagacttcaggaacttccagatggtccccttggatcccaaagggaccacccaaattgatcccaactgggtcattcgccatcaaggcaaggagctggttcagacagccaactcggaccccggcatcgctgtaggttttgacgagtttgggtctgtggacttcagtggcacattctacgtaaacactgaccgggacgacgactatgctggcttcgtctttggttaccagtcaagcagccgcttctatgtggtgatgtggaagcaggtgacgcagacctactgggaggaccagcccacgcgggcctatggctactccggcgtgtccctcaaggtggtgaactccaccacggggacgggcgagcacctgaggaacgcgctgtggcacacggggaacacgccggggcaggtgcgaaccttatggcacgaccccaggaacattggctggaaggactacacggcctataggtggcacctgactcacaggcccaagactggctacatcagagtcttagtgcatgaaggaaaacaggtcatggcagactcaggacctatctatgaccaaacctacgctggcgggcggctgggtctatttgtcttctctcaagaaatggtctatttctcagacctcaagtacgaatgcagagatatttaaacaagatttgctgcatttccggcaatgccctgtgcatgccatggtccctagacacctcagttcattgtggtccttgtggcttctctctctagcagcacctcctgtcccttgaccttaactctgatggttcttcacctcctgccagcaaccccaaacccaagtgccttcagaggataaatatcaatggaactcagagatgaacatctaacccactagaggaaaccagtttggtgatatatgagactttatgtggagtgaaaattgggcatgccattacattgctttttcttgtttgtttaaaaagaatgacgtttacatataaaatgtaattacttattgtatttatgtgtatatggagttgaagggaatactgtgcataagccattatgataaattaagcatgaaaaatattgctgaactacttttggtgcttaaagttgtcactattcttgaattagagttgctctacaatgacacacaaatcccgttaaataaattataaacaagggtcaattcaaatttgaagtaatgttttagtaaggagagattagaagacaacaggcatagcaaatgacataagctaccgattaactaatcggaacatgtaaaacagttacaaaaataaacgaactctcctcttgtcctacaatgaaagccctcatgtgcagtagagatgcagtttcatcaaagaacaaacatccttgcaaatgggtgtgacgcggttccagatgtggatttggcaaaacctcatttaagtaaaaggttagcagagcaaagtgcggtgctttagctgctgcttgtgccgctgtggcgtcggggaggctcctgcctgagcttccttccccagctttgctgcctgagaggaaccagagcagacgcacaggccggaaaaggcgcatctaacgcgtatctaggctttggtaactgcggacaagttgcttttacctgatttgatgatacatttcattaaggttccagttataaatattttgttaatatttattaagtgactatagaatgcaactccatttaccagtaacttattttaaatatgcctagtaacacatatgtagtataatttctagaaacaaacatctaataagtatataatcctgtgaaaatatgaggcttgataatattaggttgtcacgatgaagcatgctagaagctgtaacagaatacatagagaataatgaggagtttatgatggaaccttaatatataatgttgccagcgattttagttcaatatttgttactgttatctatctgctgtatatggaattcttttaattcaaacgctgaaaacgaatcagcatttagtcttgccaggcacacccaataatcagtcatgtgtaatatgcacaagtttgtttttgtttttgttttttttgttggttggtttgtttttttgctttaagttgcatgatctttctgcaggaaatagtcactcatcccactccacataaggggtttagtaagagaagtctgtctgtctgatgatggatagggggcaaatctttttcccctttctgttaatagtcatcacatttctatgccaaacaggaacgatccataactttagtcttaatgtacacattgcattttgataaaattaattttgttgtttcctttgaggttgatcgttgtgttgttgttttgctgcactttttacttttttgcgtgtggagctgtattcccgagaccaacgaagcgttgggatacttcattaaatgtagcgactgtcaacagcgtgcaggttttctgtttctgtgttgtggggtcaaccgtacaatggtgtgggaatgacgatgatgtgaatatttagaatgtaccatattttttgtaaattatttatgtttttctaaacaaatttatcgtataggttgatgaaacgtcatgtgttttgccaaagactgtaaatatttatttatgtgttcacatggtcaaaatttcaccactgaaaccctgcacttagctagaacctcatttttaaagattaacaacaggaaataaattgtaaaaaaggttttctataaaaaaaaa

SEQ ID NO: 641561 - DNA, 450 bp, Homo sapiens
  misc_feature (288)..(288): n is a, c, g, or t
gctgaggtgcgggaatcttgctggggacatggtcatgtggattgtcgtgcgtgagctggggtcctctgtcccaaaacgtatgcgtgtgaaaaagacaggcccagagaaatctgctatactccctgccggggccacaccacctcggtgctgccatgataacggtatctccatgtgtggctattgccctctaagaagaagtcgttgtggtcagagcgctcacgagatacctgcacgtgccgaagtgcagtggtcgcgtcggccaaaggtgccaagcagtttgggttgtcntatgttgcatagcgcattacctggggtcgagctactaggaagcggcgttcaacgcttgtgcatcccataggttccaacggtgcgtcgttccatggcgcatccatcatcgcattgtgtggcatccagatctcttagtgcgacatccagggattgtcaatcgac

SEQ ID NO: 641562 - DNA, 765 bp, Homo sapiens
  misc_feature (654)..(655): n is a, c, g, or t
  misc_feature (668)..(669): n is a, c, g, or t
  misc_feature (671)..(671): n is a, c, g, or t
  misc_feature (676)..(676): n is a, c, g, or t
  misc_feature (682)..(683): n is a, c, g, or t
  misc_feature (694)..(694): n is a, c, g, or t
  misc_feature (697)..(697): n is a, c, g, or t
  misc_feature (703)..(704): n is a, c, g, or t
  misc_feature (712)..(712): n is a, c, g, or t
accaatgcacaccgcttacaggcaaatacccctctaggcggcacagcctgatctctctctgcttcttgtgttagtccggcaggacggcggctggagccactggtcaccttggtcttcatgctctgtgacctgtggagttggcaatatcacacgcatccgtctctgcaactccccagtgccccagatggggggcaagaattgcaaagggagtggccgggagaccaaagcctgccagggcgccccatgcccaatcgatggccgctggagcccctggtccccgtggtcggcctgcactgtcacctgtgccggtgggatccgggagcgcacccgggtctgcaacagccctgagcctcagtacggagggaaggcctgcgtgggggatgtgcaggagcgtcagatgtgcaacaagaggagctgccccgtgggtgagtgaggggtagaagcaggggcactgaaacccgggcttccattctgatgaaaagcacaaacgctttgggaaactagatgaaaaacacagaaaagaaaaatcaattttagttgcacacgcaaagataactacttttaacatctgtgtttcagtcctcctgtatttctaatgtaaaaacaaaaagatgccaggtggcgtggcctgtggaatgtgggtagttgtgtggnntggaatgtggtgnntnggtanttgtgnngtgtggcctgnggnatgtgnntgttgtgnggcgtggcctgtggaatgtgggcagttcgtgtgcatgtatcgtggactgtgtg

SEQ ID NO: 641563 - DNA, 5520 bp, Homo sapiens
gaggaggagacggcatccagtacagaggggctggacttggacccctgcagcagccctgcacaggagaagcggcatataaagccgcgctgcccgggagccgctcggccacgtccaccggagcatcctgcactgcagggccggtctctcgctccagcagagcctgcgcctttctgactcggtccggaacactgaaaccagtcatcactgcatctttttggcaaaccaggagctcagctgcaggaggcaggatggtctggaggctggtcctgctggctctgtgggtgtggcccagcacgcaagctggtcaccaggacaaagacacgaccttcgaccttttcagtatcagcaacatcaaccgcaagaccattggcgccaagcagttccgcgggcccgaccccggcgtgccggcttaccgcttcgtgcgctttgactacatcccaccggtgaacgcagatgacctcagcaagatcaccaagatcatgcggcagaaggagggcttcttcctcacggcccagctcaagcaggacggcaagtccaggggcacgctgttggctctggagggccccggtctctcccagaggcagttcgagatcgtctccaacggccccgcggacacgctggatctcacctactggattgacggcacccggcatgtggtctccctggaggacgtcggcctggctgactcgcagtggaagaacgtcaccgtgcaggtggctggcgagacctacagcttgcacgtgggctgcgacctcatagacagcttcgctctggacgagcccttctacgagcacctgcaggcggaaaagagccggatgtacgtggccaaaggctctgccagagagagtcacttcaggggtttgcttcagaacgtccacctagtgtttgaaaactctgtggaagatattctaagcaagaagggttgccagcaaggccagggagctgagatcaacgccatcagtgagaacacagagacgctgcgcctgggtccgcatgtcaccaccgagtacgtgggccccagctcggagaggaggcccgaggtgtgcgaacgctcgtgcgaggagctgggaaacatggtccaggagctctcggggctccacgtcctcgtgaaccagctcagcgagaacctcaagagagtgtcgaatgataaccagtttctctgggagctcattggtggccctcctaagacaaggaacatgtcagcttgctggcaggatggccggttctttgcggaaaatgaaacgtgggtggtggacagctgcaccacgtgtacctgcaagaaatttaaaaccatttgccaccaaatcacctgcccgcctgcaacctgcgccagtccatcctttgtggaaggcgaatgctgcccttcctgcctccactcggtggacggtgaggagggctggtctccgtgggcagagtggacccagtgctccgtgacgtgtggctctgggacccagcagagaggccggtcctgtgacgtcaccagcaacacctgcttggggccctcgatccagacacgggcttgcagtctgagcaagtgtgacacccgcatccggcaggacggcggctggagccactggtcaccttggtcttcatgctctgtgacctgtggagttggcaatatcacacgcatccgtctctgcaactccccagtgccccagatggggggcaagaattgcaaagggagtggccgggagaccaaagcctgccagggcgccccatgcccaatcgatggccgctggagcccctggtccccgtggtcggcctgcactgtcacctgtgccggtgggatccgggagcgcacccgggtctgcaacagccctgagcctcagtacggagggaaggcctgcgtgggggatgtgcaggagcgtcagatgtgcaacaagaggagctgccccgtggatggctgtttatccaacccctgcttcccgggagcccagtgcagcagcttccccgatgggtcctggtcatgcggcttctgccctgtgggcttcttgggcaatggcacccactgtgaggacctggacgagtgtgccctggtccccgacatctgcttctccaccagcaaggtgcctcgctgtgtcaacactcagcctggcttccactgcctgccctgcccgccccgatacagagggaaccagcccgtcggggtcggcctggaagcagccaagacggaaaagcaagtgtgtgagcccgaaaacccatgcaaggacaagacacacaactgccacaagcacgcggagtgcatctacctgggtcacttcagcgaccccatgtacaagtgcgagtgccagacaggctacgcgggcgacgggctcatctgcggggaggactcggacctggacggctggcccaacctcaatctggtctgcgccaccaacgccacctaccactgcatcaaggataactgcccccatctgccaaattctgggcaggaagactttgacaaggacgggattggcgatgcctgtgatgatgacgatgacaatgacggtgtgaccgatgagaaggacaactgccagctcctcttcaatccccgccaggctgactatgacaaggatgaggttggggaccgctgtgacaactgcccttacgtgcacaaccctgcccagatcgacacagacaacaatggagagggtgacgcctgctccgtggacattgatggggacgatgtcttcaatgaacgagacaattgtccctacgtctacaacactgaccagagggacacggatggtgacggtgtgggggatcactgtgacaactgccccctggtgcacaaccctgaccagaccgacgtggacaatgaccttgttggggaccagtgtgacaacaacgaggacatagatgacgacggccaccagaacaaccaggacaactgcccctacatctccaacgccaaccaggctgaccatgacagagacggccagggcgacgcctgtgaccctgatgatgacaacgatggcgtccccgatgacagggacaactgccggcttgtgttcaacccagaccaggaggacttggacggtgatggacggggtgatatttgtaaagatgattttgacaatgacaacatcccagatattgatgatgtgtgtcctgaaaacaatgccatcagtgagacagacttcaggaacttccagatggtccccttggatcccaaagggaccacccaaattgatcccaactgggtcattcgccatcaaggcaaggagctggttcagacagccaactcggaccccggcatcgctgtaggttttgacgagtttgggtctgtggacttcagtggcacattctacgtaaacactgaccgggacgacgactatgctggcttcgtctttggttaccagtcaagcagccgcttctatgtggtgatgtggaagcaggtgacgcagacctactgggaggaccagcccacgcgggcctatggctactccggcgtgtccctcaaggtggtgaactccaccacggggacgggcgagcacctgaggaacgcgctgtggcacacggggaacacgccggggcaggtgcgaaccttatggcacgaccccaggaacattggctggaaggactacacggcctataggtggcacctgactcacaggcccaagactggctacatcagagtcttagtgcatgaaggaaaacaggtcatggcagactcaggacctatctatgaccaaacctacgctggcgggcggctgggtctatttgtcttctctcaagaaatggtctatttctcagacctcaagtacgaatgcagagatatttaaacaagatttgctgcatttccggcaatgccctgtgcatgccatggtccctagacacctcagttcattgtggtccttgtggcttctctctctagcagcacctcctgtcccttgaccttaactctgatggttcttcacctcctgccagcaaccccaaacccaagtgccttcagaggataaatatcaatggaactcagagatgaacatctaacccactagaggaaaccagtttggtgatatatgagactttatgtggagtgaaaattgggcatgccattacattgctttttcttgtttgtttaaaaagaatgacgtttacatataaaatgtaattacttattgtatttatgtgtatatggagttgaagggaatactgtgcataagccattatgataaattaagcatgaaaaatattgctgaactacttttggtgcttaaagttgtcactattcttgaattagagttgctctacaatgacacacaaatcccgttaaataaattataaacaagggtcaattcaaatttgaagtaatgttttagtaaggagagattagaagacaacaggcatagcaaatgacataagctaccgattaactaatcggaacatgtaaaacagttacaaaaataaacgaactctcctcttgtcctacaatgaaagccctcatgtgcagtagagatgcagtttcatcaaagaacaaacatccttgcaaatgggtgtgacgcggttccagatgtggatttggcaaaacctcatttaagtaaaaggttagcagagcaaagtgcggtgctttagctgctgcttgtgccgctgtggcgtcggggaggctcctgcctgagcttccttccccagctttgctgcctgagaggaaccagagcagacgcacaggccggaaaaggcgcatctaacgcgtatctaggctttggtaactgcggacaagttgcttttacctgatttgatgatacatttcattaaggttccagttataaatattttgttaatatttattaagtgactatagaatgcaactccatttaccagtaacttattttaaatatgcctagtaacacatatgtagtataatttctagaaacaaacatctaataagtatataatcctgtgaaaatatgaggcttgataatattaggttgtcacgatgaagcatgctagaagctgtaacagaatacatagagaataatgaggagtttatgatggaaccttaatatataatgttgccagcgattttagttcaatatttgttactgttatctatctgctgtatatggaattcttttaattcaaacgctgaaaacgaatcagcatttagtcttgccaggcacacccaataatcagtcatgtgtaatatgcacaagtttgtttttgtttttgttttttttgttggttggtttgtttttttgctttaagttgcatgatctttctgcaggaaatagtcactcatcccactccacataaggggtttagtaagagaagtctgtctgtctgatgatggatagggggcaaatctttttcccctttctgttaatagtcatcacatttctatgccaaacaggaacgatccataactttagtcttaatgtacacattgcattttgataaaattaattttgttgtttcctttgaggttgatcgttgtgttgttgttttgctgcactttttacttttttgcgtgtggagctgtattcccgagaccaacgaagcgttgggatacttcattaaatgtagcgactgtcaacagcg

SEQ ID NO: 641564 - DNA, 107 bp, Homo sapiens
tgtcacgctccacgccaacgcatcagaaacagatacagaggagagaagaaaacagaggtcaaacacttcagttttacagatgtctattccagactaaaatgccaagg

SEQ ID NO: 641565 - DNA, 5610 bp, Homo sapiens
gaggaggagacggcatccagtacagaggggctggacttggacccctgcagcagccctgcacaggagaagcggcatataaagccgcgctgcccgggagccgctcggccacgtccaccggagcatcctgcactgcagggccggtctctcgctccagcagagcctgcgcctttctgactcggtccggaacactgaaaccagtcatcactgcatctttttggcaaaccaggagctcagctgcaggaggcaggatggtctggaggctggtcctgctggctctgtgggtgtggcccagcacgcaagctggtcaccaggacaaagacacgaccttcgaccttttcagtatcagcaacatcaaccgcaagaccattggcgccaagcagttccgcgggcccgaccccggcgtgccggcttaccgcttcgtgcgctttgactacatcccaccggtgaacgcagatgacctcagcaagatcaccaagatcatgcggcagaaggagggcttcttcctcacggcccagctcaagcaggacggcaagtccaggggcacgctgttggctctggagggccccggtctctcccagaggcagttcgagatcgtctccaacggccccgcggacacgctggatctcacctactggattgacggcacccggcatgtggtctccctggaggacgtcggcctggctgactcgcagtggaagaacgtcaccgtgcaggtggctggcgagacctacagcttgcacgtgggctgcgacctcatagacagcttcgctctggacgagcccttctacgagcacctgcaggcggaaaagagccggatgtacgtggccaaaggctctgccagagagagtcacttcaggggtttgcttcagaacgtccacctagtgtttgaaaactctgtggaagatattctaagcaagaagggttgccagcaaggccagggagctgagatcaacgccatcagtgagaacacagagacgctgcgcctgggtccgcatgtcaccaccgagtacgtgggccccagctcggagaggaggcccgaggtgtgcgaacgctcgtgcgaggagctgggaaacatggtccaggagctctcggggctccacgtcctcgtgaaccagctcagcgagaacctcaagagagtgtcgaatgataaccagtttctctgggagctcattggtggccctcctaagacaaggaacatgtcagcttgctggcaggatggccggttctttgcggaaaatgaaacgtgggtggtggacagctgcaccacgtgtacctgcaagaaatttaaaaccatttgccaccaaatcacctgcccgcctgcaacctgcgccagtccatcctttgtggaaggcgaatgctgcccttcctgcctccactcggtggacggtgaggagggctggtctccgtgggcagagtggacccagtgctccgtgacgtgtggctctgggacccagcagagaggccggtcctgtgacgtcaccagcaacacctgcttggggccctcgatccagacacgggcttgcagtctgagcaagtgtgacacccgcatccggcaggacggcggctggagccactggtcaccttggtcttcatgctctgtgacctgtggagttggcaatatcacacgcatccgtctctgcaactccccagtgccccagatggggggcaagaattgcaaagggagtggccgggagaccaaagcctgccagggcgccccatgcccaatcgatggccgctggagcccctggtccccgtggtcggcctgcactgtcacctgtgccggtgggatccgggagcgcacccgggtctgcaacagccctgagcctcagtacggagggaaggcctgcgtgggggatgtgcaggagcgtcagatgtgcaacaagaggagctgccccgtggatggctgtttatccaacccctgcttcccgggagcccagtgcagcagcttccccgatgggtcctggtcatgcggcttctgccctgtgggcttcttgggcaatggcacccactgtgaggacctggacgagtgtgccctggtccccgacatctgcttctccaccagcaaggtgcctcgctgtgtcaacactcagcctggcttccactgcctgccctgcccgccccgatacagagggaaccagcccgtcggggtcggcctggaagcagccaagacggaaaagcaagtgtgtgagcccgaaaacccatgcaaggacaagacacacaactgccacaagcacgcggagtgcatctacctgggtcacttcagcgaccccatgtacaagtgcgagtgccagacaggctacgcgggcgacgggctcatctgcggggaggactcggacctggacggctggcccaacctcaatctggtctgcgccaccaacgccacctaccactgcatcaaggataactgcccccatctgccaaattctgggcaggaagactttgacaaggacgggattggcgatgcctgtgatgatgacgatgacaatgacggtgtgaccgatgagaaggacaactgccagctcctcttcaatccccgccaggctgactatgacaaggatgaggttggggaccgctgtgacaactgcccttacgtgcacaaccctgcccagatcgacacagacaacaatggagagggtgacgcctgctccgtggacattgatggggacgatgtcttcaatgaacgagacaattgtccctacgtctacaacactgaccagagggacacggatggtgacggtgtgggggatcactgtgacaactgccccctggtgcacaaccctgaccagaccgacgtggacaatgaccttgttggggaccagtgtgacaacaacgaggacatagatgacgacggccaccagaacaaccaggacaactgcccctacatctccaacgccaaccaggctgaccatgacagagacggccagggcgacgcctgtgaccctgatgatgacaacgatggcgtccccgatgacagggacaactgccggcttgtgttcaacccagaccaggaggacttggacggtgatggacggggtgatatttgtaaagatgattttgacaatgacaacatcccagatattgatgatgtgtgtcctgaaaacaatgccatcagtgagacagacttcaggaacttccagatggtccccttggatcccaaagggaccacccaaattgatcccaactgggtcattcgccatcaaggcaaggagctggttcagacagccaactcggaccccggcatcgctgtaggttttgacgagtttgggtctgtggacttcagtggcacattctacgtaaacactgaccgggacgacgactatgctggcttcgtctttggttaccagtcaagcagccgcttctatgtggtgatgtggaagcaggtgacgcagacctactgggaggaccagcccacgcgggcctatggctactccggcgtgtccctcaaggtggtgaactccaccacggggacgggcgagcacctgaggaacgcgctgtggcacacggggaacacgccggggcaggtgcgaaccttatggcacgaccccaggaacattggctggaaggactacacggcctataggtggcacctgactcacaggcccaagactggctacatcagagtcttagtgcatgaaggaaaacaggtcatggcagactcaggacctatctatgaccaaacctacgctggcgggcggctgggtctatttgtcttctctcaagaaatggtctatttctcagacctcaagtacgaatgcacagagatgaacatctaacccactagaggaaaccagtttggtgatatatgagactttatgtggagtgaaaattgggcatgccattacattgctttttcttgtttgtttaaaaagaatgacgtttacatataaaatgtaattacttattgtatttatgtgtatatggagttgaagggaatactgtgcataagccattatgataaattaagcatgaaaaatattgctgaactacttttggtgcttaaagttgtcactattcttgaattagagttgctctacaatgacacacaaatcccgttaaataaattataaacaagggtcaattcaaatttgaagtaatgttttagtaaggagagattagaagacaacaggcatagcaaatgacataagctaccgattaactaatcggaacatgtaaaacagttacaaaaataaacgaactctcctcttgtcctacaatgaaagccctcatgtgcagtagagatgcagtttcatcaaagaacaaacatccttgcaaatgggtgtgacgcggttccagatgtggatttggcaaaacctcatttaagtaaaaggttagcagagcaaagtgcggtgctttagctgctgcttgtgccgctgtggcgtcggggaggctcctgcctgagcttccttccccagctttgctgcctgagaggaaccagagcagacgcacaggccggaaaaggcgcatctaacgcgtatctaggctttggtaactgcggacaagttgcttttacctgatttgatgatacatttcattaaggttccagttataaatattttgttaatatttattaagtgactatagaatgcaactccatttaccagtaacttattttaaatatgcctagtaacacatatgtagtataatttctagaaacaaacatctaataagtatataatcctgtgaaaatatgaggcttgataatattaggttgtcacgatgaagcatgctagaagctgtaacagaatacatagagaataatgaggagtttatgatggaaccttaatatataatgttgccagcgattttagttcaatatttgttactgttatctatctgctgtatatggaattcttttaattcaaacgctgaaaacgaatcagcatttagtcttgccaggcacacccaataatcagtcatgtgtaatatgcacaagtttgtttttgtttttgttttttttgttggttggtttgtttttttgctttaagttgcatgatctttctgcaggaaatagtcactcatcccactccacataaggggtttagtaagagaagtctgtctgtctgatgatggatagggggcaaatctttttcccctttctgttaatagtcatcacatttctatgccaaacaggaacgatccataactttagtcttaatgtacacattgcattttgataaaattaattttgttgtttcctttgaggttgatcgttgtgttgttgttttgctgcactttttacttttttgcgtgtggagctgtattcccgagaccaacgaagcgttgggatacttcattaaatgtagcgactgtcaacagcgtgcaggttttctgtttctgtgttgtggggtcaaccgtacaatggtgtgggaatgacgatgatgtgaatatttagaatgtaccatattttttgtaaattatttatgtttttctaaacaaatttatcgtataggttgatgaaacgtcatgtgttttgccaaagactgtaaatatttatttatgtgttcacatggtcaaaatttcaccactgaaaccctgcacttagctagaacctcatttttaaagattaacaacaggaaataaattgtaaaaaaggttttctataaaaaaaaa

SEQ ID NO: 641566 - DNA, 2100 bp, Homo sapiens
  misc_feature (23)..(23): n is a, c, g, or t
  misc_feature (39)..(39): n is a, c, g, or t
  misc_feature (41)..(42): n is a, c, g, or t
tttcccagttatgctaattgttnattgctttttttttcntnntggagatatttaaacaagatttgctgcatttccggcaatgccctgtgcatgccatggtccctagacacctcagttcattgtggtccttgtggcttctctctctagcagcacctcctgtcccttgaccttaactctgatggttcttcacctcctgccagcaaccccaaacccaagtgccttcagaggataaatatcaatggaactcagagatgaacatctaacccactagaggaaaccagtttggtgatatatgagactttatgtggagtgaaaattgggcatgccattacattgctttttcttgtttgtttaaaaagaatgacgtttacatataaaatgtaattacttattgtatttatgtgtatatggagttgaagggaatactgtgcataagccattatgataaattaagcatgaaaaatattgctgaactacttttggtgcttaaagttgtcactattcttgaattagagttgctctacaatgacacacaaatcccgttaaataaattataaacaagggtcaattcaaatttgaagtaatgttttagtaaggagagattagaagacaacaggcatagcaaatgacataagctaccgattaactaatcggaacatgtaaaacagttacaaaaataaacgaactctcctcttgtcctacaatgaaagccctcatgtgcagtagagatgcagtttcatcaaagaacaaacatccttgcaaatgggtgtgacgcggttccagatgtggatttggcaaaacctcatttaagtaaaaggttagcagagcaaagtgcggtgctttagctgctgcttgtgccgctgtggcgtcggggaggctcctgcctgagcttccttccccagctttgctgcctgagaggaaccagagcagacgcacaggccggaaaaggcgcatctaacgcgtatctaggctttggtaactgcggacaagttgcttttacctgatttgatgatacatttcattaaggttccagttataaatattttgttaatatttattaagtgactatagaatgcaactccatttaccagtaacttattttaaatatgcctagtaacacatatgtagtataatttctagaaacaaacatctaataagtatataatcctgtgaaaatatgaggcttgataatattaggttgtcacgatgaagcatgctagaagctgtaacagaatacatagagaataatgaggagtttatgatggaaccttaatatataatgttgccagcgattttagttcaatatttgttactgttatctatctgctgtatatggaattcttttaattcaaacgctgaaaacgaatcagcatttagtcttgccaggcacacccaataatcagtcatgtgtaatatgcacaagtttgtttttgtttttgttttttttgttggttggtttgtttttttgctttaagttgcatgatctttctgcaggaaatagtcactcatcccactccacataaggggtttagtaagagaagtctgtctgtctgatgatggatagggggcaaatctttttcccctttctgttaatagtcatcacatttctatgccaaacaggaacgatccataactttagtcttaatgtacacattgcattttgataaaattaattttgttgtttcctttgaggttgatcgttgtgttgttgttttgctgcactttttacttttttgcgtgtggagctgtattcccgagaccaacgaagcgttgggatacttcattaaatgtagcgactgtcaacagcgtgcaggttttctgtttctgtgttgtggggtcaaccgtacaatggtgtgggaatgacgatgatgtgaatatttagaatgtaccatattttttgtaaattatttatgtttttctaaacaaatttatcgtataggttgatgaaacgtcatgtgttttgccaaagactgtaaatatttatttatgtgttcacatggtcaaaatttcaccactgaaaccctgcacttagctagaacctcatttttaaagattaacaacaggaaataaattgtaaaaaaggttttctataaaaaaaaa

SEQ ID NO: 641567 - DNA, 260 bp, Homo sapiens
gtgcagtcagttctgcaagcgactggacacatcagccgattttaggagtgccttatttttcttcccaataaagcatactcacatcatttccttgctctaagtttggtggttgggtatctaggggtagaattgttgggcagtgtgaaaatattattttgacagaataactattttttgcgaagcttgcttgcacttgtgcttgttgacagaggcctttgtgatcttgggacacgaggagtaccctgcctcacgaatcttga

SEQ ID NO: 641568 - DNA, 554 bp, Homo sapiens
cagttacactaccccattaaaaagtgaacaaaggccgggcacagtggctcacggctataatcccagcactttgggaggccgaggcaggcagatcacaagatcaagagatcgagaccaccctggccaatatggtgaaaccctatctctactgaaaatgcaaaaattagctgggcatggtggtgcacacctgtggtcccagctactcgggaggctgaggcaagagaatcacttgaacccaggaggcggatgttgccgtgagctgagattgcaccatccagcctggcgacagagtgagactccatatcaaaagaaaaaaaaaaaaaaaaaactccattggcttccaaaattttttcctcataatttctgccttcaatttggtcatggatgtggctaattggtaattttcatgtggtatattggctaccaaattgtttataatgattccatatcctggtccctttccaattttaagagaattattaatattttttggcactattattttactgctaagaattccctttttggtgtaaccggatgggggaccctctaga

SEQ ID NO: 641569 - DNA, 1250 bp, Homo sapiens
tctgggacaacagagcgaaaccctggttttcgctcagttttattttttaaaaaggggcaaaagcccaggtgaaagggtgtggtgccccaggaactccctcgcctcccttcccaaggctgaggtgaaaaaggccaccccatctcatctcccattctttaaaaaggctgtggaaaagagaagttcccaactttgtgcagccatttgtgcaaagctctcccggagactcctttcaggctcgtggaggcgggcggggtgtgcggagaccttctcgggaattgtctcacccgtgtgtgagaacattttctcctgtggagaatgtggtggagcctcgtgatctcgtggctccccgtggtgccccacaaaggcccgccgaactcccacatctcagaagccgaacaatattttgcacagagcacaccctgtgtgtgctgtgttatactagacacgcgtgtgctccttatggagagtaagagagaggatgtcacccgcgcgcttggatgcgacatattgaaaaccgagcaccgcatatagggatagaagtgtgtgtccccagggagctccacatctgttgaggagaaaacgagcatactacctctcaacaaggcgccccccgcgtgacaacaagtgtgttggtgggtggtgtacacaccctacttgcagcgcgtgtatatacaatagtgtgaggcaccaacaagatgtagtctatgagggaggaaacaatataatgatgaacggcttataggagaacattgggagggagaatattggagaacagccctcgtggatgattgaatggggcagacataaaaaacatctcccccgtagtgggagggaagttcccaacaatattaatagacaacacccttacctatacataatgtagacttgttgggagcacccactagctaacaccacccatgtgtgggggccccccctttatatgattaccccccccaaagatgacaagtcgcatgagctagtgatggtgtggtgacccccctcctccaccgagaaactgcgacggcgacatacaataggaaagagaactacatcatcgaggggagagaaggtaatgaaccaatataacaaaagcgacgcaccctataaaaggtagttaccgcaccggtgaaggacgggacatatcaaaaaaaaccgagggagtacaaaaccgggagacacacatgataagaggttgggcaacaaaatctacatctgagcaacttaagacacaaaatcacatcgaggacgca

SEQ ID NO: 641570 - DNA, 1074 bp, Homo sapiens
gaggaggagacggcatccagtacagaggggctggacttggacccctgcagcagccctgcacaggagaagcggcatataaagccgcgctgcccgggagccgctcggccacgtccaccggagcatcctgcactgcagggccggtctctcgctccagcagagcctgcgcctttctgactcggtccggaacactgaaaccagtcatcactgcatctttttggcaaaccaggagctcagctgcaggaggcaggatggtctggaggctggtcctgctggctctgtgggtgtggcccagcacgcaagctggtcaccaggacaaagacacgaccttcgaccttttcagtatcagcaacatcaaccgcaagaccattggcgccaagcagttccgcgggcccgaccccggcgtgccggcttaccgcttcgtgcgctttgactacatcccaccggtgaacgcagatgacctcagcaagatcaccaagatcatgcggcagaaggagggcttcttcctcacggcccagctcaagcaggacggcaagtccaggggcacgctgttggctctggagggccccggtctctcccagaggcagttcgagatcgtctccaacggccccgcggacacgctggatctcacctactggattgacggcacccggcatgtggtctccctggaggacgtcggcctggctgactcgcagtggaagaacgtcaccgtgcaggtggctggcgagacctacagcttgcacgtgggctgcgacctcatagacagcttcgctctggacgagcccttctacgagcacctgcaggcggaaaagagccggatgtacgtggccaaaggctctgccagagagagtcacttcaggggtttgcttcagaacgtccacctagtgtttgaaaactctgtggaagatattctaagcaagaagggttgccagcaaggccagggaggtaggtgtgttgtgaaaaatgcattttatatactggcttggatggatttctattgtgacatggtgtatgtgtgtgtgtgtatgtgtgtgcattcatgcttgtaaaaatttaagtaaaaatatttgggtaact

SEQ ID NO: 641571 - DNA, 755 bp, Homo sapiens
  misc_feature (590)..(590): n is a, c, g, or t
  misc_feature (657)..(657): n is a, c, g, or t
gaggaggagacggcatccagtacagaggggctggacttggacccctgcagcagccctgcacaggagaagcggcatataaagccgcgctgcccgggagccgctcggccacgtccaccggagcatcctgcactgcagggccggtctctcgctccagcagagcctgcgcctttctgactcggtccggaacactgaaaccagtcatcactgcatctttttggcaaaccaggtacgattatttcttaaactcaatcaattatttaatggtgctctaattttaagaaattagagttctcgaactctaagaagcggagaagaaaaggagcatttcgattcttaacttaaggtgggtggtgtatctattaacactaaatggcaagtgtttcttcacgtggtgtttctactgcccgcttgaagagcaaggcacgtggccgctcctcagcttttcctccgtggctgtgctttcaccagccgggcaccccttcctctctgagggttgtggctgctgctatttcaatgtatatacctgcctgggacccgggtaaacgctttatgttttcagtttccgaagaagaagattccacatgagagtntgttattgaggagagaattagaaacaactcccggaatatctgaaaagtaactggagattagagaganactctgattgttaacatcattattagtagattagagagagactctgatcgttaacattattagtagattaaagagagactctgattgttaacattatt

SEQ ID NO: 641572 - DNA, 388 bp, Homo sapiens
atggaaggtgacaaagattctttgcttggccaaactttagtcagactcctcaaccttttcgtaggtttatctgtgcatttccttggaaaatccagttagaaccctctaccctcaatatttgatcaggttcctcatcctctaccatccaaggtgatgtttgatcaccttgacctattttcagcaagaaacccctttactcctgaagttcctttttagtaattttttatccagtgaccccaagctttttgttccttggctataaattcccacttgcccatgctgtatttagagttgagcccactctttttttcctaattcagaatcccattgccatggttgctatacctatcctgatggtccggaataaaatctgtcttactgtgcttta

SEQ ID NO: 641573 - DNA, 1093 bp, Homo sapiens
gtgccaagacttctgtgtgcgtgctgtgctgagtgcgtgctgtgcctgagcgagctggctggactcggggcgcggggagtcgatggcatttgcgctgtggcttctggagctgtagcgccagggcctgatgcctttgaagcaggaggaggcggaggatgagagtggggctcctctatcgggaccccctccccatgtggatctgcccatggcggctggcgtgcggctggcgtgcggatggatgtgctgacctgagaagatacccgccctgcgccccgctctgctgtgggctgctgctggcgctctggctgtgctgctgctgaccccgcgcatgcatttgcagtgtcgagatggctatgaaccctgtgtcaatgaaggaatgtgtgttacctaccacaatggcacaggatactgcaaatgtccagaaggcttcttggcgggaatatcgtcaacatcgagacccctgtgcagaagaagctgctgccagaatggtgggacttgtgtggcccagtgccatgctgggtgaaagccacgtgcctgatgtgcctcaggctttacacggacgaggacttgccagtactcgacatctcatccatgcttggtgtctcgaccttgcctgaatggccggaacatgccatattgctcagccgggatacctatgagtgcacctgtacaggtcgggtctaacaggtaaggatgtgcaatggacccgttgcctagctgtctcattccctgtggccaatggaagtagctgtaccactgtgggcaccagtctcctgcaaatggctacaggctctacaggggcagaagctgtggacggatggctcatgaggtgtgacaatccaaggcagctggcaagcatggttgtaattgctcaacctgctggactccatacagattcagtggcattaagggcatagcaaggcctcgaatgtgagcgtcccttatttgcccgtgagcctcatctggtatacagggactgcctctggtgaaagtgagaaactaatagtgaacgggccacgaataggagatacaaccttgtaaatcgagacggaaaaaagacaactaacaacatgtcaatacgacaaaggagaga

SEQ ID NO: 641574 - DNA, 943 bp, Homo sapiens
  misc_feature (923)..(923): n is a, c, g, or t
gaggaggagacggcatccagtacagaggggctggacttggacccctgcagcagccctgcacaggagaagcggcatataaagccgcgctgcccgggagccgctcggccacgtccaccggagcatcctgcactgcagggccggtctctcgctccagcagagcctgcgcctttctgactcggtccggaacactgaaaccagtcatcactgcatctttttggcaaaccaggagctcagctgcaggaggcaggatggtctggaggctggtcctgctggctctgtgggtgtggcccagcacgcaagctggtcaccaggacaaagacacgaccttcgaccttttcagtatcagcaacatcaaccgcaagaccattggcgccaagcagttccgcgggcccgaccccggcgtgccggcttaccgcttcgtgcgctttgactacatcccaccggtgaacgcagatgacctcagcaagatcaccaagatcatgcggcagaaggagggcttcttcctcacggcccagctcaagcaggacggcaagtccaggggcacgctgttggctctggagggccccggtctctcccagaggcagttcgagatcgtctccaacggccccgcggacacgctggatctcacctactggattgacggcacccggcatgtggtctccctggaggacgtcggcctggctgactcgcagtggaagaacgtcaccgtgcaggtggctggcgagacctacagcttgcacgtgggctgcgacctcatagacagcttcgctctggacgagcccttctacgagcacctgcaggcggaaaagagccggatgtacgtggccaaaggctctgccagagagagtcacttcagggtacgctctgcagggaggtggccgcctgtgaggggaggaaaagagcttaagctgggaacttgatcntgctaattgcgtctgggtga

SEQ ID NO: 641575 - DNA, 186 bp, Homo sapiens
gacgtccttcatcatacatacctccatcctggcttaccccagagatagcagtcaaaaagtatttagaattaagaaagaactcaactacagccaatgttgttccagcagtggaacatgaaaagatgttgtaggtggggcatttctgagttataatgtacaaatcatgggtaggtatgatgaaggacg

SEQ ID NO: 641576 - DNA, 1026 bp, Homo sapiens
gtataactgtacaaagttggtcgctctactgtcgccaaatgtgagcgagatatccaactatgtcagggggggagtcatattacgaaaatccagaggggtcagatgacagaagttcaaggacgtgaaggtacaccagggatagacgtacacctagtaagcacgtggatacgataaatatgcaggaagagatagtaatgattttttgggttgagtagccgtcgaaggctatgttggaagtcatcagaagtgagagatgtagattgacagccgtatttgacgtgaggattaatgtgtattcaaagggtgtactatcattaaggaatccatatgacagatgactcgaggatcctcatgggcctgtgtctgattcataatgggtagccgagaaatagacagaaagagttcaggtgaaattgtcttggagaatatatctagggtcattatagtgagccgtggcaatacagtcgcagggtgccgatggggataattgtagagcgtaggatcggtgttgaagcgaggaactgcatagcggtgagcgaaagaagcgcttatcgcagaaggaccactgctatggtggccgacgtgtatactgaacatggactcatgtcagtagcaggttgctgtggtggctatttgaagtgcaaaacagctctattgattgcatgattcaaatgcaaggaatgtaggttccataggaagaggatcagtgacgtgcttctatgctaagtggtaatgaaaaaccctctcaaatgaggcgagtagtactaggatgacgcataaatgggcatggacggggaagcaagagaaccaaaaggactctgggtgaatacatgcaagataataacgagagtgatccattgccttggaattttggcatgcgagccgtgaatagaacaatcgtgaggggcttatggaaggataatcctttggtgcttagaagaagatattcaatcaggcattagcaagatgggatgaagaggacccgtagagggtatcgatttgagggaatcaggcaagggtagaaag

SEQ ID NO: 641577 - DNA, 680 bp, Homo sapiens
agtgaaatgaaattgaaataaaatcgaaatgagatgaaatgatgagatgatgaaataaaatgatgaaatgagatgtgatgagatgaaatgatgacatgaaatgatgagatgagatgagatgacatgaaataatgaaatgaaatgatgagataagatgaaaagagttgatgagatgatgagatgaaatggaggatgcaacagcatgaccatgcatgagcatgaaatgtaaatgtatgagatgaaatggaggtgaaatgcaaatttagcatgcaaatgtaatgagatgcaaatgaaatggccataatgcaaatgaaataatgaaatggcagatgcaaataaaataatgacatgcatgaaatactggaccatggaaaatgagctggaaatggattgagataaggaaatgcatgagatggaaatgatgaaatgagatgagataaacatgagatgaactgatgagatgagatgaactctgaggatgaaatgacataatgaatgaactgatgaaaccggaatatgacactggaatgatgagctgagatgcatgagttgaattgcgatgaactgttgaactgtggatgcccggtgcgctgagctgggctgactgacttgcatgttgcctttatggctgcggggtggttgtggtgtgctgggatgcatggatctgtctgctctgttcg

SEQ ID NO: 641578 - DNA, 120 bp, Homo sapiens
atcttagaggatcccccacgatatagatcggagcggtccagcgagtcagcagcttgcggttgatctggctgcgcggatcatcggcatcgggcacttcggccatcagcgcgctgtattgat

SEQ ID NO: 641579 - DNA, 150 bp, Homo sapiens
gagatgaaaaggggccatgagccacctatatttaccttcatatttccactcattaactcttgtgagcggggggcggcgaagcaggttttccttctttccaactcctgctgatggaagataaactgcacactttccctgaacacactgtat

SEQ ID NO: 641580 - DNA, 189 bp, Homo sapiens
ctagctcggtaccccgttggagtatttcgctggctctgtctggggttcgctcatctagatagtagaacatcaaaccaaaaagaaagaacgacacatcatggctacggctgataaacagtactccgaccggcgacgcgccgttgcgagcgaaatagctgaacaggacattgactccgtactagtaacgca

SEQ ID NO: 641581 - DNA, 773 bp, Homo sapiens
tcccttttttctgggaaaagggggtctcgctattttgcccaggcgaggtctcaaactccggggctcaaggctatcctcccgcctcttagcctccctgagagctgggagattacagggctgtagacgccaccggcgccccgggctccttgcaggcgggggcgcttgtgcgcgccgcgatccgggtactgtggcgcctccgggtctggtcccctcgggggggcggagatcctccctcgggagccccctttctgtgcgctagggccccgggcgctgtttccccgttcaagcccctcctctatttaaaggattccctgcaccgtgtcacccagggtcgctgtcccacctttgccgggcgccctcatgggggagacctgggtgttatccccggggcagaagaagactcgaatcctttctcccatctctgggcatccgggcccccttgttggaaagtgcgttagagcgctggagggcgctgtcaccgttctcttccaccttatcgttgtagtcccgtatctcaataaacgagaacctcggcctcccttcccaaaaccaaaaacacaaaggacgaaacacaacccaccacagacaccgcccgcgcgcctctacccggggggccgggcacaaaaacagcgcccgaacgcaacggcgcaggaggagacaactgtgctgcacaccggccgccgaactcgtggacacaagcgggcgataccccgccggcccccccacatagacggcccattatataacggcacacccgcgcgccaccgcacaag

SEQ ID NO: 641582 - DNA, 227 bp, Homo sapiens
tcggactgctctctgccggatgcttttttttctttctgtgcagcccggcccctcctgctctgagctcaccgtggattgctttggtgactgtggtctcatcccacacgagggccttttcctccttcccctgagcatccccactcctgactggcttctcatgtagtggaacagagaggagacgggtggggtggggggtgtgcgcgcatgtcctgtggcatcgataaaca

SEQ ID NO: 641583 - DNA, 388 bp, Homo sapiens
  misc_feature (354)..(354): n is a, c, g, or t
  misc_feature (380)..(380): n is a, c, g, or t
tgcgctcagggccagcgaattcctgctgcaactgtctgaaaccatgcatgagcagagctgccctctggagaagaagacgagcgtcttaccgaatgcccttcacatcttcaacgccatcagagggactccaacaagcacaagggctcacgggacgaccagctcgtcattgggcgagggattacatctcatggcccgtgtgtggggacttgctttgtcatttgcaaactcaggatgctttccaaagccaatcactggcgagaccgagcacagggaggaagagattggaggggagaggggagaagaaagggatggagaggagctgttcaccgggatgcggaaggaactgctcacccncttcggccagcttttatggaactatngaataaga

SEQ ID NO: 641584 - DNA, 169 bp, Homo sapiens
tcattcatgtcataaattataaaatacacaaggtggctgttataaatgacaaaactcaaaacagtacataaaaggggttagtagtcaatggacaaaagtcagtctctagagtagaggcaccaaggagcatcacccaggttgaagggtggatttacctactgcagggcca

SEQ ID NO: 641585 - DNA, 800 bp, Homo sapiens
tggcagggtagtgcctagagtggcaaggagataaagtggtggctggtataatagaatgtagaggggcaagagtaggaacaaagagaccaggtagctgactataacaagtaatacccattgaagcaggtgcatagcgcaagcatagggcatataagggtaggtggccagttggcagctgacagaacaaaggggctagtgtcagggataatatccagagataaagtaacagtagcagtcatagggccataggtagtagataaaacaacgcaagcagccataaactaagcacgtatgcatgacataaagtatttgcacaagcagcaaacttgggtaagcaataggggaaggcccaattctgtaacgaccatagcaaaggcaaagcacgaggggcaaaaagggtccaagcgcaaggagaggtcgcagcggaaggcaagcaacaaaaatcacaataacaatagtattacgagacaccggtaaacagtaacaaagaaggtagccctaaagctagggtcaaccaaaaatgaaaatactggtcaaaaacaaaaataaactaagagaataataaagaaatacataggcagccacagaggaaaacggtcaagagaaattgaaaacataaaggcgtaaaatcacgagcccaagacaggcgtcacccaaagcaaatacaaccccaagagccagaagacttgtagaaatcacgaagccagaacgcaggccctgggacgcttaaatactctaggaaggtaaccaccggatacacataagacggacgagagaatgcgagacggagaaggcaaccg

SEQ ID NO: 641586 - DNA, 289 bp, Homo sapiens
tctagaggacccccagcggcggggagagtaagctggcacaaccgctttggacagcgatgtggcaacctcacataaaggtaaatatctaattagcagacaactaggaattccacttctaggcatctgcacaagagaagggaaagcacatgttcacaaagagacttgtacatgaatgcttaaaggagctttattcataataggcctcaaatggaaacaattcagatgttcatcaacaggggaacagataagcaaatagtaacttattcatgccgcccagaatgggggaccg

SEQ ID NO: 641587 - DNA, 242 bp, Homo sapiens
tcctcccaagggtgcccgagaacactccatcgtcgcggaatgcccgcgcttctttcgttaaagctgtctttgagtttgcctcctctggtggtataagttaattccacaagaaaagacccgtcccttaggagtttcaaagaaccgtgagcctcccgtttttacgccctaccggctcacgctcttggaaacgacgaaagcgttgcctgtttgtcaagaatcctaaggtttatcactgaagaacg

SEQ ID NO: 641588 - DNA, 291 bp, Homo sapiens
tacctacatacattatatgtatttagctgcaccagtaaatggaccattaactagggcccactttaacagagcacccctttgaaagtttataggtatgaaatatatgtagatatttgtaaagggtttaattttttttttttggagggggtgcggtgtaaatctggtatttataaatgtaatgaaggtatggacagaaataaatatatacaacttttataaaggatggtgtactgacggaatacatttaaaagaaaatatatttggaaaccggtccggctaatgtaagagata

SEQ ID NO: 641589 - DNA, 377 bp, Homo sapiens
gcgggttccagcagccattctggtcagattacactcctgcttaccagacgacaagtcggttgttcctggtcattcgagtactgtccatcggcgggtgacctgatgttccacatgcagagcgcagaggtaagctccctgaccgagcacgccaggttctacgcggcccgaagatctgcatcgccctcgacttcctgtcacgtagagggggcatcatctacagggacctgaagctggtacaacgtcctcctgcatgcggacgggcacatcaagctcacaggactatggtatgtgcaatgaacggtctgggtccatgcctgatacatacgagcaggtttctgtggaagccctaattccatcgtaccccgcgcccggattaa

SEQ ID NO: 641590 - DNA, 137 bp, Homo sapiens
tctctactcaggtgtgcaatatatatttgttttctctgtgtgctgcgcggcgcctgctgctgctgatgctgcttctgcttctgctgctgctgctgctgctgcagctgtgctgctgctgctgctgccgctgctcgcta

SEQ ID NO: 641591 - DNA, 443 bp, Homo sapiens
ccgggaaattcggcctttatggccggaaccagagtttttggttatggaagttgggaaaaccacccttattttaaaatctgattctgagaaggagaaggcttggtttaataagttaagcccatttaatccgggaaatattccttaatttaagcatggttccatattggatggaaggctttaatttggttaccagagcaaattggattaattccttgattaaccggttggattacctggttactaagggcaggattaggaggtaccagattctttcttataaggggcctggttctgatccttaattcggaatgggactattaatttaccattggttatttaattggggggccttaattggagggtttttaatggaaaagccttctaatatctgaggatggaataaatccaatcccttacttgccaattcaatcttccttgttgaa

SEQ ID NO: 641592 - DNA, 98 bp, Homo sapiens
aaaagccaatgacaatcaattagccaaaaagttttgaacgatttctaaactttatggaaaaagccaatgacaatcaattagccaaaaagtttagaaat

SEQ ID NO: 641593 - DNA, 330 bp, Homo sapiens
catctcttccaacactcttcactatggaatggtagatctccactgtggagtctctcatgttgcacaagacatggggaccgattaaagctcttcccacattccttacatttatatggttactctccagctatgaatcctgcgatgctgtgcaaggtgtgacatataatggaagaccttgccacatacattatttttatgtggcttctctccagtatgaatactgtgatgacatgcaaggtacgacttcaaatcgaagatcttggcacatatatcacatttaaatcgcgcctctatagctatggattattcgatgtatagtaaaatgtacag

SEQ ID NO: 641594 - DNA, 108 bp, Homo sapiens
atcagagagtatgaagattgtattaatcatctcaagtacgattgtttacctccctcgtgttccccatgttaatgttgatgttgtgtctgctgagaaagtgtacataat

SEQ ID NO: 641595 - DNA, 697 bp, Homo sapiens
ccgtggctgtgggtggggcgcggtggcggtggcgcggagccacggcaggatctggagccgggcccgtggctgtgccggcgtctgaacgcagcgaatggccggagcaggatggaaccaggtgaggagctggaagaggagggctctccagtgtggccgtgaggatggcttcatccgtcgagcacctggctgcagaggccatggcagttgacatggacccctggctagtgtttgatgcccgaacaactgcctgccacatgatgctggatgcctggtcgtggccaatgtacctcatccatcccgaagttacccgctatggtggaccctcggttcacccaagctcagagcctgtgggcttggattgcatgtgtatgggcagggctacatgtcccaaactctcggggacgtgcatgggcctgcatgcatgcctgggaagctctgcagaccagtgggctggccatcacaccgggtaccctgttgccagctcgccatcgaccaccacgttgctctcgggcaagtggcttatgcatctggcaccggtgcttcaagctggaccactgcctggggcctgggcatttgcctggcgccgtcggttgaagtgccggctttcaggttggccaaggttggcccccggtgccaaggaggggtgggcgccatgtccatctgtgttacccggacgatcccggccgttgggtgtctg

SEQ ID NO: 641596 - DNA, 928 bp, Homo sapiens
  misc_feature (196)..(196): n is a, c, g, or t
taattgaaacggagcctcactgtgttgcccaggttggagtgcagtggtgcaatctcagttcactccaacctctgccacccgggttcaagcgattctcctgcctcagtttcctgagtagctgggattacaggcacctgccaccgtgcccggcttaattttggtattattatagtagagataggtttcaccatcttgncccaggctggttttgaactcctgcaccttgtgatccacccgcctcggcctcccaaagtgcggggatcacaggcgtgagccaccgcgttgtggccataaatctgacatcttctaaaggacagtttccatggtgagattaggggcttaacagcccatgaggtcatatacacatgaacgtatctataccattaaagcaatacaccactcggcgcttctgataaacaatagccaggaggaagagtctcctgacatctactgtcgactaccgggagtctagcccacattggtcacaaaacaaaacgaacaacttcacgcggcaccacattttcgcgcggacaactctagcaagaaacaacttgccagtgagcgccctcgacacaacagcggaccaaacacttaggacgacaactcaaacgcaccacttagtgggggggccacggggggacacaaccgtataagcaccggacacgatgggggaagcagacggggcggaacactactggacccccactaatacagaatgtgccgcgggacacacgtggagaaccccgggtcactctaacaacaaaaaacaagaggggggccgcatatagatcgcagcaggcccacgaaccggggtagcgcctgcgcaagcgggcagccaagtgaacaaaacccagcccgcccgccaaagcagcagactgacagacggcaattgccagcacccagtcaggtacatggcaccacaacaaag

SEQ ID NO: 641597 - DNA, 644 bp, Homo sapiens
aactaaaatacttttttaattaaaaaaaatggacacacatacagcacacacacacacacaccctttaaagctaaaaggccttcccaggattcactaatagaacaccagactggcctccaattctaatctgactctgggaggtgaagagttgggtttgcacctgttttcaggcaccctatgcaccaatgtggccaatgggtgttcaaacctgccagagtctttctgaaaatgcagcctttccctgactgcgagttaaacatcctgagacagagtgtggaaggcgtattatttatgctggcccatgaacagctgaagcagagttgagtgtgacaaggaataactgccgaaacaggcaactgaaccaatgttttcatgaccccctattggaagactccagggccgatgtcaagcggaacaacgtgacacgaatggtgtccgtgccccagacaacagcaggtgccatcctggacagggtgaacattggctgaggctatggcctggtggaaggacaccccaggaggcagtttgagaccaccagtgactccgaggatgtctggtacatcctgcaatttgactatagcaggctccccaaacaaaggatcgggcatttccacgagggggatgcctatgtggacaagtggaaa

SEQ ID NO: 641598 - DNA, 608 bp, Homo sapiens
  misc_feature (593)..(593): n is a, c, g, or t
gaagaagtcttttgtacgccgttagggcacgttcccccacccccccaggttaaaataggcgttcaaacccatccttaacattggagtcgcgttctctttgacttggttctagggcaccccggtggacgttgtcccccactccccaatttgcccccttgtggcgagggaatagaagcccacaaactggcgtcaatacatgcggtcctttcacacagttaataggtttcccggaggcccttctttcttggcgcagaatataaaaggggcaggacccacaactgattcagtccctctttgaataagggagtctctgtagtagcgttctatttaggacacacacgcatgtgcatactcgatgccactccattatggaacagaggagaattttccgccttctcggtgttcccggagcggggcgatatttcagatcatttcagtgggttccccacgggggatacacttgtgcgtagactacggctgatacacccggaagaggacagatttctattgatatgattcatataacggtaagtaaggagcacctctatttctatatacgcccaaataaacatgttttccacacgccccatcantagaccaaacaaata

SEQ ID NO: 641599 - DNA, 461 bp, Homo sapiens
  misc_feature (1)..(1): n is a, c, g, or t
  misc_feature (14)..(14): n is a, c, g, or t
  misc_feature (34)..(34): n is a, c, g, or t
  misc_feature (75)..(75): n is a, c, g, or t
  misc_feature (151)..(151): n is a, c, g, or t
  misc_feature (328)..(328): n is a, c, g, or t
  misc_feature (332)..(332): n is a, c, g, or t
  misc_feature (354)..(354): n is a, c, g, or t
nagaggctgtttcnggtccccttcccaagacccnaatctggcacagagcagatgctagttcaagtctatcaaatnactgaatgatgagggcaataatgctgttggctatgctagatatcctcccagattgctttcagaatccagatctaancccggctttctaatccttcagcagttccctcttacccacaaaaggaagtctaagcttccgagcctgcctgtagggcaccttcacatagtgcactggtccaccttcccagcttcctcttctgctcttcccagcaccaatcctatccaagctcgtgttcacatctgaaatatgaaagtncctngctgccgggtacagtggctcanacctgtaatcccagcactttggcgctgaggcgggcagatcacctgaggtccggagttcgagaccagcctggccaataaggtgaaaccccatttctactaaaaataca

SEQ ID NO: 641600 - DNA, 143 bp, Homo sapiens
ttaaggctggaacctgctcccgccatgtcatcagtgctgtacactgcctggagtgccttcttggtgttagtccctgagttcaccttgtgatcttcataattgatttcattgagctgcttcgtgaaccagtcagcatttaacca

SEQ ID NO: 641601 - DNA, 485 bp, Homo sapiens
agagaaatcaggctgggacggagggtggcccttgctttgcacgattcctgcctcgacgttacaccagggacattccagcatctccccttcattaactgtagaccgccagcaaatccagatttcattcaaccaagtaaactggtagagtcatttccagcagctaatgtgagctagcgcattaaattcagaatctctagtaagtgtacctgcatcaataaagccaagccggtccagctgcattaataccctaccctccattcccacacggttcccaggtctccgtgtgtgaatttgtaacatcttacgagcattttggtgtgaaagtggttccttcctgagtcaggctttgtacttgacccttcccctccctgggagtacactgaggttctagaggcaacagggtggctatggtggttaaataaaatgagcatcatttctaggcacctggccaggtaagcttatcacagcattttcaagcagaacaa

SEQ ID NO: 641602 - DNA, 219 bp, Homo sapiens
caggaggattttagaggatccccgacaaactaccagtgacgacttaacttagatattattgtgtataccagggttatttgttaatcgggtggtgatggcacgatgaatggcaaacacacacacatacacgcacacatgcacgcgcacacacacagacacatttaataaattatgcatgtattccataaaaatattttttcttggcttcattccagggag

SEQ ID NO: 641603 - DNA, 501 bp, Homo sapiens
tgctctttgcctcctataagtggaatgtatcccggccctcattgctggctgactccaaggatgtgatggacagcaccaccacccagaaatactggattgacatccatttgcgctggggggactatgattcccacgacattgagcgctacgcccgggccaagttcctggactacaccaccgacaacatgagtatctacccttcgcccacaggtgtactcatcgccattgacctggcctataactcgcacagtgcctatggaaactggttcccaggcagcaagcctatcatacaacaggccatggccaagatcatgaaggcaaaccctgccctgtatgtgttaccatgaacggatccgcaaggggctacagctttattgatctgaaccgactgagcctaatttgtcttttgagaactatggtgagcttcttttccaacccgatcatcttggtttgtggattacaccaacgtttacaaagtgactattcacaatacccttgaag

SEQ ID NO: 641604 - DNA, 203 bp, Homo sapiens
caggtggatcacctgaggtcaggagttcaagaccatcttgaccagcatggtgaaaccctgtctctactaaaaaaaaaaaaaaaaaaaaaaaaaaaaaaaaacccccccccccccccccaaattttcccgggggggggggaaggccccttttacccccaatttttgggggggctgggggaaaaaccctttacccctgggggggg

SEQ ID NO: 641605 - DNA, 759 bp, Homo sapiens
  misc_feature (1)..(1): n is a, c, g, or t
  misc_feature (176)..(176): n is a, c, g, or t
  misc_feature (233)..(233): n is a, c, g, or t
naaacgtccaacaacgtttaaatataaacaggcgcgcgcgggtgtcccaaaggggtgaaaatcgcaagcccccctctcgggcttgtgacatagtgatagcgccacgaggtcctcctctctcgccacagggagccacacctgggagaacccacaggaggtagccggtctgtttgcanaagtcgggccccccctggtgcagccacaagcttgtcgctctaataggtatagaaagnaaaaattcgtcgcctgtatgtaacaccgccgtgactcccaccggggaggcttataggcaaatggcgttccaaaaaaatgtgtggggcctcctcccgcgcttgccacatatctccacgcgctctatatctgtcttctcgagagatcggtccagccgccaccagcgctacctatcttgcccccccggtgtagtagaaacgaggtgtaacatctcgattatgtaacaattagtgttacatttcctccggctgccagcacccccgctgctaagagacccgcagcaatcaaatggtgtggtccgcccactatacgccaagtaatgtggtgagcgcccctttatgtcttcatagcacatctgtctcaaagctcccacattactccctgcggccaaggatgtgacctatgagaaccggtttaacttgcgagatcccgccttggttccttctaggcgcgggttcacccaaagagccgtcgccccagcaacactggtgttccaggcgtcaatcaatgttagttcctatggagaca

SEQ ID NO: 641606 - DNA, 848 bp, Homo sapiens
  misc_feature (717)..(717): n is a, c, g, or t
aggctaattgatgatatcgacgtgaggttccagatagcagccagtggcaccactgggtacctaccaatgagtggagatggacaatggtcccaggaatctagtatccagggataactagtttgacatcaaggaatgggccagatgccaggtgtcgcagggactcaacggataacagatgttggagtggacttggatgaccgagttaactcagagacatttctcatatggagaaagctcaacgcgatctgagtgttgaactcgactcagtatagagtcttctcatgacacttgtcacccgaggaattccagattgtgcacagagtgggaaatccctgggaagtatccaatctaggggatggatacactcttgacatctagtgcttcattaaggcgagggttaggggaccgggattaccttggttgcccgaagggttaagttgatttccgaaagaaggctcccgatgactggtgttccacgaaactagtgccctgggtgttatacgcatacatttgtacacaagggacacccttaggctgtaatatgagctacgcttcgcattcttgcggacatgtctaacaccgggagatagctacttagatagcttacactaggcaataggtaggacttcgtgcgtgactggttattaggcgaacacctgttctggagacgggaactttttcagtccaagacaacgtataggcccctaacggaagggnttactttttccacgcaggcccgattatctagattctgcctgcaaaagaatcccacgcgcgatgggctggcatgatggtgaaatacttttccagagaacacattctgtaccaacttccgattatgcgcgaac

SEQ ID NO: 641607 - DNA, 442 bp, Homo sapiens
  misc_feature (30)..(30): n is a, c, g, or t
atgtcaattgtctttctaacatctatgatncaagcagagtacttataaaaattcaaatatatccttctgtcctgccctgcccaccattatctagaggggaaaactcagctgggataggatgtatttatggatgcctgtttatatgacatgtgattttaaaggactgataaaaaggcaaatttaaacagaggccattttacttaagaaaaccagttgcatctcattcttccttttgcaaagcttctggcagctcttcagtgtgtaagctcacccaggctcgctgggcggttgtctgggaggagcaggaagggcttaaaatccagtcatttacaaagctgctaatgatcttgtttgtgcactgtggtttggccatcattgccttattttgaagaaaggaaaaaattatcacataataaaccaataaagcagatattaaatattc

SEQ ID NO: 641608 - DNA, 421 bp, Homo sapiens
tggttctcaatgctctcatcgtctgatcagtagcccacgttttatacgtgtctccagttcctcgatgtataccctgagaacatcgatggtacctacttcatagggtcctggtgaaatgaacattcattggttgtgtgtaaatttgttgaaacggtgcctggcacatggtgactcaataatcctgtgcatattcagttattgctgttcacttggttcagcgtatgtaatgcattcattttcaaaaacaaccaacattagccagacatggtggcgcatgtctgtaatcctagctccttgggcaggctgaggtggcaggattgcttgagcccaggagtacacggctccagtgagccattgcagcatttcactgcagtgagcatcctggccagccagagtgaaaccccgtctctcatcaaaaaca

SEQ ID NO: 641609 - DNA, 340 bp, Homo sapiens
taattaagaaaaaaacagttaagggagcagagtggaaaacgacttgcaggtaacttaagactatctggaataaggaatgaatcaagctgaccttgggccagcaggttttaaactaaacttgttacttgcctttctcacgtcagttgatctgtcactgtacttatctaccctctgtagaaacaagtgttcttggtacactaattctgttatatggttctgctaaatttcttatgctggtgccttattctttgcttttagtcagaccattccatatcagacttttctcttggtttactatagatatttggcatttagtgcgttgtgtgtgtgtttgagtgta

SEQ ID NO: 641610 - DNA, 160 bp, Homo sapiens
  misc_feature (10)..(10): n is a, c, g, or t
ttacacaggncaggtcttatctcttcatacattgacagacccagatcctcatgcctgtaacagattcctacctcctcagacatgaagagactcagatccacatacctgtactagatttgtacctcctcagatattgaaagacccatatccccaaatcagg

SEQ ID NO: 641611 - DNA, 621 bp, Homo sapiens
  misc_feature (39)..(39): n is a, c, g, or t
atgagtctcccttttatgtttatacacaagaaacaaganttggtaaatatgcacatccctgtctgaaagcgcttaagtaacagggcaattattagaattcaaagccactactcacaacagtaaacacgcgtgcgcatggatatgttcagaaagagtcattccccaattcactttattcaagcgctgatatcaagaggcggaatgcctaacagcatctattgaatttcagtctggatgatgtctttcggccctcgttttaataacccagatgttcaggcattcgctccacccatgccaggtgtaccagacatgccagttgtctgttttatccgtgtaggggccactgtagtatgcaccattcaggtctgcagagtgtctcttgttaaccccgcaccaagagtgttcttattctgcgcagttccatcaatagttgtcatgatctgtgtcccaagccataaattccttcagttggtgattagcccccctgggcacgtgagtatgaagctcccccgcaagggattgtccaggtgttcgagaatcttccccaatatgtgtctagaagaatgtatgtaaatcaaaagctttgaaattcttatattgtgcatcgcggtttttttctcc

SEQ ID NO: 641612 - DNA, 992 bp, Homo sapiens
gggaaataggagcgagcggcacgcgccggaaaggaggcaagagcgcgggcggggaggcaagatggggcaaccaagaggaaacgggtggaggctttcggaaggtacaggcgaagacgccaaaaaagaaacgaaatagatgcggagccggccagattaaggggcacgccaccagccagaagggaggtggacggcacggcactgagcagcgggccccggactccccaagggcccccggttgtgcaactggggaccacgggtggccacaaacttagggcaaccgggattcataaatctttttcttcccaggaggacatcaaattttttagaaccaaacgactatttacagtgcgcgccactttgcagacccttggtgcatgcctcaattacttaaaggcagatacttaaaacagtgggatccggaagggtaatcacgccctactttgtgtggaataaacgcgagggtttgtggtgaaacatggaaagaaagtgtaaaatacacgtggcattctaatttgggaaaggcctaaaggaaacagacggggggactctcctaatattggtgggcttaccagaatttcacacctcttcccaggggaacccaattgttgattaaaatttctctgtggtcccaaaaatatttcatactctttcgactgaaaggggaaagtaatgactgggcacaccaacttggtcgtgaagagcgttctacgggccccattttgtgttctatgtgaccccgtgctttctgcattgaaatttcacccacattactgcttggggtaacacgcaacctcttaattcaagatcttagtaacaccagggttatctatcccaaaaagggcaaccctttgtggtggcccacgtgtgttcctttccaccaattgtggcacactacgacatacgggtccgggcacttcacagactacttacaagagacttcggtcgtgacagaacaggcctcggtgtgcttaactctcaaaaagattccagga

SEQ ID NO: 641613 - DNA, 482 bp, Homo sapiens
tggaggggggctgctcgtgacttccgacctctgtctcgctagttggcatgagaagactggactccttctgcaggcctcagggcagaggcagatgtcagcccccagggatgtcactgccagaaccccagatgccccaagccatctggactccccctgtgcagtatctctgctacaataaaatgtacccagatctgagtcctctcacctgggcgactgccaatgtcccctgcggccctataccccgcccccaggagcccagaggatctttctttttaaagatattcagacctcacagataagtctgccctgaccagcccctccccagttcccaggccctatcctgacaacggccacaacttcagagcagctgaaacctgctgtgagtgaaaaatgagaagctgttgttttaattttactttctctgattactaatgaggttatttcttctctgcataaaaacttcattcgtgtttaaaaaaaaa

SEQ ID NO: 641614 - DNA, 458 bp, Homo sapiens
  misc_feature (354)..(354): n is a, c, g, or t
  misc_feature (362)..(362): n is a, c, g, or t
  misc_feature (381)..(381): n is a, c, g, or t
  misc_feature (403)..(403): n is a, c, g, or t
  misc_feature (416)..(416): n is a, c, g, or t
  misc_feature (435)..(435): n is a, c, g, or t
  misc_feature (450)..(450): n is a, c, g, or t
aactacaggataacagcagttaccccgacgaaccctggaggataacagaagaacagcgcgagtactatgtcaatcagttccgatcccttcagccagacccaagctctttcatttcaggttctgtggccaagaacttcttcaccaaatcaaagctttccattccagaactctcctatatatgggagcttagtgatgctgactgtgatggagccctgaccctgcctgagttctgtgctgcgtttcatctcattgtggctcggaagaacggctacccattgcctgagggcctccctccaactctgcagccaggaatacctgcagggcagcttttccttaagcccaaatggggacttntcaattantttgattcttattctgagntcactgccggtcaaatcaacanccttgtgaacttntaatcggatgggtggatgnacatctgtttaaagnacatgggc

SEQ ID NO: 641615 - DNA, 133 bp, Homo sapiens
tgaggactgtgaggacgagagctagcagacgcacttaggtgctcatagctctgcctgctggaggaggaggtggtggtgtactagatggtggaactgccgcctccaacagagatgaggccacccccaaatggct

SEQ ID NO: 641616 - DNA, 558 bp, Homo sapiens
tagccctccttatgtactgtctacgagctcttattatccatatgcagatcagtcaccatgcagaggaaagcagagagatacagccttcccatagtgaagctcaagggccaagtacttattaataactagggactcaatttttttctaggccacgagaggtcagttcaactatgcatattccaacaatactcctattgatggtcgatgacataatgacagcatccttctatggccacagcaaagtcattttggcatggctccagaccccccatggcgtccttttttgtggataacttactgtgaaagcatggcagaatccgcgggaacacagcgggtcacgtggactttgcctcccctgctgagcacaggggacagattcttggacccagaaaagcatacagcttgtgctaatacggctaattgtcctatgtaatcgaaaccagtttcaatgacagcttgctagagaagtaaataggcccttctgcaggattccttaaagagttttcacatttttttctatatgttgaaccagttagacaactcaagggtaacggagct

SEQ ID NO: 641617 - DNA, 890 bp, Homo sapiens
atcgcaatggcgttcctaatggcttaccgaacgaaaaattctaggctatatacgactacgcaagaggccccaaggtggtaggcccctagcgggctactacaacccttcgctgatcgccatagaaactcttcaccaaagagcccctaaaatccggcgcctagcgatctaccatcaccctcataccatcagccgtccccgaccgttaggcgtctcaccaatcgcatcttctacgtatgaactccccgctcacgcatagtacccaaaaccgccgcgtggtcaaccactctgatcgtaggcactccgtatatatgcgtaagcgcagctctagacctacatgctatgtacatcaggtctgcctagatcatggattggagcgctctcaagcttctacagaactgaagtcactgatccgtgtggactacgtgcggagactacgatacagcgcccacacaatacagtcctacaatatcgatacggtactagcacgcctaagggcacgactacgactatgcatgaccatgaataccgacatcaagtaagaacctcacacttatagtgggcctcactcttacacactgctactcggcctgattgacacagacaagaagatctctgattggctcctcgccataatgacccgtggacataaggacgcatttatccttctattatttactcacaagaaccaatccgcatgacccccttgcgagcattggccgaaacgcggaggccgaaaatgtcgctctcacggcatgcgtaacatcgactttacgtgcgggggggcccccttctgcccgtgattctgtcatgcgcccgagagtaggccccaatccagttgtgatcctcaaaagatgcttcagggaatacaaacgagtcttaggaaccggatc

SEQ ID NO: 641618 - DNA, 154 bp, Homo sapiens
agggtgtgaacttctatacgtcatcatgcgcgcctgttcgaggagctcaatgctgacctctttcgcgggacctggagccggtggagaaggcgctgcgtgatgccaatgctggacgagggccagatccaggagatcgtgctggtgggcggctcca

SEQ ID NO: 641619 - DNA, 510 bp, Homo sapiens
  misc_feature (104)..(104): n is a, c, g, or t
cctatgatattcagttcccctgttctggtcagcgtccggccatctaaagggctgatggataaggtgctgtccagggctttgcctttgacctccacggattttcngatcccggtttgcttcagggttaactagcgctcctttccgtaaccccgggaggcccggccgaaatgttcccgaagacaggagtccatggagattttcgattcttcctgtggcccctccagcatggcccctttcccttttgtggattttaagtccctgcccctcagatcagctttgctccttaaattgcctcccaaaaaaaaaaaaaggggatggtggctgcgtggttcccaaggcttccgaccctttggaaggaagagcccctcccctgcccagccccctggccctttgggccattactttttggcccgtgggcctcccgttaacagcccccttccaggccccggcgccggcaaaaaaaaaatggtgctgtccttaaattaaatttccccctagcttcctggggga

SEQ ID NO: 641620 - DNA, 493 bp, Homo sapiens
  misc_feature (378)..(378): n is a, c, g, or t
tttttactcttagagcgactgcagataccatttcggtacaatcaaaacggttttagcaagacagatgaaaacacattacaaaattgccccaagaggtgagcaaactggtgggggcacagagcacgcaagaaccagcctgactaaaatcctaatgcctgctgctgtttaggcgtgagtacaagagactgtggttccaaggagaagccatctgtgtgtggggttcagggcgagacagtcgacgggtctgcccagtcgcatacgcaatcccacgctgcggaactagaggaagtgacaggggttacgggaaagaggggcagagagcatcttgctagagctccctgacgagaaaccatttacatgagtcagccttatcacatntcctcttcacttacaatcaacacctaatatataatgcatagagattctcttaaacatagaacacataaatggtaccaccaataagaagagcaagagtatctcaaacactaacagc

SEQ ID NO: 641621 - DNA, 931 bp, Homo sapiens
aagcgcaagcataagaaggatgtcagtgaggctgggcatggtggctcccacctgtaatcccagcactttgggaagccgaggagggcggatcccaaggtcaggggtttgagatcagcctggccaacatggtgaaaccccatctctactaaaaatacaaaagttagctgggtgtggtggcatgtgcctgtagtcccagctacttgggaggctgaggcaggagaatcgcttgaacccgggaggtggagcttgcagtgagctaacaccactgcactccggtctgggcaacagaccaagactccatctcaaaaaaaaaaaaacaccacacgaggggtggtccaccggacgaacaaaaagaagctattctcaccgcaatcactgtgggttgtgcgacgtgggtgggaacgggtaatacctctcttcttccaaggacaccacgggcgggtatcgcgagatggtcctctctatagaagaaatccgatttcttatacctcccaattcacaagcggccctgatttgcagcgacctggccctggaagaactggatttggccaagggaccaatccagaccccggtagaaggaaagccgtgcgagaaggccaaatctagaaccaggtcacaggactccatgaattattggaccgggggggaccaaaataatatgcccaaatttaaaaagttatcaaagaattcttcagggggaacacgaccttggattagagggctcacccctatgagagctggtggctaaagggccacagctgtcacggagccccccattttggacgaagttcggacatggtccaaattaggtttgcgggatgccacctctttctggagttgaaccgagctcagagtcagactgtccccttaagcagaataccttctcacacgcacagcattcgccttgtgaccaccgtgcgtcaggatcagg

SEQ ID NO: 641622 - DNA, 273 bp, Homo sapiens
atctcccagttctgacgtgctgattcccttttactcatgctgacatataccctcccccacacaggcacagcctccctcatcatcagcatcccccaccagagtggtatgtttgttacagttgatgagccgacattgacacatcatcacctaaagtccatagtttacactagggttctctcttggtgttgtacatgctgtgggtttggacaaatgtataatgacatgtattcactattatggtgtcatacagaataatttctgtgcccatttcaa

SEQ ID NO: 641623 - DNA, 395 bp, Homo sapiens
ggaacaactcgatcatcatccatatgctcctacacacaaacaaaacatataaacctcatacttaaaaaacacttacaatagatcataaatctaaatgttaacatgtcaactaatcaaacatttagaagaaaacaaaggagaattaggacctaggactagactatagttatctaagacatgacaaaaaaatcacacactactacaacactttaattaattggacttcatcaaattaaaatatatgtacactgaacaacactggtaagtaaacaaaacgacaagctgggctaggacatggcggcatcatgcctacaatctcagcatttagggaggccaaggcaagaaggatcacttcaggccaggagttcgagaccagcctggccaccgtacgcaag

SEQ ID NO: 641624 - DNA, 711 bp, Homo sapiens
agtccgggggagcggcgctgccgtgtggagatccgcgtgagggcgacaggattcgttggcgtgggtccccgctgctgtgcattgggttaaagaacgacaagccaacatcagccatgaaagatccaagtcgcagagtactagcccaagcatcatcaatgaagatgtgattattaacggtcattctcatgaagatgacaatccatttgcagagtacatgtggatggaagatagtgcaaggaagagattcaagagagaaatagaagaggcagttatgggcaagaagagaatttattgaacgctgtttccaagaaatgctgggagagggacgaagagcgatgaagtggtttattccgagcgtcgagatctccgcgaagaatatggaccaaatccgaagaccagtttaatgaccttgtcatcagtgatggctcttctctggaagatcttgtggtcaacgagcaatctgaatccaaatgcaaacggagtttgttcctggggtgaagtacggaaagtatttgagtacgacggggccctcttttggtggatgtagcacgaattatccacacgtgtggaaggggagtgataagaacgacttaattgtaaagagctctctgtgtcacgtgtgttacacttatgcattgacaaaaggtttcgtgagtcttgcaatggtgtaggtaaaagtggtgagacgtgtgtactaagtacataatgaag

SEQ ID NO: 641625 - DNA, 162 bp, Homo sapiens
ttttcccccccctttttgaattttttttgaaacctgggggtaaaccctaaaaaggggttcccctttttttttggacccccggtcccctttttccaggggggaaaaaaagggggaaaaaagccccccccttttttttggggaacccctaaaattgttttccca

SEQ ID NO: 641626 - DNA, 179 bp, Homo sapiens
  misc_feature (84)..(84): n is a, c, g, or t
cggcggccgagtccagcgggctcggggccaggcctgtgcgtgcgggcgcgcctcctcctccgcgccgtccccatgctcgccctncgcgtcgctctcgtccgagttgtcctcctccaagtacggtaaccgtccaccttgtgctggggccgcgggattgcgggtgcgtagcggcccacgcc

SEQ ID NO: 641627 - DNA, 261 bp, Homo sapiens
gtacacgtgcatggggtcctcccgggtcaatgcaactctccgtgggattcagcctcccacgtagcttggactacaggtgcgtgccaccgagcccagctacttgtcgtatattgcgtatagacggggtttcacaatattggacaggatgatctcgatctcttgacctcgtgatccgcctgcttcggactcccaaatgtgcttgggattacaggtgtgagccactggtgcctggccttgaacactattctcatgtcaaacatt

SEQ ID NO: 641628 - DNA, 377 bp, Homo sapiens
  misc_feature (181)..(181): n is a, c, g, or t
  misc_feature (295)..(295): n is a, c, g, or t
ttttgtttttgtttttttttgagacagagtcttgctctgttgcccaggctggcgtgcagtggtgtgatctcggctcacttcagcctccgccacctcaaggcagttcaagcaattctcctgcctcagcctcccgagtagctaggactacaggcgtgtgccacctctcccggctaattttttngtatttttagtagagacggggtttcaccgtgttagccaggatgatctcgatctcctgacctcgtgattcgcccgcctcggcctcccaaagtgctggaattactggcgtgcaccnatgcccagcctcaaatatgttttttaaaaatatcattgtcctcctcctcttaagatttttttaagttatttgctcaagtctt

SEQ ID NO: 641629 - DNA, 219 bp, Homo sapiens
caaaaaccaacttcaaaaccgatcatccccctccctctcccccccccccaacactactgtctaccacctctaaaactacaactgtcctcgtaattcaatacccaaacatcactcacccaatatcccatgctgtcactccagttcctgcccaactctcgcttctcggccttccggaccttgcgaagggtccacctctaacgccttaaatcaagtattctt

SEQ ID NO: 641630 - DNA, 507 bp, Homo sapiens
agcaaccattcatggcctcagtgagtgacactcaaacagctataaccattcacagtgctgcgcttggcgatcaacagtaatcagcagtcactgccatacattagtctgcataagaaagtactcagctaatgacctgtcattggcgtcataaacatgaaatgtccaacaccagaatagtaaccgcttcaacaataaactgctattgtaccaaataatgaaactcactcatttaactcataacaagcatcatatacatcatactctataatccactataaaaatccaaatgctttcctttctccgtgtatatcaagcatggtagttctcaacagcacacactctcaaaagtgtaacaaagcccattcgtaacacacaccccacctcagtttccgaaagtcagtgcattcagtggttataaataggcatgatgtacttccacagctaagagttctagaagaaaggggacaaaaaccgctcaataatctgaaaagttcctaatgatcacaa

SEQ ID NO: 641631 - DNA, 435 bp, Homo sapiens
agagccgagagaacgtagtctcgagtgtttacagcttagctttctaaaaaaaggcaaaaaaaggcatttatttaatatacaaggggctcagaccgaggcttactttaaaagacaaaaacaaaacaaaaataccacagctcaagataaagagtcctatacagaaatcacaaaagaggacagaccatctagggaaacaattaaaaagacgacacaatggacaggcgtgggcagccggggtcagggcatcctgggcgtggtgaccgtgattaggagataggtatactggcaggatacttcattaataagctgtggggttttatccagagctcggcagcatgtgtgttccaagggactatcaagtgtgggagttctccatagaaaggctcgggagtggagagcagaaagggctccgtgacaatcatacagggacagacc

SEQ ID NO: 641632 - DNA, 119 bp, Homo sapiens
cgccggagactattgacttggccgtgcagtgcctgcacgaacttacaaccacatgcactgctagcacatccctagatgtcatcgacctacctttcgcgactccagaaaccagagtgtgt

SEQ ID NO: 641633 - DNA, 791 bp, Homo sapiens
  misc_feature (37)..(37): n is a, c, g, or t
  misc_feature (85)..(85): n is a, c, g, or t
  misc_feature (161)..(161): n is a, c, g, or t
  misc_feature (172)..(172): n is a, c, g, or t
  misc_feature (186)..(186): n is a, c, g, or t
  misc_feature (202)..(202): n is a, c, g, or t
  misc_feature (212)..(212): n is a, c, g, or t
  misc_feature (263)..(263): n is a, c, g, or t
  misc_feature (355)..(355): n is a, c, g, or t
  misc_feature (359)..(359): n is a, c, g, or t
  misc_feature (409)..(409): n is a, c, g, or t
  misc_feature (412)..(412): n is a, c, g, or t
  misc_feature (420)..(420): n is a, c, g, or t
  misc_feature (423)..(423): n is a, c, g, or t
  misc_feature (426)..(426): n is a, c, g, or t
  misc_feature (456)..(456): n is a, c, g, or t
  misc_feature (474)..(474): n is a, c, g, or t
  misc_feature (483)..(483): n is a, c, g, or t
  misc_feature (487)..(487): n is a, c, g, or t
  misc_feature (489)..(489): n is a, c, g, or t
  misc_feature (503)..(503): n is a, c, g, or t
  misc_feature (522)..(522): n is a, c, g, or t
  misc_feature (527)..(527): n is a, c, g, or t
  misc_feature (529)..(529): n is a, c, g, or t
  misc_feature (534)..(534): n is a, c, g, or t
  misc_feature (561)..(561): n is a, c, g, or t
  misc_feature (563)..(563): n is a, c, g, or t
  misc_feature (581)..(582): n is a, c, g, or t
  misc_feature (603)..(604): n is a, c, g, or t
  misc_feature (607)..(607): n is a, c, g, or t
  misc_feature (614)..(614): n is a, c, g, or t
  misc_feature (631)..(631): n is a, c, g, or t
  misc_feature (633)..(635): n is a, c, g, or t
  misc_feature (639)..(639): n is a, c, g, or t
  misc_feature (641)..(641): n is a, c, g, or t
  misc_feature (643)..(644): n is a, c, g, or t
  misc_feature (646)..(646): n is a, c, g, or t
  misc_feature (648)..(651): n is a, c, g, or t
  misc_feature (783)..(785): n is a, c, g, or t
cctaacgccccggctgctgtccgtgcgcttccggtanggtggcgccccccaggccctcaccctgaggctcccagtgaccatcaanaagttcttccagcccaccgagatggcggcccaggatttcttccagcgctggaagcagctgagcctccctcaacggnaggcgcagaanttcttcaatgccancctccccttggacgcngatgttactnaggccaagcttctggggtttggctctgctctcctggacaatgtggcccccnaccctgagaacttcgtgggggcggggttcatccagactaaagccctgcaggtgggctttaaaatatcggctggagcccaatgcccaggcccngttntcccggctgcccctgcgccccagcaaggagcccttctcccttcacctgtntgngcgctggnacngcngttctgagccctggactctgccccgggggntgtggccggcactgggcngccccttgnactnangcagttttggtggntgggggacctccactggtnacagngnagacnccagggtttgggggatgcctgggactntnctccggccttttgtattnntatttttgttcatctgctgcnnttnacattcnggggggttgggggagtncnnntccntntnncncnnnnaagcacagaggggagaggggccagggaagtggatgtctcctcccctcccaccccaccctgttgtagcccctcctaccccctccccatccaggggctgtgtattattgtgagcgaataaacagagagacgctnnnaaaaaa

SEQ ID NO: 641634 - DNA, 130 bp, Homo sapiens
  misc_feature (54)..(54): n is a, c, g, or t
acggcctgtgtcgtctcgcatctttctcacacgacgaaacgcctcccagtcagnggaaggtaaaaaagaatgcgaagaaaaacggtgtgcgtggcatggtctacctaaggttaatgcgaacaggttttaa

SEQ ID NO: 641635 - DNA, 506 bp, Homo sapiens
  misc_feature (30)..(30): n is a, c, g, or t
  misc_feature (56)..(56): n is a, c, g, or t
  misc_feature (75)..(75): n is a, c, g, or t
  misc_feature (105)..(105): n is a, c, g, or t
  misc_feature (112)..(113): n is a, c, g, or t
  misc_feature (122)..(122): n is a, c, g, or t
  misc_feature (171)..(171): n is a, c, g, or t
  misc_feature (190)..(190): n is a, c, g, or t
  misc_feature (201)..(201): n is a, c, g, or t
  misc_feature (364)..(364): n is a, c, g, or t
  misc_feature (402)..(402): n is a, c, g, or t
ccgaaggggtcaagggcaaaaagctcaaanccaccttcccttagcccaagaaaagnaaacccttctcttccaaanaagcaacatggattaaaaaacccaaccccnaattccnnacccacagnatccccccactgctagaacagcaaatggtcggtacccccaggatctggncactgatggggctcccagnacggtctcctnaaaaggcttcttaggcagacagacctgggaacttggaagtacctgctggacgacctgggttcatggagaaaagagaagccgagaaggtggaggaggccggtaagtggtgacctccgctttcctgctgaggaacactgctttgaagtggcatggcccagcagtncccaccctccagggagaaaagctttgagtgggaagaanccttctatcctggtccccatgatggttctcagcacatcaagggtttttctccccagaaggacgcgatggaggatttcaggagggatttggctcgtgccgaattc

SEQ ID NO: 641636 - DNA, 446 bp, Homo sapiens
tcgcccgccagcagcacgttgcccaggtgcgagatgtagctgaaggccaggcgcagcgtctcaatcttggagagcttgcggtcggcgggctcggtggggatcagcgtgcgcagcgccgtgaaggccgtgttcacgctgttggtgcggtctcgctcgcgcgcgttcgccgtgtgccgctgccggggctcacggcctggccggccccctggccccccgcccccggcccgccggccccccgccctccgccgggcgccctggaggccgcagcgcgccgcgtgcacgcgacagggtttctcgtcggagcccgagctgtcgctgccgcggtcctcgtcctccgacagcgggctcacctcggggtacaggtagcggcccggcggcgccgggcgcagcgtggcgaaggacatggggccggcgggggcgcggcgtcagctctgtcgcgcgctgct

SEQ ID NO: 641637 - DNA, 162 bp, Homo sapiens
atagaaaggagggaaaatattatttccaaaagatggcagaaagaagaaattcatccctgaaagtatagttgggtccgattttgttgagattggctctttccctctgaacgtgctctctactgacccacccccttctgtcgtcttctcccaagcgtataagta

SEQ ID NO: 641638 - DNA, 639 bp, Homo sapiens
ctatcatatagtaaaagccagcccatgacgccctaacaggggccctctcagccactccgtaatgaccgtccggccatagccgatgtgtatttcactgtccagtccataacgctcctcatacataggtccgtacataatccagacacacgtaaccagtataccagatgatggctgcgatgtaacgacgagaaagcacaataccaaggctcaccacaacacccgacctagtgccaaaaaggcgcttcgaatacagggtataatcctcatttattaccatcagaagtttctctttctgtcgcaggactctgttctgagcctttatgaccacgtccaggcctagctccgcgtacacgcccgcgaattgtaggaagggcatctggacacccagacaggcatcacgccgccagcgtacaaggtcccctagaagtcgccacgtccgtggaacacatccggtattacttctgctatcaggagtagtcagaggccatccggagactcagccatgaggctagtagaagagagagcgaaaacaaataattcgaagcacgtgttagtcaacaagttttaactgggtcgtcgtatcctgagccgtccgtacaagcctcagagtacttcgagtctcgccttcgacattttcga

SEQ ID NO: 641639 - DNA, 166 bp, Homo sapiens
tcccccttaaaaaaaattttgggaaatttttccttgggggccctttccaaaattttttttttttaaaaaaaaagcggggacttggggccgttttccctttcccaaggcccaaaaaaagggtgggggggattttttaaaaaaaatccttggggtttggggattttta

SEQ ID NO: 641640 - DNA, 115 bp, Homo sapiens
caagtaatctgtgtataatgagcaatagcttcatcaaatgcttggactccaagctgtgccctgcccttaagactgggcttatgtataatacaggacttctggccattgccacttc

SEQ ID NO: 641641 - DNA, 352 bp, Homo sapiens
atcaccctgatatgtctgggggttagtaactgactccattactataatagagacataatactattaattatcatattaattttctatactgatatgctatcacctatattgaggacaatagagagagcttacactcatattagtctcagctaattagttcattgaagatacctgaaccaggacatttagaacccaggacatatgggagtacattaaggataaatgactactacaaaatggataaccatgctcattccttcaaaacagagatacaaacaatgaaggaaatattagacctatacatgctcgaatttgattcttcccgtgtcctataaaagtgataaaggttaaa

SEQ ID NO: 641642 - DNA, 196 bp, Homo sapiens
cagaaaaacccaaagaaaaaattttccccctttgttatttccccctggtttgaaatcaatcaaaagaatttttttccagggggggtttccttgggtggaaaaaaaccccccggcaaaaatttttttatttacttgaagacagggggttttccccagcccaaagtttactttttttttttttttttttttgacagga

SEQ ID NO: 641643 - DNA, 283 bp, Homo sapiens
gtagacagacttggtttcatgttggcacatttaatgttgaaatggatttaagcaggtgtaaaatggcttcatcttcctttattatcattataaggtcactaggacatagttacattaagttcattagaacatagttattccactaggacatacttataccagtgtattttttaccccttagcatcaaaatctgttacccaaattttactctgtaaataagagaaaatatttttacaaatcttaagaattctttattcacttacatgttgtctaaatgcaatca

SEQ ID NO: 641644 - DNA, 202 bp, Homo sapiens
ggacagcacagaggagggcggacgatgaagttctagatccattgagacaagctctagacagtagcatgcagacccacaaaatttaccaacatccccagcagattggcattcactgtttctgctcctgtggcctcacacggatgcaacccagctaacggtttaatatggacctctgcctcatctttcttcttttgcacttcag

SEQ ID NO: 641645 - DNA, 893 bp, Homo sapiens
gggatatcattatataatatttaaagtcacacagttcttaccggagagtgggtggcagtaggaggcagggggggagttctgcaaatatttcgaatagctgcagagaagaaaacatgaatgacaatagtcaaattcaatttaacaaagaatatctgattataagtgctaagagctaagccatatacagtaatgagtataagtattatgcctatttacagatagtaagtcatatccctatattacagagtatgagaataggctcataaaagttatgtttctgtcccaagatgcaagtggggcaagattcactcaggtctgtggctttagattccctgcattttcaaacactgtgctacaccaaggggaaataagatgtacagaagagaatcaaaacttaccaactctgataaaagccatcaacaactatcattttcgccctagtttcgatagaatctatgagaaaggtaccaattataggggaattacccatggacctggcacagaggaagtacaaggagaaaacgggcctctacaggacaagacatcatgttccagaagggccacagtgttaaacagaattgtttctgctacataagtgtaagccaagagtaatttcaccgtgcagaaatcagagctggatgtcaacggggacaccaaaggccggctacataacacacgtgatcagggtttgatcacttacctttccatatagtccaaagactagcgccaacatcagtaccagcaccactgtgtaccagacgccggcaccaacacacgatgaacaccaggcaagccaccaaaagacaccaaacgtacaacccccacatctcaccaccgaacacatggacgccaccccaacacgagtcagaaaaaggcccggattgtgacccacc

SEQ ID NO: 641646 - DNA, 723 bp, Homo sapiens
ggtgtgagggcagatctgggggtgcccagatggaaggaggcaggcattggggacacccaaggccccctgtgcagcaccatgaactaagcaggacacctggaggggaagaactgtggggacctggaggcctccaacgactcctttcctgcttcctgggacaggactattgggttggtgcagggattccagagaagacttcttggggctccctcaactccaacccccacagccatcccccagctggggcttggctgccaaccagacaggagcccggtgccctggaggttgtccatcctcttgacgggggctctttccctcagcccttggggccttggtgagcttggtgggagaaccgcgcttggttggttggcccaaccaatcgccccaagacccgggaaaccttgcactcaccccatggtactgttctcattcttgctttgccttggccctttgttcgggaccttgcttgggtgacgcgggaagccacacggtggcttggaagaccgggccggtcattccttcctttgctggaagggccgggttgccactttggtgtggcccccgtggtgtgccggtgtgcttgcaaccaacgtcttggcacaagggctctctttgacgtgttgtactcactctgcgaggcctccctgtgcgttgtccagcccttcgtgctcccggggggcgccatcgccgtggaccatctacactctccctcttcataccagg

SEQ ID NO: 641647 - DNA, 1647 bp, Homo sapiens
  misc_feature (1033)..(1033): n is a, c, g, or t
acatcttcagctagtcaatcatagcgtctgtgtgtgttggggtgcgtatagtcctactactaccagtttgttctccctaagctggatgatcgtcttgttgtccagttccctgtcccccgcgagagggtttgcagacacaaaggttgggtggtgtagttggtggagcgctgtgtctctcgttgtgtcccaccgcaggtggaaaacgcttcgggtgtgtctcctctacacaacgccccccgcggttgtgtggggtggatcaccactgttgggcccgcgcacgcagtacagacgcgtggttactcaccgcgggggaaggttgaataatcttcctggcgctcggagaatggcgcccgcccgccgtgagccctttgtgagaggtggaaagcccttctcgtttcccacgcgtggggggcacacaaaatatggtggggcgctgttacaacaagtgcttcacaaagaaaatgggtggtcccctggtatacaacggagatgtgtttttcgttccgtgggggacaaaaaccgcatttgccctggggtgtagacgacgcccgccaagagatgtggaggccccccccgccatctgggagaggaccacggcttgggggcttatacaacacagcatacaacggtgtgaagtattagtgcgcgtggggaaccccatgtcccagggggcccgcacaattttagggcccccgcggtttattgcgccccccgttaatttgggagtttgggcacaacacacgcgcgggcgtcacaccccacatgtggcactagcgcaaagattctttttcctggagaccttgtataaggcgtatataagacagactttgtagttttccgcccgcttgtttcttcgggtatatacaagactctcgtgcaaaagaatggggcccgctgaaagatgtgtctttgaaaagtttctcgggttagagatgtcctcgccccacattgggttgaatatatggggttttccctcgggaacaagagcgccacataggtgtgtctttgaaagagagcctttttctccacgagngctatatgcccaccctctttgggggtcgccctgttgccgttgtggttttctgggtgagatatatgagaggacccacagagcacacagcgtttgtcgcgcgtgtgggtgtgtccacatgcacagaagccacagctgtgagcacacacagagaaggggcttgttctgtgagaggcttgtgccaaaggttctaccccctcgaggtcttgctcgcccacgagaaaggctccacgagaagggctataaatggagatatttattcccgctcatatatacctcgccacaccgccacactctctctataatccacagctggtgggagaagaaccgcgtgtctccacagagacactcgttgtgtgttcacaattggccacatcttaaaagtttaggtagtaaaaaagactggttataatgagtaaccacaatgcactcgtaaaacctctcacgaaaggaaaaggaggaaatgttttgtggagccccttttggttttcttttttgcgtgtggcacgttttaaagttaattatagatttttaaaatccagtactttttaatgggaaccacttgacccaaaatttgtcaccagaattttgagaccccactttaaaaagtttaatga

SEQ ID NO: 641648 - DNA, 453 bp, Homo sapiens
cctgatcttcgatcacagtgattgttaaggtgccacataggctgctgaatgataatgactcgaaccggatcaacctctattgtcaattctcttgactgctggtgtctcaggttgtccattgctctgcggagattggattcttttacctcaaaaccagccaattcagttaggatagatccaggttctggtccaacatcttccatgaataccctgccgaacagttctaaagaaaggcgccaaggtcctagcagcatatcatgggaaataaccattcccataaagctacactgtggcctggaagatgtgagaggtggcccttcactttcagtaagtgctatatctgctagtaagccactttttaattgtgcagcacgatcatgagcagatggccctggttttgaactctcagtttcttctggcagcacgggctgttcttccccttttaatatgccg

SEQ ID NO: 641649 - DNA, 652 bp, Homo sapiens
  misc_feature (22)..(22): n is a, c, g, or t
gcccatgtctagagacaacgtnatgaaccccgcttggggtgttaaaagcgctgtcgtcgattccggaagttggcgcgcgcgtgcgaggctatgcgcggggagagggcaggcctctctttgtcgcctgcctccattggtctacgggggcgggggcggacaccggcgcggggcggacagcgcgctcacgctgcgggaaagcggtgcgcgtgcagcggggtgggtgccctgtcgcgggcgactcgacagcaccccgggcgcgtcgggcctggacggcctgaggcacgcgtgagcattcctggagcaggactgtcacggtgctgggggcgctggaggccaagaccggggtggagaagcggtatctggctgcaggagccgtcactctgctaagcctgtatctgctgttcggctacggagcgtctctgctgtgcaatctcatcggatttgtgtaccccgcatatgcctcaatcaaagctatcgagagcccaagcaaggacgacgacactgtgtggctcacctactgggtggtgtacgccctgtttgggctggccgagttcttcagcgatctactcctgtcctggttccctttctactacgtgggcaagtgcgccttccagttgttctgcatggctcccaggccctggaacggggctct

SEQ ID NO: 641650 - DNA, 198 bp, Homo sapiens
cgacagcatccctaagcacgggggtgccgattacgactcaccctttacgtaaattaggaagtttaaaggaatgatctctttctttctttctttattaaagtggagtcttactctgtcgcccaggctggagtacagtggcaagatctcagctcactacaacctctgcttcctgggttcaagtgattctccagcctcaga

SEQ ID NO: 641651 - DNA, 375 bp, Homo sapiens
gatactatctctcattcggacagtttgccgaatgggagttgtaatgcgagtggtgagagagagcatacttttcttgtgccggttttcagggggaatgtctccagcttttgcacattcagtatgatattggctgtgggtttgttgtatatggctcttcttattttgaggtatgtttcttcagttcctagtttattgagaattttaaacgtgaaggaatgttgaattttattgggtgctttttctgcatctattgaggtaatcatgtgttttttttatttagttttctttatgtgatgagtcacatttgttgatttgcatatgttgaatcaaccttgcatcctggggacaaagccaattccattgtggtggatgcac

SEQ ID NO: 641652 - DNA, 162 bp, Homo sapiens
ccagttgtatgcacatagatactctcaattacttatagaccataactctgctttatatttctaagccctccattctaggggtgtagctgcagggcatttttctctattaccatctcacttcacacttttatctcctctctagcagggtatattttgtattct

SEQ ID NO: 641653 - DNA, 855 bp, Homo sapiens
cagagccccaaattaaaaaagaagcaaaaccagctatatctgaaaaagtgcaaatacacaaacaagacatagtgaaaccagaaaagactgtttctcatggtaaaccagaagaaaaagttctcaagcaggtaaaagctgtcacaatagaaaaaacagccaagcccaaaccaacaaaaaagctgaacatcgagaaagagaacctccatctataaaaacagacaaaccaaaacaatccaaaaggaacatcagaagtcacagaatcaggaacgaagaaaactgaaatatctgaaaaagaacagtacaagaaaaagcagacatgaagcatcttagagaagaaaaagtctcaacaagaaaagaacagtcttcaattacacaatgtgacaaaagcagaaaaacctgcaagagtatcacaagatgttgaagatgtaccagcttcaaagaaagctaaagaaggaactgaagatgtgtctcccacaaagcagaaaagtcccatcagtttcttccagtgtgtctactgtggatgggtacaatggtatggatttcagtttcctttcactcctgagaacgcctggagagagctctggtcaagcaaattctccaggacagaagcaccaggaccgtaacacccatgtgatgaccttacagtgctttaagacttgaccaaagggccgttcgtcccacgagtccaggcaatagaatttgcaccagagagttcggcaaacttgtccggcgggttggaggaacgggccaaggtggtggcgcacacagtcaagggccagcccaaacaggagggggcggcggggacagggggagaaatcacgccaaaggggcacctcggtcggggtcacaagggcg

SEQ ID NO: 641654 - DNA, 318 bp, Homo sapiens
  misc_feature (20)..(20): n is a, c, g, or t
  misc_feature (252)..(252): n is a, c, g, or t
  misc_feature (281)..(281): n is a, c, g, or t
gtaaaaatcatgtatatganttattttaccaagtagtattatctgcacgagacaaatttaagtattttaaaaatcatccttattaataaataatcctcatataatgcacagtattgccacaaatgcccacttcattttgtctgcatagacatattaagaatttttcaatgatgtaatttaattatcctaaaagaaatgacagattcttctgtaggaaaaaataaaaacatgaatatctcaaattataatggntaatctctaaaatatgcttaaagtaagangtttctatgttatgtggttatgttatcaataatattt

SEQ ID NO: 641655 - DNA, 199 bp, Homo sapiens
gagtgggatggggcttgcctggagtgttgggggcagcctgggaacacctccgacttaatatgcagtggttagagacagaagagggactctgctggcagcagacccagactgaactgctcggagtgtactttccttgacagtgcaatgcttgttggccagtggctctgcttgacatactacctcctagcgcagacttcag

SEQ ID NO: 641656 - DNA, 975 bp, Homo sapiens
ggtgaaagtggactccggagactcggaagtggtcgatgggcttatgctccagcaacatcactctcctcatgtgctcagcttataggaaccagactgcgtcaagcactttttgtgcgcccatccttagtagcagtagcattgcagatgacaccaggtttcaggaaagaggatgtctacagttgcttatcgcttcctacgtggtgtttatcgcagatgagttcatcttccttccaggaaacgacactagaggacgtttgaacgaaggctgttacctgctttgtagaagtgaagccatacaagtgatctactgagaagacgatcctagttacagagaaaggaaatactgtgtgagaattttgagtaggactctttaataccttttgtggaaagctatcgagataagttgcaagtagcgttttgagtgaatgaagaggaccacttcagtgaggaacagtacttgtgctgcagtcagaacagattcacaagtcagcttctcgatcacaggtacctctcaaggtgtctgatgtattatctatctgatgtgcagaaaaacgccttagcagcctgtgtgacggctcggagtagtggagaagaaagaagataaataataactagtatatttaatgtgtatgaaccgtgccacaacctaattagaagatatgcttggctgtaaggacacggataggaaaaccagtgactggaaaaacttttactactcgagcgtaactatgttatgggccaacttcggtcacgtaattgctctcatccgaaggactcattacacaaacagggaagttcatggaacgagacccattctcctcatactccctgagattctcatgaccggggacgcacatcggcaccaggatgatccttggcatgcaacagttaagtcttccccaccaacgggttaacaggggttggtactccgaacctattctgtggtcaaactaacttctggcaccacaccaataa

SEQ ID NO: 641657 - DNA, 153 bp, Homo sapiens
tcttgtttcctgcacttcgggaggggaacgagcggatcacccgaggtcgggtgatcccgctgtattgctctatatagtgagatccctatatagggtctcactctattgtccaggctggtctggcctggccaatgtggtgaagcctcatttcta

SEQ ID NO: 641658 - DNA, 218 bp, Homo sapiens
gcccagcgtgcagactattgaatccacacgatggaaagaagagaatgatttttaaattctccagagatcatgagatgcgtccggtcagttttctcatgtgagaggataggcaggccaaaaactaaaattgctatcagcccccgccgctgtctggtacgcgaggaaactttccgaggactttacaagcatagttgcaaaatgctagtaggtctgggact

SEQ ID NO: 641659 - DNA, 327 bp, Homo sapiens
atgataggtaatagctgcatataaataatttttaacatagaattatctagcaatactacatctagttatataaattactagtaagttctcaaatttaaaatatgagtgtgtgagtaaaaattacattctttttaacttctttgaaacaaactacagatacaaaaatctttctcagtacaaacaaaaccatttcttttcctccatttttacgccaaagaaaataaatacacctactgatcaaaattttagcagacaagcatcacttatataataaacgcaagatatgggccaactagaggtcaacactagaagagctatcacctgtca

SEQ ID NO: 641660 - DNA, 223 bp, Homo sapiens
  misc_feature (113)..(114): n is a, c, g, or t
  misc_feature (116)..(116): n is a, c, g, or t
gagtcaatctccacatatgacatctccacccacctggcctctcagggcattcatctacctacctacgtaggatactatacatatacaggtaaagccaagactacctaccttanngngctactacaatctagcatctaccaggtacagcatctaggaccagggtacagtatacgtaccagacaccctgacgacaggaccatatagcatgtacggcttaccaaca

SEQ ID NO: 641661 - DNA, 1594 bp, Homo sapiens
ggttgcgcgctctcgtcgctctgttgagctgaccgcgcgcgctctgttgtgtggccgcgtgttattcattgcgcgggattggctcgttggctgttggcgcctagtagccgtgttgcacagatcgggtgggttcggtcggtgtcctggggttgcttgcccgcctcggtcgacgctgttgtgggggaacccttcggggggcgccgtaggatcattttttatatttattgggccccgggggtttttacacgagtgggtccctcggtggctccggagccgccgttgttgggccaggggaccccctcgatggttgctctgccccgcccgcaccctttttctccgaggaagtagtagcgtcgctctctatataacactcgctgcgtggtgtgcacccaccaatgggggggggtatgaaccactgttttccacgggggtgcacaagagggggctgttccacgggtatcccaacgggggcggctcacacatgagtgagcccccacacaacgcggggccacggcgagacccaacgaaaggggccaccaaagagccacgaactttcttaggggggacccccagggagcacaactacgccacctggtgccgcctgagggtccccgacgcatggcccgaccgagccgctctcaaccccgtcaaggaggggtgtctctcccttccggcaagaggtgtcccgtttccggcgggtctcgttttaaggtggggaagagccccccacatgtggggcgcgtggtaaaatcccacgggggttctctccgccgtatccttaagacgtctcaagagacggtggattcttgtgccgcacaccacagggtgtatattctgcgggggagtattctctctcgcggttttattgttggggcacacacagagggcgcgcacccacagggttccagagaggcggtgtaaaaaagaggggggcgccccactgtctcactgggagcgcacacttgtgccaaaacacaatatggcgcgcacgacgaagagcggtgacacaccgacaacgtctcacacatgtctcctcttttgtttctatccccccaccctttggagggattaaaaaatagaggtctgggccaagttgttcccgccccacactgtgaactttgtgtctctcgtgtgagagagagagtttgagagttgtctcgtggtctttgggggggagagaaccccccccaccgctcccctctcctcccactctgggggcacacacagagccccacaaccacacacggcgcgggggaaatgcgtcccacacgccacacgggcacacaacaccaccacagagacccacacaataggtgggtgtgggggcacccccacacacgggtctggggccccacaatgcacggcgcctgcgtggggccggaacggtggcgtggctggtccctcatatcaccccttgttggtttcgctggcacacttttccacggtgccctgggggttgaaccacggaggccgatcaagaagagtggagcctggccacagaagtgttgagccacacacacccccatttcacgagggtaaacactccacacacgcttccccacacattttctggttgcccagtataagccttgga

SEQ ID NO: 641662 - DNA, 1184 bp, Homo sapiens
gtatttttatatcagcctgagtctcctgatgcccacatcccaggcttcaccctgaatggttccatgcctgagtggtggagcactaagccctgtcgagacacttgccttcttcacccagctaatctgtagtggctggacctatgtcctcacgtgacacactaatcgaactatgcaactacaaagcttctcatcccagtgaggtggctcatgtgccaccccttactgctggcctggaatctaccccactactagtggtgtcagtgctccattcaggatttcgccccttacccatctcttacctaacccaaccactcaaattaatacttaactttacctgcagcaccagttgggcagcactggagtgcatgaggaggcagagtggtgaagtggccagtctggtgctgcctgtggttctagtctcctttgcactgagtggccacactattcaccatgagaagcagggcctgtcgggcagcctgccaaactcactgctcaagaagacatggcagactcctgccctgttgtgtatcagatgccagatatttatctatatttacaggttgtccacatctttcaaactacagaccactaacgttcatcatgcatcatcctggactagccaactatgtcaatacaacaactcactcctgttacttcactcaccagatatcaatgtctgaattaaaaaaaatagatatatgaacttgtcttggttcgcatttgacagggtcaagaagtgcaggggactcgcgacgtcgacacacgcacatctagcttggtggttgccaacacactgcgaaccgcgcatatgacacctcgcagcccggcatccccctccccttcacacgatacctatcctcttgtcctcctgagcaccaaacacgtggttaggaccgcgtgtataccgtcgagattttcttactatccagtacattaagcgtccaaggacaattatcataaccaacatgatctacgcgtgaacacaaacacacatttttcccccaccaccccccactctcaccataaccatcataccctcatcctgtagcacccacccccatctcacccatgtccacccccccatcctcccccccccctactaatacccaaacaccaccctcccaaacctatataccctttactctaaacatatatttttcctttataacacccctccatccccc

SEQ ID NO: 641663 - DNA, 205 bp, Homo sapiens
tttcattctaaaaatcttctcaaggctggatgatgtggaatttggtctggttaaggcacttcttggctaatgatgaaccacggtgggggttttttcacaattaaccctaattctgggcccctttggccttatcaagttattaactttcctggatcccggtcgtatcattcttcctcaccagtctgatttcttgggatagtgtctc

SEQ ID NO: 641664 - DNA, 608 bp, Homo sapiens
cttcgacggtgttctgtgtatagcatttagtgaatttgtgggatattcctctgaaatagaaggtaaactaattggtctttctcccatgggcatctggaggagagttctcttccacgtgttttttctgctgggcacaatggccagaatgtcctaacaaatggatatggatgccagccaggcaacagcaaatagcacacttccaaaagtagcctgggggctgtgaaacctctagagcctgtattagtagaacccaaatatacctcgcttagtttaactgccaatcagaaaattaaaacaaattaataatctagttcataccatttataatgctggaaagcctccctcctagaataaacggactgcctaaagggctgcctaaagcaagccagagaaagaagaatataacttactggaaggggagagtttcaattgccctcttgagttacatacacacaaaaaagctccagtttagatctcagtttccaaattaaagatctgaggtgaaaggaacatatttgtgtttgcctaacataagccatataaaatatagtaaaattaagtctgagccagtcaatgtaataaaaccatgttattcttttatgggcggg

SEQ ID NO: 641665 - DNA, 1177 bp, Homo sapiens
  misc_feature (1177)..(1177): n is a, c, g, or t
cttgtgggaagagctgaagcaggcgctcttggctcggcgcggcccgctgcaatccgtggaggaacgcgccgccgagccaccatcatgcctgggcacttacaggaaggcttcggctgcgtggtcaccaaccgattcgaccagttatttgacgacgaatcggaccccttcgaggtgctgaaggcagcagagaacaagaaaaaagaagccggcgggggcggcgttgggggccctggggccaagagcgcagctcaggccgcggcccagaccaactccaacgcggcaggcaaacagctgcgcaaggagtcccagaaagaccgcaagaacccgctgccccccagcgttggcgtggttgacaagaaagaggagacgcagccgcccgtggcgcttaagaaagaaggaataagacgagttggaagaagacctgatcaacaacttcaggggtgaagggaaaataattgatagaagaccagaaaggcgaccacctcgtgaacgaagattcgaaaagccacttgaaggaaaagggtgaaggaggcgaattttcacgttgatagaccgattattgaccgacctattcgaggtcgtggtggtcttggaagaggtcgagggggccgtggacgtggaatgggccgaggagatggatttgattctcgtggcaacgtgaatttgataggcatagtggaagtgatagatcttctttttcacattaccagtggcctgaagcacgaggacaaacgtggaggtagcggatctcacaatggggaaactggtcaagacgaattactggacttggatcatcagatggtgatgagggaacactggaagggtgagaacattatcagtggagacactgaaattagggaatgtagttgagaggttaaaagggagggcccaagggatgacttggctgatgtgacggattccaaaatatgggccggggacaggttaattagtatttgggaacccactagggggcttggtgacggagaaggaggttgttcaaacacgagggagcagtgatgaaaggtggtgacacatttgtcaggagacgatatggttggtgagaaatgtagagacgcgacgagaggaggagagatatgtttggacacacgaacatatgttgaacagttgaggcatattctaatataatagtagtaggagatgtaagatagaaggtcgn

SEQ ID NO: 641666 - DNA, 340 bp, Homo sapiens
ccccccccgaaacccgggggcaggggttttttttggggggaaggggaagggggcccaataagcaaaccccctttccccgggggttgggcgttttttttattcaggtgggcccccgggttttccccttggaaagggggcggtgggggccaccccatttttttgggtttggtccctcttttggcccccccgggttttccctttttggttccgggttgttttttttttggaattttgggggggtaacctttttcccccgggaaccgcttttccattttttcggttttttttcccctcccttttggggttttggcccctcgggcccaaattttgggccggggga

SEQ ID NO: 641667 - DNA, 739 bp, Homo sapiens
  misc_feature (19)..(19): n is a, c, g, or t
  misc_feature (72)..(72): n is a, c, g, or t
  misc_feature (96)..(96): n is a, c, g, or t
  misc_feature (109)..(109): n is a, c, g, or t
  misc_feature (111)..(111): n is a, c, g, or t
  misc_feature (113)..(113): n is a, c, g, or t
  misc_feature (118)..(118): n is a, c, g, or t
  misc_feature (125)..(125): n is a, c, g, or t
  misc_feature (146)..(146): n is a, c, g, or t
  misc_feature (148)..(148): n is a, c, g, or t
  misc_feature (181)..(181): n is a, c, g, or t
  misc_feature (188)..(188): n is a, c, g, or t
  misc_feature (197)..(197): n is a, c, g, or t
  misc_feature (213)..(213): n is a, c, g, or t
  misc_feature (249)..(249): n is a, c, g, or t
  misc_feature (274)..(274): n is a, c, g, or t
  misc_feature (307)..(307): n is a, c, g, or t
  misc_feature (332)..(332): n is a, c, g, or t
  misc_feature (725)..(725): n is a, c, g, or t
aggccgggtcaacttcttnaacgtggacatgttgctacttgaagaggctatttgtgtaccttcctgggtggntccaagccaccccagagagttatntttatcgaggacntnangctgnctgcaancttcgttgcacgggaactatngncacagtgtcccaccatctaagagatcagagacnatggctnctgtggctnctgctgtgctttctgngctgtgttagtcttctctgtccggatttgcttcctntcttatttgcatgtcagcgttgtgntgtctttttttttttctgtctcttcatgctgtngcagcatgtgtgggggacggctgtnatggtggctatcctgctgaagcttggaacttctggacaagaaaaggcctggtttctggtggcctctatgaatcccatgtagggtgcagaccgtactccatccctccctgtgagcaccacgtcaacggctcccggcccccatgcacggggggagggagatacccccaagtgtagcaagatctgtgagcctggctacagcccgacctacaaacaggacaagcactacggatacaattcctacagcgtctccaatagcgagaaggacatcatggccgagatctacaaaaacggccccgtggagggagctttctctgtgtattcggacttcctgctctacaagtcaggagtgtaccaacacgtcacggagagatgatgggtggcatgcatccgcatnctgggctgggggtg

SEQ ID NO: 641668 - DNA, 950 bp, Homo sapiens
taaggcccattggagtatttggtttccaattagggagatagtgggtattaggattaggatggtggtgaagtttagtccggatgctatggtccaatgatggtaaaagggtagcttagggtggtcctccgattcaggttaaaatgaggaggtcggcggctaggagtcaataaagtgatgggcttagggggcgaaatataatgcttggttcgttgggatatatggaggagggggatcatggctaggatgaggatggatagtaatagggcaaggacgcctcctagttcggtaaggcacggatcggagaattgtgtaggcgaaaaggaaatatcatcgggcttgacgtggggaggggtgtcaaaggggtcgcacccagggacaaacatggcccaggggctcgccatagccaggccccgctgacacactcagcgcccccggcccctccacaggccgcagacaccgcacccaacacccgtcaagcccgaggcgccctcacctcacatccgcccgccaccagggcggcaccgtcgaccacacacgccactgccaccgcgctgcccccacacgcgactgcacgagccccccgaccccccgcacacacccccagcacgacgcgccgtcgccgcccagcgcaggaccaccgcacgcgccacaccaccatccacaacgcaacaccaccgcgcaccacgggcgcacccaccccgcgaccccgccgacacccccccgcacaagcgcaccacgcccgcaacggcgaacaccccgccccccccgaccccaacggcctccccaccaccgcagcacaccctgccgcgccgcaccccaccagcccccgcacccaccgccccgcaacacacgacacgagcccaaccacctcacaaccgacgccccccaccgccccactccccgacccccccgcaccaacaccccccccccgcccaccactcagcacaccg

SEQ ID NO: 641669 - DNA, 537 bp, Homo sapiens
aaaaacaacaaggaaatatttagaattatgttcacaattttacttatgatactatagtgtaaaaacggacacaaactgaaactttcctagcttatttcacgtttaacttttacacacgtgtttaactcagtgcttgttactactgtggacgctttcgacccactacagttaactcttattctctttttttcttacaactgtcagggtatggctcctgatgtgacccagggtataaaggtgcaatggccagtggactcatgaggtattatttgcaatacacaccatcttaggagccctcacagcgaaatcatacctgtgccttagaccatcataggagatggacgtggagaaatatacggccatgtgatacccaaaccaagttgccacaagcctacattattaactaaatttcactataatatattgagcgtattaggcaaagggaacacacagatataagtgagcctaattgcgtcgacccaagaattgggggtcttaaacacatctcgtgggcctttatcaaactctctgcgcgat

SEQ ID NO: 641670 - DNA, 1401 bp, Homo sapiens
agcgggctcccgcgtgcgatgacgggcgggtaggatgtaggcagcgcaatgccaagacacgagactgctgggatggcggacgggcgaatctccgctgcaccaatgatgccatcgcgcgtccgagccctcggttatgcgggcctgactaaaacagcagggcgcctaccgcgccgtcccgtcaccaatttagcgccaccggggaccttcgggcgtcgcgggaacgtattacgccgcgtcgggcccggaggatccgagggaaacgccgtcggaggagcagatagggcgcccttagggggccggggcttcgtcataacggaagcagcgctgcaacggtaagacaggcacgactccgctactagcgaagcgccggcgttccgggggctccctagaggaagtcggggccccgaggaccgccgagccggtaaccgtggagtgccggctgtcgcggctgttttggaccatttcacgcgtgtgttgtgtgccacccaattgcgcgcgcgcgtgcccactgcgcgacgcgtgagggatagcccttcttacatgcttcggtgccgagcgttacctagagcgagccgtagacagggatagagatgtagggctagagctagactcacccgaagtgctggtaacaggagataggagatgagcctcgaagataatcggggcctcgtctggccgggggtaaccctaccaggggagccctgtggttccaagagccgaaacggaactttgtacttcgcttgtataagcgacaggacatgttggttgtatcccgcgtgagaacgatgtgcacgagagacatggaacgggggacaaacgcagacctgtgcaaggtccgaaacaagtttagggtacaccccacgattaatttgctatcgggtggggataaaccaggtgggttgaaaccatgaaggaaaagcaatccaacgacaagcgaagccaactcggttcacttaggaaaacctggggggcgcgtctcaattgaacgccccttaatgcagttcagaatttatttagaccttcggaacggggaacaaggatttctttgcgtaagcgggtaaggaccttgggccgagggaaacgttcgaccgtaggattggccaaaacccagaggccaaggggaacttggtcagcaacgttcctccattaacatacaaggccaaagttgggaagcaacgacagttccaaactgttagacctatgagaaattcacttcgtgcgcttaaagagaaacacaggtgtacgttcccacggcggaaacgttggaacacgatacagtatagcgcgcatcggctactgtctcgtttggacctatacattgccacgtagtacccacacaagagaaccgttgttgtccacagaggcaacatacatacagatccagacgcaggaaagttattc

SEQ ID NO: 641671 - DNA, 623 bp, Homo sapiens
  misc_feature (235)..(235): n is a, c, g, or t
tgcctccagttccagcgggaggaacggccctcttccccacgatcctggccacaattaggttgttgcaacggtactccccaaaattgaaaggagtgccttggaacctcctctgcaccgcacccagggcgattagttgcctgcctgcctaatcagggcaggccgccttgtgccttagggcccggccaaaccaccagggagccaatttagccctcccgccaaggagccttgcccccanccaatcaatgtttgtttttgccctgatggtgcctcaggatcccccattcccccccctgggaaaagaggggggccccatgtgcttttccagtttttttggaattggggggccccccccaaaaaatgagccccctgtttcctccatcatttgggttccttttggctttggggaaaattttaaattttgggaggtcctccctttcccaagggtgggatttgtggcagggattcccctcaaaacctctttggaatttgggcctgatgggccctcccctggattttggggttcccagccccccatgtggattttgggggggcccttttgtgtttcccccccccttcaaggactcctttctttttttcccaaaaagcccaaaattttgggggga

SEQ ID NO: 641672 - DNA, 646 bp, Homo sapiens
  misc_feature (396)..(397): n is a, c, g, or t
agtacatatccaactcagcaaggggcgccatggtcatcaagactggacgagcagcagctagcagctggttgggtacatcatggccaatgctgacgaccatccagctacttctgctacccagcacggttccccgtgcgacctggttgcgagcctagtctcccgtactgctggtcgagatcattcgcctgcaggagcccagttgccgatcgaagattgaggtggccacttatgcctacctgctaccctgacttctagcaaaggccacctgagcgctatcctggccatcaaggggaagctatccaacagtgaggtcaagcgcatccggagcatcttggacgtccagcatgggggcgcaggagccctcccggcccctattttcccttataaagcccaggnncgccgtgagcgggattcagcaatggtggaatggaagacagaactggaagagaaagaacggaaaagatgagctctcgtctggcaggggctttgagggtcctgtggcgagctgtgagcaccgccagcgttacgacgtcacatcaggtggcccacggccctacaggctgccctgcaattggggccctgagccctccctcttcatcccccaaggctcaactagagggtggtccccgagggctggtgtctactg

SEQ ID NO: 641673 - DNA, 373 bp, Homo sapiens
caaaaaaattggggggggggggggggggtgggggttttatttttaaaaggtttttattgggatccaaggcaataccataaagctctcccccttttaaaggggccaattccggggggggggggttttcataagatttttccttggggttttttcataaggcttatttccggccttttcttaactagggccctttccccgaggccttcttcataataattcccgccctttttttccccctaaaagggaaccctggaaccccttagcggtctttcccccttcctcccaccccttttttccctaatccctagaaaccccccatttgggggggttttttttttttgccccccttttttttaaagggggtcatcccata

SEQ ID NO: 641674 - DNA, 383 bp, Homo sapiens
  misc_feature (63)..(63): n is a, c, g, or t
  misc_feature (133)..(134): n is a, c, g, or t
atccccggacacctctgtccagagcccctccacagtcggcctcatgactgtcctcctcgtggnatggcgagggccctcttcagctctctggagacagggccgagcctcacccatctgccctctgcacccaggnncgccgtgagcgggattcagcaatggtggaatggaagacagaactggaagagaaagaacggaaaagatgagctctcgtctggcaggggctttgagggtcctgtggcgagctgtgagcaccgccagcgttacgacgtcacatcaggtggcccacggccctacaggctgccctgcaattggggccctgagccctccctcttcatcccccaaggctcaactagagggtggtccccgagggctggtgtctactg

SEQ ID NO: 641675 - DNA, 225 bp, Homo sapiens
gcactctcgtgctgctgcatcgcagtccttttgtagctagatcgatgtggtcattgttcacatgcccagaatttttgtcatacagcgaatccttgatggagtcatggatttgtgtttcccttatgactgccacaaacggaactacctttccaactctttgcaagagaaaatatgccaagcatgaatgataatgcttaaaccagtatacaaacagtctactcatga

SEQ ID NO: 641676 - DNA, 562 bp, Homo sapiens
caccagctcggggttgcacaccagctcggggttgccagtcccaagcaagtctgaaattcagcagggcaaattccgtggggtttcaaggcccgtgaatgctgcaactgcggctcagtgccccaccctctgcacctgcacctctgccagcctctgcctctaggcctaaggccctgaccttggagtcgttcttcctttttctcaaagggtagcacatgtttgcagctgcctgggtctgtcatcctgtttcttgcctgtagactctcagaagcccaataccttccttcatttcatcctgtctctgttcccatcaatccaagcaggcagtgtttctgctggtaaaacattctcataaaccttctgggtctcccctgtatgtcacagggagccaggccattagagagaagggttcactcggatcctccctggataatcttgtctctattcctggcttctgttgagatgagtgaatggacccatgagtcacatacctcatctctgcagagatggctttctctgcagaacacactttcctaacagtgaacctcacaaccccgagctggtg

SEQ ID NO: 641677 - DNA, 186 bp, Homo sapiens
  misc_feature (118)..(118): n is a, c, g, or t
  misc_feature (152)..(152): n is a, c, g, or t
ggtgataaagtagagcagcaaggaggaggtgcttggaggtagtagctctctgtgctggagtatgcagagggtgagaagtctggcaggatgttgaaaagatatcgaagctcagttctgngtgtggagaggggaccgagatgatcttggcgatntcttccactcttggagctggggagttgcggaagg

SEQ ID NO: 641678 - DNA, 671 bp, Homo sapiens
  misc_feature (259)..(259): n is a, c, g, or t
ttaccaacccttctccccaagacacacaccaccacaggctcaaaaattctgctgtgtgaatgaataaacaaacttaattttctctcttgacttaatcaaatgcctttactttgatttacctgcaggtgctggttattatagtcagatattttaatttttgacaatgcgataagtgtaaaatgatgtatcaggaatccaattgcattacctaataactgctaataagttgagcacctttcatatatttatttcccatggnagtttccttttcagaaaaaaaaaatgcctgctcataaatttggctcatttttctgtggtctttttcttactggatttttaaggggttttatattgttttagatatcccttcttggccagttacatgaattagtaaggttttctcgtaattgtaacttattctttcttttttctttctttcttttctgtcccaccttttgtgggtgtagtctgatgaatagaaattgaatggcagtataaccaaatataccaatcttcaattttttgccgtatggtaaggattttgtgactggtctatttctacccaagcccttaaagatattctatattttccccaacaagatttaaagatttcctttcacattttagtttttcaaccactgtggaatgattctgtgtaggatgtgaaggcg

SEQ ID NO: 641679 - DNA, 103 bp, Homo sapiens
gcggccgcctactactactactactactactgctcgaattcaagcttctaacgatgtacggggacatgtacctctgattaataaatgcttatgaaacaaaaaa

SEQ ID NO: 641680 - DNA, 134 bp, Homo sapiens
ttggagctcatcgtatgtgtgagccaccgctcttacacagctcggctgacccatactggctctttctgatcatatgccaacacaatgtgcataccagcaatgatagtctatgaatgtgtgctctgtgaccacct

SEQ ID NO: 641681 - DNA, 867 bp, Homo sapiens
gtctgaccgccagatcaacctggagctctacgcctcctacatgtactgtccactgtcttactacttggatcgcgattgatgtggcttagaagacacttcgtcctaagtactttcttcaccgatctcatggaggagagggaacatgctgacaaatcgtgatgatagctgcgatataccaatcgaggtggaccgaatgcttccttcaggatatcaagaagccatactgtgatgactgcgatagccgggcatgaatgcgatgcgattgtgcattacaatttggaaactcattgtgtaatcaggtcctgctgacgtcggtaacgtagcacaaccactggcgccacttgactaatagagatgcatccccgatctgtgttgtgacttcattggaaacacactgtgacctggaatgagcgaggtgcaacagccgatccaacgtaattgggtgagcacgtgaacgccaagctgtgctgcatagatggggatgcgcccgaatctggcttggcggaattatctctttgacaagcacaccctgggagtacagtgataatgaaagctaaggcctcgggctaattgtccccatagtgcgtggggtgacttccctggtcaccaaggcagtgcatgcatgtggggttgcctttaccttttctataagatgtagcaaaacatccacttaagttcttgtgattggtaccattccttcgacataaagaactctggtagccacgaggagggtgtccggccgaagaagacgagccgcgtgcatgggtcccgtaaaaaccgtaagaagtgacgaggcgcaacgtccccggaccgggtcctaacaaaggggaaaacgcggggccccaatggaggatacaaccggtccga

SEQ ID NO: 641682 - DNA, 255 bp, Homo sapiens
  misc_feature (59)..(59): n is a, c, g, or t
  misc_feature (75)..(75): n is a, c, g, or t
  misc_feature (105)..(106): n is a, c, g, or t
gggtttctcccgaacgagagagaagtggacgagacaagatgtcgtgtgatggtcttctntcgtctttacttttcntaaatgaaacaccgacctaataaacattannaccatgttccgtcgaccgttgcaagggaagttctgtgtctcctctttaggtctagtaagagtcgaagggtccgtctgggtgagtcactaggactagtctacttgctcctgttgcggctaagtgtcccgtgtaagtggtacctgatgtgc

SEQ ID NO: 641683 - DNA, 380 bp, Homo sapiens
ggcaagagcagatgccagtcatggatgaccaacgcgaccttatctccaacaatgagcaactgcccatgctgtgccgtcgccctgatgccccggagagcaagtgcagccgcgaagccctgtacacacgctcatccatcctgaggactctgcttctcgctgggcaggtcaccaccgtctacttcctgtaccagaagcaaggccgcctggacacactgacagtcacactctcagaacctgcagctgtagaacctgcgcatgaagcttcccaaggctaccaagcctgtgagcaagatgcgcatggccacacccgctgctgatgcacgcgctggccatgggagccctgtgtcagacgcccatgcacaatgccaccaagttgtgcc

SEQ ID NO: 641684 - DNA, 1339 bp, Homo sapiens
agtgcggccgggaactgtgtgcgtgtggtggatgctgtacgtgagctggcccatgcccttctgcctgtgtcctgtgctgcctgcatgtcggtgtcgctgtgggtccgtgccctgaacgtgcgctcatagcgtgtcctcgtgcagcatgcttgctagatgtgcctgatgggtagcatcgtcgtgggccgtgtcactctgcgatgtggagccgtgcctgtgactgagcccctgatgttatgtggtgtgctgtattgcacatttgtgtctgaacatggcactatctaccacggcatagcttgactgtgggggtgtgctgtgttggtgctagggcccacgattgagtgacgcgcgatgcgggcttgaggtcttcacttaggggcccccacgccctctacacctctttacttcctccccctttgggaagctttggggagtttgggagtccctcggaacgctttgcgtgggggcgaaacgagtcgcactgggggttgtttgcaccgtcattgccgtactccttgcgcactttggtttctacggtgtggtcttaaggccaccgctttcttagggaggcatctttgggagggctatcgccttcggagttttgcgcgtctccgggtcatgttacttaagccgttttaccgaggaaggaattgctcaaatcgaaaatatcagggttaggcgtttagggtggatttcccgtccaccgattttaaatttattaacgttcaccccgttggatttgtgataggtttcgccccgggcgtatacgatctcctatggcgttcgtcaactaaatttccgagacccatatgaaaccaacgcgtatgggttggaggtcatcgaccaggggcatttgtgggccttgacaatttccccaagtttgtgccgaggagtccacgattggtgttaggtatccctactacgcctatcaccctagaaagtaagggggttaagttcaagttgaagcattatacggcgagtgtatgcattgaggggctttacttggcaggttggcgcgattagtttgccgcaacaagaggcgcagctaggaattttccacttcgcttccaggggagaacgcccacatccggaagttttcccacatctaccgtaaagagggcgttaaaaattgggcgcggagccgattgtggaggaatttggggacttaagcgttttaacgcagttgtatttgtccgagccgtgtgtatgttcaatccgacgatagagttaagcccgagattaggggtacaaaaaaggtcagctgggggagttacttaaagggcccagggtggattgtgtccagcacaaggcttgataggaagttgattggaggggttcg

SEQ ID NO: 641685 - DNA, 509 bp, Homo sapiens
tcgctcatgactcgcttgccccaggtcctggcatacatcatactactacagtttctatgattcttgaatacttcgtaagtgtagaatcgtaccttatttgtcctttcctggctggcttatttcacttagaataatatctttaattttcatccatgttgtagcatgtgtcagcatttcctcctttttaagtgctgaataatatttgatagtctggatatactacattttgtttatacattcatctgtccatggacacttagattatttccaccttttggctgtttatgctgctataaacataggtatactgtggtagaatatagatatatctgtccatggccctgctttcagttgtttagggtatatacccagaggtggaattccttgatcatgtagtaattctatttataattttttgggggaatctcgccatactgttttccagagtgactacactgcgttatattcctacctgtagtgcagaggggctccaatttctccacatcctc

SEQ ID NO: 641686 - DNA, 852 bp, Homo sapiens
tcactaacatgtgtaggattgacggtcggagggaatttgagattgtatgtttgtcatataatcactgttgctgaacattgatgagtcttccaaaatggaatcactagtaggtgcactgaatactgaaagtatgctgtctgggagagcatatagtcgtgtagctagaattcttataaccgtaattccagaattcacaaagtcaagagatctgctgtttgatagaggccttttaaaaagactatataacatttctattggctgtttatgtgaatgctcagggaatttggacatgtgtttatacagaagtggcttttatatttcttcaagtgataaattagcattaggacatatcagatagaacaggccagtttcctgatgagatgctagagatgttacggtaggttcatccttcctttttccatgttatatgtggagaagtgttaaacttgctcaagcaaatgggagtaggagataggtgaaaatagagattgtacaccattctatttgtttcatgcctgttttttctccaagtcctatatggaccttttgagaaatggcccacaaatctgagagggatagagtaaaaagaggcttaatgtatgtactcacaagttagacctattttgtgtaaaataggtctggtctgccataggtcataggaatgtgtagttgacgttctggagaaagagtcagactagatttgattgggagccactgcggggagtgcgcatacccaaccaaaggtcagtataaaatttctggagatccccttgcttttgaattgatgctgaccgacatggccagtttatctggcaagaagaaaagtgtgacaggccacatacgtggcacaaa

SEQ ID NO: 641687 - DNA, 472 bp, Homo sapiens
  misc_feature (65)..(65): n is a, c, g, or t
ctatcaataggagctgtatttcccatcataggaggcttcattcactgtttcccctattctcaggntaccccctaggccaaacctacgccaaaatccctttcactatcatattcatcggcgtaaatctaactttcttcccccaacactttctcggcctatccggaatgccccgacgttactcggactaccccgatgcaaaccccccatgaaacatcctatcatctggagggtcattcatttctctaacaccagtaatattaaaaattttcatgatttgagaagccttcgcttcgaagcgaaaagtcctaatagtaaaagaaccccccataaacctggagtggttaaatggatgccccccccccccccccccatttgaaaaacccgtatacataaaatttagacaaaaaaggaaggaatcgaaccccccaaaactggtttcaaaccaaccccctggcccccatgactttttcca

SEQ ID NO: 641688 - DNA, 521 bp, Homo sapiens
ctcaagcagtagttgtaactcctgaggagatccttccattttcttgttagctgtattcctaggtattttattctcttgtagcaattgtaaatgggagttcattcatgatttggctctccacttttctgttgttggtgtataggaatgctcgtgatttttgcacattgattttgtatcttgagactttcctgaagttgcttatcagcttaagaagattttgagctgagatgacagggttttctagatataggatcatatcatctgcaaacaaagatagtttgacttcctctcttcctatttgaatatgctttatttctttctcttgctggactgccctggccagaacttccaatactacgttgaataggagtggtgagagagggcatccttgtcctctgccagttttcaaaaggaaattcttccagcttttcccattcaatataatattggctgaagatgtgttatagatggcacctgttattttgaggaatgtttcttcaatacctcatttattgggagtt

SEQ ID NO: 641689 - DNA, 269 bp, Homo sapiens
gggaagctcagtaggagcgtcagagggaaaccaagatcgggttggggccacacactcaggatatattttagaccttcaagtggaagtgcagtgtaagttgttggatatgagagggttggcggcaaagatctcaatttgtggagtcaccgtcggagtctacaatccttgtggactaaactgaaggtcagcgtaggcgtgctgtgatgcacaactggaaacgcttcagtgtttagctggaggaggagtgtgatgaggggctgccagagagg

SEQ ID NO: 641690 - DNA, 235 bp, Homo sapiens
aggattaagtctacgctgcactgtctccgtgtgtaactactaatgattatctatcagaccctggaaaaccacactataaaatagggcactggcatcacaagttcgtttggttaaaaaaaaaaaaagtgggggcggcgggccaaagaagaggtttacctgtggatgatttccatgcccgatccgcagctgtaacattcctatagactggtgacccagcccttttgttcatcttttc

SEQ ID NO: 641691 - DNA, 246 bp, Homo sapiens
  misc_feature (41)..(41): n is a, c, g, or t
  misc_feature (152)..(152): n is a, c, g, or t
cagagtgaatgtcacaatatttcaggcttgcctccagaatntcctacaattttgagttgcattgtgaacgatgggaagaaaatacgtgtgagtgggatggtggaagggaaacacacttggagacaaacttcactttaaaatctgaatgggcnacacaccagtttgctgattgcaaagcaaaacgtgacacccccacctcatgcactgttgattattctaccgtgtattttgtcaactttgaagtcc

SEQ ID NO: 641692 - DNA, 380 bp, Homo sapiens
  misc_feature (380)..(380): n is a, c, g, or t
gtatcaacgcagagttgccattacggccggggggggtaaaaaaaaaaaaaaaaaaaaaaaaaaattgtgggccgcttgggccccaaaaattaaaacaattctggtggggcgcgcggcgggcgcccaggtatgtataagttagacctgcgcgcatctaccgttgtctcctaagaaaaaatccggggcacgagcactacgttgctgggggttctcctaccaaaatataaaaaaccgcgccggggggcgaaccccgggcgcggtttttggaacaaaatttcacaaaatgagcttacagacgcgccagtaacggggatctaaactaaacgcggagacgatccacagcggacctcgaatttaaaattaacgcccgcccgggagan

SEQ ID NO: 641693 - DNA, 172 bp, Homo sapiens
atgtgatcgaggaatcagctcatactgaagatacagagcagttcagtattcccctgaacctcggcccacatatactttgaaaaagatttactttgtgagagacagcatctcactctgtcacccaggctggagcacagtggtgccaccagagctcactgtggccttgaactcc

SEQ ID NO: 641694 - DNA, 1632 bp, Homo sapiens
  misc_feature (626)..(626): n is a, c, g, or t
  misc_feature (967)..(967): n is a, c, g, or t
  misc_feature (1432)..(1432): n is a, c, g, or t
ttccccccgagagcaaaatgatatcttgttcggcggtggtgacatcagatgctgcccccccccccgcggaaatatgtgtcgaatcgacgagaggacccctcttgtgccccgatagagtagtctgttgtgctcccgacaatgatacgatcaacaatgtggtgggaccaccatcattagtgtggtgccgtccccgttcccaacagagttggtggcgaccccagaattgtgtgtcaccccaaaccccccgacgagtgtgtgaaaaccatttgggaatgtgttgtctgcgagagacgatgtcttctctctttgggggggtgtgtcgttctccacccatgtgttgtaagacgccccactgcatagggttagggtgagaaatataatatagtggggggtgtgtttgctgttcgcgcggaccccacaagagtgtcacgcgtgttatatgtgtgtgtgacccgaacaattagcgtgttgggtgtgttgcccccgcggcaataagttttggagaggaagtttttggtgcccccgcaacgagagggtgtgtcttgggcgcccccctttgtctccgggaggggaccctctgtcgaattgttgcgggttgtagagcccccgccagccaccttttgggnccgttcgtgttcctccacgaacggttgacccccaccgccttctcaccggggtgttcgtgagaggccttcttctcggttgtgtgggggcctaattatcgcccctcacactagtgatctcccgcggcgcccaccgcggttttaattattccgcgcccacctttttggggagagcccccggcggagcccacgcccaccgcttttcttttcgctgattttatcccacccgtggggcacacttccgcccctctgtcccacgcgagagagatataaggggcccacacactatattttggttgggcgctttatagagcacacccacacatctccccccacacagtggncttctttgcggaggtggagaagtttttataagacccacgcgagagtgtagaagagagagagccacagagaatttctctcgcacatagccccattcgcgatcacccaataatatagtgggaccttgggagacacacactctgggcgcgcgagagtgatagtgaagagatattgggataaaagagtgtggagagggcccactcgcttttgggaggggaaggtctccctcgcgagtgttactctcgcctcgagggccacgaagaaagaaaggagaatgggttgtaggagaacctgagctgaagggttttctaatcacgcctctctgagatggcctctgttttccctctttccgcagcgagtataacgctatagaccacgagaggctataataaggaatgtgtgttggcgctaccacttgtcggcttccctcccgcgtttctgtctgctgagccacacagttgttgatntgaagcctcgtcgagcgcaaactgggagatcactcctcgcgctcacatatcgaacccttcggcttttccaccccctgagttttaccacacccccgttttttggcttgcttatgtgtaggtgaaccacctcacacccctgaaaactttgaggataacttttttaaaaaattaacccgtatctcttaatccctggatcccca

SEQ ID NO: 641695 - DNA, 1040 bp, Homo sapiens
  misc_feature (323)..(323): n is a, c, g, or t
  misc_feature (772)..(772): n is a, c, g, or t
gcgggtcctgatccggaacctgatcctgcctcccaacgctcaaccggctcgccaacaatgcgccagactctgatacagactgtcgggtgcgagagcctgtgactgtaagctaagaatcaggccttattgtatacatccaagctgaggtcgtacgagctactatcgccaggaacacaaaggaaactcatgcatcagaaaaggtgactaattgaaaggtaccacgaaggaaactatggtctgtcatcgataagtaccacgaatctgtatcatgagtatagaacgaaatcttaggggaatgtgtctgtggagctagcattaaactntacacgagatctcgcttgtttcggactggtgttaaaagatttcatcaacatgataaagctaaagctctgaaggagactcaccctgttcacgtaaccgattgcttaccatgcaatgtaatttagcacagatgatacaaccgagtatccatgagattccacggaatatcatactctcaggagaatgaagcctctggcagaccacgagtcaggagtccttggtctgggcacgtatagaaaaagtcctgatgcgcactgaacgttttgatcgacgacgattgacaggagctgctttattcggaactgaggactcatctgatgtgcatccccgtgatcatgcacgtattctgcatgttcggacatctgtctagtagacttgtctgagcgacaatggaactcgcatgcgcgataactgtgctgcgtatgtaccaggaagtcatcacaaatagaangtcctgatgtgcagtcgaacgctagtcagatgtgaccatggctgcgaccgtgcctattgagtcaggcagtttcggtcctctgagttgccaactaagcatagtgctccaattgtgcctgtgacctgatagggccccgtgtgttgggtgtgctgccagggcaacctgtttccaagtccttgtggccctcgggaacaacaagggagcctttctggggggaaagaaaacgcggcccagctttcctaggaagagacggcgcaaaacctataat

SEQ ID NO: 641696 - DNA, 119 bp, Homo sapiens
tggaaacagttatagtgatttgggtcaggatctctaatgaagtaacaaagatatcagggggggctgcagtcatcgtgaagggtggggagtgggaggatggcttgcaagggtggcttact

SEQ ID NO: 641697 - DNA, 234 bp, Homo sapiens
gtatagatgagacagaatcaccgacaaaaatgctgaagacccgaactgtcaggatgcctcttctccaaatgatcgcagcgtctctccatcaaggtgcacagaactgggaagtagaaattgaaagagaagtgctcttagaaaagttcatcaatggtgctaaggaaatttgctatggcttatatttactgagtttagaacattgtatatatatgtaggtgtatccgtaacagctgc

SEQ ID NO: 641698 - DNA, 431 bp, Homo sapiens
gcgtcgtctctacacggatccccttcatttaggcaatctcattgaccacacctgtctcttcctttattgcagtcactcttattttactagaatgtgggaatcattggcctcttggagagcctaagaagtctccattctgcgttcagctgtattcatttgttgcttttctgtctatattgttagtgttgtcaatgattcacatgataagccatagtttgatgtaatatagtgtgggggcttccatattccacaagtccatgtacaaccatttgcttatgtttgggtatgaaacttattaatcttgcaatttgccctggcttaattcatttaaggcaagtccattggtcgaactgttttgagctgctcttgttgtattcctccctttttattccctttttctcttcctcactttgttgcataagtttttcctg

SEQ ID NO: 641699 - DNA, 125 bp, Homo sapiens
gacagacagcacctcaatctgatacactcccgaataccagataaagaactcctctcgctctgatgggacattggtaaccctattttacatagtgaaattgtgtcatcaggctatagatctagacc

SEQ ID NO: 641700 - DNA, 398 bp, Homo sapiens
  misc_feature (56)..(56): n is a, c, g, or t
gagtattgctaacatgaactttgcaggtaaggtatgtctgtgaaaaatacgttcgnatgcgagataatgaacatctaatacattttgctcatcttcctcaataaactgttttatatcttcgaaacagatttaaaacaatccgatcggttgggtgcggtggctcacgcctgtggtcccagcactttgggaggccgaggcgggcggatcacctgaggtcaggagttcaggactagcctgaccaatatggtgaaaccccgtctctactgggagtgcaaaaattggccgggtgtggtggtgggcgcctgtagtcccagctgcttgggaggctgagacaggagagttgcttgattctcctgggggatggaggttgcagtgggtgccagagaggggcggagcag

SEQ ID NO: 641701 - DNA, 667 bp, Homo sapiens
  misc_feature (24)..(24): n is a, c, g, or t
  misc_feature (64)..(65): n is a, c, g, or t
  misc_feature (67)..(67): n is a, c, g, or t
  misc_feature (70)..(71): n is a, c, g, or t
  misc_feature (95)..(95): n is a, c, g, or t
  misc_feature (98)..(98): n is a, c, g, or t
  misc_feature (100)..(100): n is a, c, g, or t
  misc_feature (110)..(110): n is a, c, g, or t
  misc_feature (164)..(165): n is a, c, g, or t
  misc_feature (215)..(215): n is a, c, g, or t
  misc_feature (227)..(227): n is a, c, g, or t
  misc_feature (316)..(316): n is a, c, g, or t
  misc_feature (334)..(334): n is a, c, g, or t
  misc_feature (416)..(416): n is a, c, g, or t
  misc_feature (485)..(485): n is a, c, g, or t
  misc_feature (513)..(513): n is a, c, g, or t
  misc_feature (524)..(524): n is a, c, g, or t
  misc_feature (544)..(544): n is a, c, g, or t
  misc_feature (598)..(598): n is a, c, g, or t
  misc_feature (642)..(642): n is a, c, g, or t
aaacaatttcttggtattgttcgnaacattaatgcacgcaattatctcataagactttttttcnntnttnnggaaaatttccaattttggttttnatnanaatggcaatncagtaagctacattagagatcagatataatatacagcctatgcagctacatganntatagtttttgctgctttgttattacacaggtagttgcttccttcagctnaagcctggagtnttgtatttcttttatgcatattgggtttgcgttctattacttggcagtgagattgtactcccctgagttagctgtgttcatgtggtcanaataaattccagcatctnacaccaattccattaatcacagataagcttgaataagtgtaagataatagaaaaaaatatctagtgaatggcgaacattgtntatgtatgtatgctattcagtaatacagtagaagagcatcgtgggatattgagtctcaagatgatatgnaactgtctatgaaaaaggatcaaaagtnctcctacatgnaatactttaattcaggcaanaggtgtatgaaccaagtaaatctccaccctgaaagaacttaaatttccatgtgnagccatctttatttccttctttatttccaaataattggccactnagaaagtgtggacatttcatgatcg

SEQ ID NO: 641702 - DNA, 138 bp, Homo sapiens
aaaaattaaaaaaacccctttttttgggaaaaaccccccccaaaaaaaaaaattttttttttttcccctttacccaaaaaccctggggggcccgggccggcccttccggggggggccaaaaaaaaaacccccccttta

SEQ ID NO: 641703 - DNA, 331 bp, Homo sapiens
agcgctgcttttttgctcataagaggggcttcgctggcagtctgtacggcaagcttgagtcaggacccttcaaaactgtcctcaattggctggagggcagatctcgcgagtagggcagcgcgatgaagacattgcttcggtgggtgacgcggtacagctgcccaagggcgtacgtaacgggaatgccgaagcgtgtgacaaaggcagcggcggcggaagacggagatgagctcacgacagagccagaggccaggaagagtaagacggccgcgacgaagactgacaaagtggctgcagtagagggcccagccctgtatgaggaccccccaga

SEQ ID NO: 641704 - DNA, 449 bp, Homo sapiens
ggctgccttctccctgtactcctagaactaagggtagacagctctgcttcaagtgagttagcacagctttttcaattcatacagtattcaaaacaagatgcagacatttcatgttcaaaatgtgatattcttttttgttgttgttgagatggagtctcgctttgtcgcccaggctggagtgcagtggcacgatctcgactcactgcaacctccgcctcccacattcaagcgattctcgtacttcagcctcccgagtagctcggactacaagtgtgtgccaccatgcccagctaatttttgtatttttagtagacatggggtttcaccatattggccaggctggtcacgaactcttgaccttgtgatcagcccaccttggcctctcaaagtgctaggattataggcatgagccaccgcacccgaccctcttaaattcttaaataggtaca

SEQ ID NO: 641705 - DNA, 1070 bp, Homo sapiens
ccgacgccgtgctcgcagctcgcaggcgcctgtgtagccgtcgccaccgacgacagcccgtgcgccctcggctgctgtaccctgcctgctgctcccattcccctgcctgcctggccatgggtgctgctgctctggcctgcccctgtgacatgtgtccctgctgctggctcctgcggcgatggccaccaagatcgacaaagatggcttgcctgtggctggctgtacaaccgtggtgctgctgacgacggctcggccgtcatcttgggtgacttttaacatatgactggctccaccatctgtcccctggctgagcagggagcggagtaccaagcacttcatccagcatgtgcacagatgacagtccggttgtatggccattcgtgcgcttcaccacctggggatgccatgagcaagaggtccaagattagccctcatcacgtggatcggtgagaacgtcagcgggctgcaagcgcgccaaaaccggggacggacaagaccctggtgaccgaggtcgacagactttcgctaaggagctcggagatcctgtgactccgacaggagctggagtgaccgattcatcaagcagcgagcctgaagaagcgcggagaggagccaattacagacgccccagacggacactaaccccaaggacccgaccaaaccacccccttccacaggtcaatctgaccggcaccccgggggacgacggaccgcacagccacagagtacactaaccacacaagacacaaccgagcaaacgaacaagccacgagaaggcagggacacgaacccgtgggcacaacacaacacaacagacagaaatacttagaaactgtacagttccaatcgaggagagcaatgaacgtatatatgaaaataaaagataacacaccccaataaagaggaacagaacggcaaaaaccacaacgagcaacagacaaacacaacaagaccaaggaaccccgacaaggcaaaacacacgagcacagaacagaagaaacgaccaaaacagaaaacagaaacatgagcaccgccagccgcgacagaccgaacacagagaccccaaaaag

SEQ ID NO: 641706 - DNA, 203 bp, Homo sapiens
tatcgagctcggtacctcaaaaactgactctgtcgagggctacatgtcagctcacaacaggttcagtaggttataaaaacaggatggacatctggacagaaactgtagaggcagctgcaggttgtcctttagtgtctgaagctgccgaacatcataacagagactgacatgtagccctcgacagagtcagtttttgaatgtta

SEQ ID NO: 641707 - DNA, 262 bp, Homo sapiens
  misc_feature (8)..(8): n is a, c, g, or t
aatacaangctctccgtaatgctgtggccaaagctgtcctcgagtgcaagccactgggcattaagactgctctgaaggtaggatgggcccgtggcttctctctgataccaggtggcatcccttggagcctgcatgttccctgatttatgtcaaatgatgcagggtgatggaccactgatgcggaccatcacgtgacactgtattggaagtcacgtgcccacagcctccagtgcgcacctgactagtgtgcgtgaaccagtgg

SEQ ID NO: 641708 - DNA, 129 bp, Homo sapiens
tagtgccatgtgaatatgggggtacacaactccaagtgtaacattaattaaaggcttgctatgtactaagcactcttctaagttatcacctgtattgtctcatttaactttcacaatggccctatcggg

SEQ ID NO: 641709 - DNA, 572 bp, Homo sapiens
aggtctgtattttattttattttatttttttaggtatttccccttaatttttaccctataattactactctcactttgttctttcttccctgagacttcatagggcagaccaaattgtaatttcccttggtgtagtccctaaaatgtttcaagacagtttttctaatgttaggagtccttttttgtcaagacccatcattgtcaatttgtaaaacttgttcctttgaatttcttgagggaaggggcttatatgcattattggaagagggagaatgctcagcaacctgttttccttgaatcttcaggagggttacataagaaggaagcagaaactgtaattgaacataagaactgtggcaacacttgtatatatattgcagagcgccttggtgggtaaaaggtttagacgattcttgtcactctagagtaattttatgatgaagcggcaccaaagacacgctacacagcactcacaagtgagtttatattctattatatcatatattatgttcattcttatggcgtgacaaagaggtgatgtccacatgttctaaacaaaaaaagaaaaaaag

SEQ ID NO: 641710 - DNA, 420 bp, Homo sapiens
  misc_feature (225)..(225): n is a, c, g, or t
agcccaggggcaatggtttgggtgctcacttcccctttaggtggtccagggggtggaggcccctaaaaaaagatcagtaagccccagtgtccccccagcccccatgtttatgtgaacatgcgttgtgtgctgcttgctttggaaactgggcctgggtccaggcctagggtgagctccctgtccgtccaaacccaagatcagggttgagggtaaggaaaaaaaaancctaggaaagctgggcccaaaattggagactgtttgtctttcctggaaatgcaaaactgggcccgtggaacaccagtgtcagcatcaggggggaacccttaaaacaacagggggggggcccaggcccccaaatttttcttagggccccacccaggaaaaatggcggtttttaaaggagaaaatgtttgggcccca

SEQ ID NO: 641711 - DNA, 451 bp, Homo sapiens
  misc_feature (36)..(36): n is a, c, g, or t
  misc_feature (118)..(118): n is a, c, g, or t
aataataccaatttttaagggggcttaataacaccngtatattttaggttttaggttccctaataggcttccctgtctgaaatagtctccagtggcctcctagaggaagattacattncattaattaattcaacttcatctgtggtgattttgcattttaaaatattatgttgttaacattgccaaattatttagattcattatgtcagaatatcctgttttctcttaaaccttatttagaaatattaaattttaatgaaaaaatcagtaaaacccattttatagatttaaattaagaaaattagagatctaattattttatccttcatttcctatattgaagctattgtgaaatttattacagaaaatgttgaggcttattcaaaatactccaaattattattctattgtctattttatgtccacttaggatcactttttaaaggaaaac

SEQ ID NO: 641712 - DNA, 998 bp, Homo sapiens
gctggggagctcggcatggtggtccccggtgtagccatggggccctcgtcgttgggacagaggcggcccggttcgatggccccgtggtgctcaggtgagcagcggccgtcgggctacgtgcttgggatgcaggagctgttccggggccatagtaggacgcgcgagattcctggcgcacagtgccatggtgcgactctggtggcctggagttgcagacgggcgtctgcctagctctcgagggtccttctgacagaggagggccacgggtcttcttgtctggagaagggaccggttgtgtcacaatgaaacaacaagtttatcggaggcaccatggggataggttgtggaccagactttgttggctagtccaacgtaatcgctgatcctattgtgtgtactgtgcctgtcacgcgatgataaaaggcatgtcgcttctggtgatgtgaggacctacaaaagtgtattgactattgtggaacactagaggggagaacattgatatctgtgggagtgctgatgggcaaatcaatatgctgtaggtaacaaggatgatgtggggatcttgattgatgcaagatagacgttctgagagaagaagatacagtgtaaagttcggggatcaggaaatgtctctgtgaacaatgaaaatagatatgttcttctgacagaatggtagtgtgttgtatccaacatctacagtgagccaggaatgacaggcgtgtgtcacgtccgaacattgacattgttttctaatggatctgtatcgggtttggcccatgcggaattattttgcccggaagtgctgtgcttgtgtccgcctgcgaggtgacgcgtagggttgacggggcttgcggaagaatagggggaaaggccgcaaatcagagagaatcgcaatgtcggggcctcaggaatctggtgctcgcaggggccgaagaccagggggacgtgccttaagcagggtagccaaggctgattcataaaaaaaaagaggagaagaa

SEQ ID NO: 641713 - DNA, 211 bp, Homo sapiens
aaactacaacatctgagataataaattcactggatgcaattaacagcagattagacactgcagaaaaaaagattatgaaacacaaagccgccgggcgccgtggctcaggcctgtaatcccagcactttgggaggcggaggcgggtggatcacgatgtccagagatagagcccatcctggctaaaacagtgagacccccgtctttacaaaaa

SEQ ID NO: 641714 - DNA, 453 bp, Homo sapiens
  misc_feature (424)..(424): n is a, c, g, or t
ggggtcttactgtcacctaggctggagtgcaatggcatgatcatggctcactgcagccttgacctccccaggctcaggtgatcctcctacctcagcctcccaagtagctgggactgcaagtgcatgccaccacgcccagctaacttttgtattttttttagaggtggggttttgccatgttgaccaggctggtctcaaactcctgggctcaagccatccgcctgcctcggcctcccaaattgctgagattgcaggcgtgaaccactgcacctgggccccattttcttacatttaaatatttacgtttacctacatgtttttttaatgtgggctagtactgttccttccccccaccaagagacatattgggaaatataggagttctttataggttattcaccgtggattgaggaagttcactaantgggtatttcatttgcttcaggaaggcca

SEQ ID NO: 641715 - DNA, 402 bp, Homo sapiens
atagaaattagaaaatagtcagaggacaagcttcatacagtatgtatgtaccagtggaacgtacaagtatagtttcagagtaaaaagtgctacagtaacaaacccacatttaagaaagagacttagtcagagaaacaataagacaaaatcaccaacacgtagtacacaacaaatatatgtctcagctacatgatctaaaagttaaaggtcccaggagccccatcctgaacttggaaagtgtagccttcagaggtagtttctggtacaacgtatagatcttcctcttcctctacagagaaatacttctcaattaagcttaacgaagccttatacacagactcatttacatggttttgtagagcttcaattatgtctaagcctccacaatctgtcaatcataat

SEQ ID NO: 641716 - DNA, 368 bp, Homo sapiens
gtagcttctccggccgcccgccaacctcgtgccaggcacctcaccatgccggatgttagagcttgccggatggcgcagttgcccgtggtgggttgccagtgtgcccaggcagcattccgaggatgttacgttgggcaggggaattcagagtctggcagaggaggccctggggtcgcacgcggatctcctggctgctggtttggtaaggtccaatgtccgggggtaaaggatctaggccgtgtggtgagggttccggcagcttgtcctccgggtggcagaatctgatatcacggaggagggtgtgctggtcgggacttgttccctgttcccggagggagcgctttgggaactgacggttcagtgctgag

SEQ ID NO: 641717 - DNA, 646 bp, Homo sapiens
  misc_feature (1)..(1): n is a, c, g, or t
  misc_feature (138)..(138): n is a, c, g, or t
  misc_feature (371)..(371): n is a, c, g, or t
ngaacttcgcaatcagggagactgcacactgagctcgtttggcaaacggagcctcccttcatccggaaggtcatcgagcttggcacagggcaggcagctttaccagcagcttgcaacaatctgtaaagcagcttaatncctttagcaaagaaaaggagtcccgggcattaaagtagatggtctctggcaatttcaaataagtatttttcaaaaatgtttctcaatgtcataaaagcagtcacatcacatcactctgggtctcaccatccggggagggttgggttgtcatcttgtgtgcaagaagcatcaattctctcaggttcttgtttgcacagcagtcagccattcacattaggttcacgaagagtgcnacttgtgcatatttgtctccaaaaaggtatgagtgattgtcacaatttcagctgactcatcagcaacacatgttttgcaaatcagttcttcattccctaatttacatgtcttcaaatgacactgctgagatctgagcaaggcatccacacaaggcttgaattttcttctcccaatctttaacgatgacacctcactctgtggcactgacgaacccccctgaataacgagctaaagagaaaagaaggaaataagggtaccccttcatggccaaagc

SEQ ID NO: 641718 - DNA, 998 bp, Homo sapiens
  misc_feature (44)..(44): n is a, c, g, or t
  misc_feature (62)..(62): n is a, c, g, or t
  misc_feature (74)..(74): n is a, c, g, or t
  misc_feature (85)..(85): n is a, c, g, or t
  misc_feature (87)..(89): n is a, c, g, or t
  misc_feature (91)..(91): n is a, c, g, or t
  misc_feature (98)..(100): n is a, c, g, or t
  misc_feature (195)..(195): n is a, c, g, or t
  misc_feature (233)..(233): n is a, c, g, or t
  misc_feature (275)..(275): n is a, c, g, or t
  misc_feature (313)..(313): n is a, c, g, or t
  misc_feature (320)..(320): n is a, c, g, or t
  misc_feature (329)..(329): n is a, c, g, or t
  misc_feature (358)..(358): n is a, c, g, or t
  misc_feature (368)..(368): n is a, c, g, or t
  misc_feature (384)..(384): n is a, c, g, or t
  misc_feature (524)..(524): n is a, c, g, or t
  misc_feature (578)..(578): n is a, c, g, or t
  misc_feature (626)..(626): n is a, c, g, or t
  misc_feature (929)..(929): n is a, c, g, or t
aaaaaaaaaaagaaaaaaaaaaaaaaaaaaaaaaaacaaaaatnaataataaaaagattganggcaatataatnaaacaattttnannnanataaagnnnaaagtggctgaacacaatgattagctcagacttcactttcacaagaaggctatttttggagttacatattttaattgttgataatgaaggctgtnacagaaagaatgcccagtcaatatgtaaaatgatagcnatttactataacaaccataacatcatcaggctactgacagcnggagacattccacatgctaagcaactcacctccaaagncatattngaggtttgncatgaaaaatacacttgatcctgttattnatttagacangcctcactgcacgtanggctacagcggtcaccaggacacaaagcaaatgtcgggttaccagaagtgcagttatcagccacagtgatttattgagtgctttaataatacaagtgtacatcaactgatccacagtcaaaagtggcaggtccctaaganatttacaagcactttaagtaaatcaaaatacatattattttgttcaatccaacngtcttctgcgggagggacagaaggctagtgataaacagagtctcagtnatgcacagtgattctgattgaagcttttgtacaaaaacttgttcccagtagcatgcacccaccaataaagacttcagtacaaaaaattaaccctaagcactacatttaagtagaaacgagatataattctgaatgtgttttcccaaagatcacataaaagaaaaaaaaatcaaaatcaaataaaccacgacaaaaaaaacaaaaccacacagtaatacaaagctttgtaagaaagctcttactattacagctccaacattgtttgcactgaaaacaaaagttcccatctatgatgaggtgggnaaaaatcccaaatctttcaagttaacagatatcaacaagggaataaaatgagagataaaagagagcgtg

SEQ ID NO: 641719 - DNA, 106 bp, Homo sapiens
tgcaaacacgcaatctggaatattggcagaattattataacgtgacacagagaccaggtgctgtggctcatgcctgtaatcccagcactttgaaaggctgaggtgg

SEQ ID NO: 641720 - DNA, 207 bp, Homo sapiens
cacacttcgatcgcggagaaagcaagcagcgagtcttgatgctctgtttggtgctttggatcctttctgtcggtccttacagcctgctcgtcagactccagcagcctagatggtggagcagatcgagagcgagactgcttttcaggaagccttggacgctgcaggtgataaacttctagtagttgacttctccgcgatcgaagtgtg

SEQ ID NO: 641721 - DNA, 567 bp, Homo sapiens
  misc_feature (408)..(408): n is a, c, g, or t
aggccttgtcttagctgtccctcgcccctgtaatccatttggggttcttaaaatcaattatcagcttacatcattttggatcctacatctttctcaccaaatttgtctcgcctcattaaagttctgtcagatacacttcaatggaaacaatgatgttcatctagattgaaaacttttctcagatggattgataaccgcattcatcttgtgttttatatgagaaggtgcctcaagaatttcctgttggatttgtttaaaaggatttttatctttcgtgataaactttgctgtgttccaggaactataaaaacaaaaacttgttactaaagaaaatatctgaaatgtgataagtttttatggcatgttaatttcccgccccccctcccccccccccccgcaatatttcantatgtaaaatgttttagcaatttaatattttgcacagttagcaaactttgtatgtcatttccttcaaggcatcatgcagagttgacatgagatttataaggttttaagttgtttgcatgtgaaaatcaaatacatactttggtagtctttgaaaaaaaa

SEQ ID NO: 641722 - DNA, 772 bp, Homo sapiens
  misc_feature (219)..(219): n is a, c, g, or t
  misc_feature (285)..(285): n is a, c, g, or t
  misc_feature (364)..(364): n is a, c, g, or t
  misc_feature (614)..(614): n is a, c, g, or t
  misc_feature (661)..(661): n is a, c, g, or t
  misc_feature (688)..(688): n is a, c, g, or t
gactgtcgccatgaacagtgtgggggaggcatgcacggacatgaagcgcgagtacgaccagtgcttcaatcgctggttcgccgagaaatttctcaagggggacagctccggggacccgtgcaccgacctcttcaagcgctaccagcagtgtgttcagaagagcaataagaggagaaagagattcctattgaaggactggagttcatgggccatggcaanagaaaagcctgaaaattcttcttgaccttgacagtcaccttgaaggatttcgcaagtccagaaatngaggactctggatttttgtcaactaactctgtgaacatagccatcagatttgatgaggaacttaggagagaggagtttnatttcctccttcgatgtgtttcctctcagttgtaaaagatgaactcttggagatgatttctcacctgctgtggtatcttgcaggaactgtgtgctaaaatttgaacaatttgttggagattatggttgcaatacttggcggtggaatcagctttacataaatatacccttgtatgcaaacgatgataaactagtcaggatgagcagagctgcctgacctcttgatttctgctgcaaaagacatatacagntgtactggggtcactatttatgaaaagcaatgggttaggacctcttntttcctctcagggaactaatgctctgnaaagggatctgggacacagacagttatcggtgagtgctttgtgagcatactttcatagtagatagtaagtaatggttaagattg

SEQ ID NO: 641723 - DNA, 138 bp, Homo sapiens
  misc_feature (3)..(3): n is a, c, g, or t
tgnttttccgcctcgacctcgtacggttgtactcggtgtccatgaagacatacatcgggtcggcgaagtaggtgtaggtgcactccttcttgtcgaggatgatctgctccatcttgtcgtcggccttgaacaccagtt

SEQ ID NO: 641724 - DNA, 441 bp, Homo sapiens
tttgttgtttgctgtcctgaaaacatgaaagactaatagatgccattttggtcttacaagttggcttatttgaaatttaccttttaaattaagctctaacttcattgtgggtcacattggtttttctctatattcactcttgtttatttagagagaccagggtgacaggtcttctgaagctaccattggcaaagagtaaggttatagaatttgctggctagtcactgttagataattgctctttgtgaagacattactttgaggccaaacagaaccagggatttaaaactggtccagggacaaggtgctacagtctcaggctctggaaatgtcagtcatttgtgtgttccaggtgtacttttgtaattatgtatgtgagagatatgtacataattgtctgcctctcaggaagtaggaaaactagaagatactatgacctca

SEQ ID NO: 641725 - DNA, 119 bp, Homo sapiens
tactgattgaatctgtatctgaacaaaggtgattttgttatgagcctgggactcaagaagaggccagacatgaggtcgaacagtacagagctagtcctgctggctctgatctgaggcag

SEQ ID NO: 641726 - DNA, 369 bp, Homo sapiens
  misc_feature (27)..(27): n is a, c, g, or t
  misc_feature (75)..(75): n is a, c, g, or t
  misc_feature (113)..(113): n is a, c, g, or t
aatggctgtagataccccaaccctggnaattaaaaggaaaatatattaattcaaactctatggaaacttaatacntctctctaccaggaattggcttattctgtaaattttcnttttgagagtgttgcccaggctgcagtgcagtggtgcaattatggctcattgaagcctcaaccaatcctcccacctcagtttcctaagtagctgggactataggcacgtgccgccacagcccactaatttttaaatttttttgtagagacagggtctccctgcctaggctaatctcaaactcctcgcttcaaatggcccttccacctcaccctcccaaagtgctgggattacaggtgtgacgaccatacgtggctt

SEQ ID NO: 641727 - DNA, 835 bp, Homo sapiens
agttaccaaggaagttgtgggaatgtgcaacaacaagccgagagactatacctagcacagctggattgccctcacacgacgtccttcgaagactgttttccatcacagacacgctccttgcgcacctcatgatacttgccatggaagatacaattggccagatctgctgttttctggaaggattcagtgactctgcatttcgggaaagcacaatggcagatcacgtcgttagaccaatcgacaaccaatagagatcatttgcctaagtattctgacggttactaatatacctgtctttagttcctgtgagcccaaccagtaattagtaaagaacactttcccttttaaggaaacaaaagtgtgataccatattgtttttactgtacatagctgtgcgctttcttgcctgtcctgcctctagtttctacttgctggatgataccatcaatgtatcaaggagcgtccatggatacaagataagatgtcgtaccttagtagaatacagagctttggtaattacatgtaatcagcttaaggaaatagccatatacaatcaaatacactatgccatttttatttgaatatgatgagtatattttgcttcggacataatataggaaggaaatgctcatagtaagtagtatggtatcagttaattccagtctgagcttctctgttcaacttcagtttctctctcagtttaatgatttaataatagtccagctttttgtgtgtgtttcttatactgcacattaataatgattcacttcccgtttggaacagaatggtttgcataataatggtaagagtgaatggcaccatacgccgtacctaa

SEQ ID NO: 641728 - DNA, 1052 bp, Homo sapiens
  misc_feature (985)..(985): n is a, c, g, or t
gggtacttgtgtggaaaatagtcactttttcacggctatttatatattgctgcccagtaacactatagatttgctatggaagagtgttcttttaacctaatggcttctagttgtacagtcaagtgtaattttcatcacaactatgactttctggtatgttaaattgtgtatttaaagcagctacaaagagagttagcgaaattaccgtacagtgtctgtagtctagtagagccaagtcttgagtggtggtgtgtggcattatgtgctcactttattggagcctgatgttagatttcttgtagcgatgctccccctaaattggaaatagtgagtgtagtaaatattcagaagcgagatccgttttagcatttgaacctaaccaaggaaacgggccacacgaccttggttaaagggatgttgtgatcagcttagccttccaggtttttaagaaagtgcttcctataactgctgtcaaccatctgtcattgtctttaatgaaacactgttgtatcccagtcctaattctttgtaccggcaattattcgtcaggaacacgttgctcaaaatatgtgctaatgcaagtttctctaattggggggcataatgtactaaggaaatccagtgctgtatattacgaattagattgtaacagtgagtccagcagggattatccaaacaaaggataggtttgatgagaaaggctggattaaggagaaaaacaagtaaagttgggtatcgaaatctggtgtgttaccccagagattagggggggggtaaaaataagaaaaaaacgggagagagggcaaattcaacgggaaataatttcacagggacgcgggagaagggaaaaaatcggcacgacagtggtgtttatcaagacgcagcatagaaaaaaattttaaagggagcggtccataaaatggaataaaatcttcctaaaattgctgatagaacacaaaaaagtggcgcgacaagagggcgaggntcaatgttctccttcttgtttctctttcctgttccttccctctcatccgtgtaagaggggggaggaa

SEQ ID NO: 641729 - DNA, 322 bp, Homo sapiens
cgggcctgtgagcagaggaaccttggcgacatcatcgaatcttggagtactcaagcaagaagaggctgcagcaattgaaatctgagcttcaggagtgggaagaaacgaagaaatgcaagatgagctatcttgagcagcagcgcagcagcagatgaatgccaagcattgagcaagcaccaggcaggacgtgaacttcctgagcacttacatggaccatgcagtatccatcaagtctgtccagatctccaatcttatgcgcccactgcagcgggttcaggcccgacttgatggcatactcatggtccatgtaaggggaccgcat

SEQ ID NO: 641730 - DNA, 188 bp, Homo sapiens
cagcgattgcatctgcagatggtaatgaaacttgagtaaggcttgtgttgtggcacaaaagacaaggtagtattgtagaattgtgacattcacactagtggaatggccatgacaacaatttatcctgacattgatccagcagccgaataagcctgcagagaatggcgactcttggcagacaggtgtcc

SEQ ID NO: 641731 - DNA, 105 bp, Homo sapiens
gcaccttactaccagacaaccttagccaaaccatttacccgaatcagtataggcgataggaattggaacctggcgcaatagatatagtacccctagggcaagatg

SEQ ID NO: 641732 - DNA, 157 bp, Homo sapiens
aatcaagcacatggggcaatggcaccagcacgggcagcagctggcacctttttgtccaacaacatgtccctgatctcaatgaggggcttctttttgaacacaaaacccacattcccccggatatgaggcagaagtttcttcagagctgggttgtttt

SEQ ID NO: 641733 - DNA, 441 bp, Homo sapiens
tccgacccctcataatgagtgcccagggaccttctggacagaaaaggacgggtccctggtgaagtccctatcctcaagccaaagagcctggaactgcagcccaaagtgagaacttatgctcctgttttctgctccaatgttgccttttccaaaaccacccatggccctgcccccaacccccatcctgtgcctataaaaaccccagagctctgccagcagaggggagaagcagctggacatcggagactatggttggatgtcggaaagaagcagcttaacctcggagggacagtttgatgatgttgctttggagaggattctggccaggacggctggactccaagggaacattaccttcctgccctgtccctttttcatctccccttcgcgctgagagccactttcaccaggaataaaatcccttgcatttaccgtcttcag

SEQ ID NO: 641734 - DNA, 535 bp, Homo sapiens
  misc_feature (13)..(13): n is a, c, g, or t
ggatcgtttaggnccggagtttaaagcccagcttagccaccagatccagacccttgtccctacaaaaattaataagctaggtgtggtggcgtacacctttggtcccagctactctagaggctgaggaaggaggaggattgctggagcccaggaggttgaggctgcagtgagccatgactgtgacactgcactcctgcctgggcaacagagtgagaccctgtcttaaaaaaaaacagaaaacatgaccaggcatggtggctcacgtctgtcatcccagcactttgggaagctgaggtgggtggatcacttgaggttacgagtttgagaccagcctggccaacatggcgaaaccccgtctctactaaaaacacaaaaattagctgggcgtggtggcacacacctgtaatcccggctactcaggaggctgaggcaggagaatcgcttgaacccaggaggtggagtttgcagtaggccaagatcgcaccactgcactccagcctgggagacagagcaagactccatctcaaaaagaaac

SEQ ID NO: 641735 - DNA, 358 bp, Homo sapiens
cagtgtcttcaagatatctggactggaatgaataattattcactaccttatttatttgctgtgaggcgagaataattccagaacacaggcctttatactttcacagtaatttatgttcaagaagatatatagtcagtgcattttttttgtttctttcctctgtgcaatgtttagctctcaccccgactcccaagtgccataatttgaaataatactggtttggagaattattacagattggtcataaatgccgcataatgtccgtaagacctcggtaaaggtttttccaaatggcgtagtagtgcactgcagctgtcgtgactgggaacaggtgtcccgatggcgtgggcaaatggaa

SEQ ID NO: 641736 - DNA, 370 bp, Homo sapiens
tggtggttgactcttgtgtatcccccgtgtgttgccctactcccacacacatccctgcaggcccgtgtcaggccttcgatcaccctggtcgtccgcggagagtcgctcgtcctggtgggcccctgtagtcgtgcgaggtgaacagtctgggtgccgtccagcaaagaacagtcgtgatggtatctgaacaaagtccccaacgcttgagtggtctcattgcaggtctcagatggccgggacagtgtccatgaggggcatcacatccgcagggttgtggaagtcaatgacatggacgttgaagattagcacggcagagccagggatcttgtctccagttccattctccccataggcgaggtgcggggggata

SEQ ID NO: 641737 - DNA, 1840 bp, Homo sapiens
gagcacgcgttcggtttcccttgggcagtccctgtcacttccatttccccccattgtctcagatgatggctgagaactcactagtttgtgcattcttgtgactccacaactcacccaagatccctagctatgaactacatcttgtcctcatgtttctttcaccgacaatgcgtgcataccataaagctagcatcgacctatcatgttctacatccacacgaaggaagctgcctgacacctaggaccatatcgacagcacagggaatccctagcattatgtccccttgtccactctgacctgcatgcagtaggtcctctagcctgtgccacagggtttatcatacacacttgaaaaaccggctcatattctcatttatgccttgcattgcaggggtcgaacaaatggcacagcgtgataacccagacgagatagatcacgactggcggtccaccggcggctcaacgagcaaagccacttcctggagcgaaactaagacgggtgcacctacgacatgaaattgccgtacagggaaagaacgcagaatgacactacagggacaaaagcaaagtaaaggacgcaaggaggcgagaccgttgcacgacgagggagagagcgtggaaccaatggaggtggccaagtgacgacccaacacgtaatggggccgaagcacaggggcaccaacaaatgcaccaaaagagagagcatccccagggggaccaagcggtagaccacatgacaccgcggatggtggcattacaacgggaggcgcagaaaaaagggacattagacaggtccgcagggagtaacagcggtcatccaacagcgccatttggtaggcgatagaaatgagacgacaccaccagcagacgcacgcgcccatcagtagatgaccccaattatgtagtgtgcaaaatggctggtgtacagatttcacttggatatgagcttcgagatgccacgatgaacacgtcaagacgagtacctcggataatggaagtgcaccaccgatatgagacagtgcacaaaatggtccacaattggtcacaaaggtggaggagaagcagcgttgcacactgtggttgcagacgtgtcattggcgatcggaatacaccgagagaactttctacagttgtacctggacggtgctgccacagctcttacatgtcataggtgaacacgaaaaatgatggggaagctagaacgaaaaggggatatagaaacagctggcgctgacccgcagtagagggctgaacccaccatgggtcacgcctagggcaacgagttagcgcacacaattagcatagatggccgaaggagagcaggtgtcccagaaggagagcaacagcgagcgacgatgttaaccacactaggagagagagggacaaccaccaaaggaggaggaaccagcacgaggacaagactacacagggcgccatacgggcgacataggaaacgtcggtgaggaagagcctcccgacgagctgtgaatcccgccgagtagtgcaagggcaacaccaaagaacgagaccagagcagagggagaccaaaaaaagaaagcaaaaaaagaacgggagccgcagcgaaccacgggcagagcagaacgacagcgacaagaggaaagcgacacagagagtagaggagagagagaagacagcgcgagagacaagagcgacggcccaggggcgatagaccagcccagcagggcgaccgcgtacgtactaccaatcacagcgacgaccaagacacgcaaggacacagcccagcagcacgcctgcaagcaggggggcgcgagagcgggcaggaagagaacgggggcggagccgggagggagacggaggg

SEQ ID NO: 641738 - DNA, 205 bp, Homo sapiens
cggaccggggagaaaaaattttttttcctccccggacccgcccgaaaatggggtttttccaaaaaaaaccccctttttttgtttcctttttttggggcccgaattttttcccccccccccccgggggccccccccccaaaggggggggggggggaacttttttttataaaaaatttttttttttttttaaaaaaaactcttccca

SEQ ID NO: 641739 - DNA, 261 bp, Homo sapiens
  misc_feature (164)..(164): n is a, c, g, or t
  misc_feature (238)..(238): n is a, c, g, or t
ggcgcttggcccccaaaagggcctggatcccagttaactctgcagcacctcggggcatctttcactgttgaggagggaaatctgcttcacacttaattaacaaatccagatctcacactgctattaaaagaagttatttcaattaagcccaggaaattggaggnaaatgccaacaacgaggcaggacatctgctgccatttgatcgttccagggcagccagcaggcaggagggttagnatggaggccacagccacactctg

SEQ ID NO: 641740 - DNA, 154 bp, Homo sapiens
aagaggatcccccagcttatgcgtgcggtaagggtgattaggttctaatgagatggtcaggggtgcatgatcggtcaccaagagagggagtagaggtatcttatacttgtgggttaaggtggggggatacaacgaggagggatgccacaggagg

SEQ ID NO: 641741 - DNA, 774 bp, Homo sapiens
  misc_feature (378)..(378): n is a, c, g, or t
  misc_feature (658)..(658): n is a, c, g, or t
gggtttctccttcaggggattctctaaaaacacggcctacactttatgaaaactacatagtattcaccggtgacaggtaaagtttatcactattaattttatgggggctatttattactttccagtggctttccacttagaacaagctaagagtaagggctggctaactttaattcctggcctggattttatggtacaggtggcacaagcacaatgggtatgctggtatatagaaactaaaaatactatgaagtacataagttccctagggttatgggagagtatttataattaactttatgggtagggctagtatggaatacctttttaacaatggtggtggctattacaacaatggaagattcaaatggactccgnttggaaggatggttctctatatgggtaacaatatttttgaagaagtctggatcacgtgaagatcactggatcagaatactccactgtattcgttcacattaccactaagcatattatcagtaaacctattaactgatggacatttattgtaatacgtggtactttggtcgaattcaccgaaagtcctcccatttcatactactaattttcaagtggattccggtctaccatcctggggagttcttataacttggctctgtgatggcaacatagtgtacgnctcgtcaagggtaccttcattcaataataacacgtgggcacggggtcaccactttacggtaacatttttacacctaacccttcttttcggaaggttaaatccagcacttggggaaa

SEQ ID NO: 641742 - DNA, 933 bp, Homo sapiens
ggctctcgggcggcgggagtagtgcgcagtggataggcagccagtttcgcgactgtagttggggcgcgcgctccggagaccccggggacgcgccatcaccggagggcacccgggcatcgcggcctgtcgccggctggacaaagatggctccaggacggagggtcaggcccctgtagaaggcagccgggcagacggaagcgcgcccatggggacgatccggcagcggagagcaagcatagagactccggcgaaagttgggcaaagctgcgcccggagaaaagtggggtcgagggagggataatcctccaaggcaacagagcccgtgcgaagccccaagcgggggagtaccgggggcactcgtgacgcggaaaaggcaggcacgagattgtgtgctcacccgaaggaggattgggagaaggacgttaaacttgtggaggggccggagggggggggccgatctccgagctcgcagggggccagtccggaggcactcattgaggcgaccgtccggaatcgatagataaagcgctgtggtctgatgtaggatgacacgcgtatggccatggcactttgacagaggtgggtcgccgtggcatcaccgtgtttggtgacaagtcgaagggggacatatcggattcaccttatactgcaatggtggcacgccgtggagacgtcagatgcaagaagagcatctgagcgagggggcggaaacccgactggcgtcggcagtggccaagggggaagatgcgttcatcacgaggggggacgcactggcagggcgaaatgttgggcaacaccagacaataggggggcccaggatgacgggcgacctagcggcccggtgcaggaacatgcccaagagggggagggacaccaccagagatacacggggacagtgcgggggaaacgcgcgaaaggcgacatgcggactcg

SEQ ID NO: 641743 - DNA, 157 bp, Homo sapiens
catggaaatcatttcaaatgtgggtaataaaaaattttgtagtacagtgggtgaaccataattttccccatgtcatttgaacaggaaccgatacgatgtcacttagtcccaactgggatcctttacttccaccgcccaaattccattatgaaagggg

SEQ ID NO: 641744 - DNA, 235 bp, Homo sapiens
agggaagggaaaaaaaaataaataatgaggagaactataaggccctggattcaggtttttgaaactgttttttttttttcaaccctcggaggacaatcagcttttcctgaatccaaaaaagcccatcaaaaatgcccaatgacagcccccagccaaatatggcagggcaaactgatttggttttgcgatttccattttcctctccccatccgaaaaatgccttcagctactgcta

SEQ ID NO: 641745 - DNA, 512 bp, Homo sapiens
  misc_feature (512)..(512): n is a, c, g, or t
cttatattttattttattttgttttttgaattttaaatttttgttgtatagactttattttttagaacagttgtaggttcacaacaaagttgagcagaaagtacagaaagttctcacataccctctccccactcccacatacagactccccaaccatcaatatccagcaccagttacaatccatgaaccaacattgatacatcattatcaaccaaagtctaaaatgctcattagcatcctctttgtgtgttgtacagactatgggttttgacaagtttacagagacatatatccaccattatataatcatacaaaatagtttcaaagcactgaaaaaaatcacctctgcaccacccattcatctttctgatgatagcccctggggatgttgtttatataactaagtcatctaacacaacctgttaagagaaagttagattctttctgaaatgggtagatagatatggtagagatggctcccaatggctacagtggaactctggactgatatn

SEQ ID NO: 641746 - DNA, 183 bp, Homo sapiens
accgtgaaaccccgtgtctgctagatatacattattacccgggtgttgtggcgcgcgcgtggggtccgagatactcgggaggctgaggcgggagaatgcttgaacccgggaggcggaggttgctgtgagccgagatcgctccattgcactccagcctgtgcaacaagagcgaggctccgtctc

SEQ ID NO: 641747 - DNA, 534 bp, Homo sapiens
atatacaaagctggggaaaggtaaatacaggttcagtatctatcagtaccaagaattaagtaaacatgaaatttaaaaagcgccaacatataccattcccactttactcttactataagggccagagtcggcagcatcagtcccaccttaactaacagagcaacagcacattaaccacatgcttgacttgagccctctggatagacaaacacatggcaaaagtaacacaaatgagagaatcagggatttcttagataaacagcaacacatatcagataatacaatactttaaaaagcaaagatcaaacatgctactcaatcctacttgatacgctgcctccataaccaaggtaaaagatggatcaaagtaaaacccacaatctgattattccatgaactctctcatccactatttgccatagggtctacagtactataatacggatatgggtggaatagtgaaggaatataatagactttactcaagccatagttcatgtctacaagaaacttgtaagctaacacaatgaatag

SEQ ID NO: 641748 - DNA, 268 bp, Homo sapiens
gcaatacatgtacaggcgcataggaaacatagggacagatactaagtctctgactctccctactactctccttttacttagtagcttgacacaaaaggatagggggccccaggatcatctggacatggatcagtgtcttcatgtgtgagctatacaaagcactggcagcaaaaggtgtcattaacacgtcagcaagtcattcaatcacaccccatcttttcatcacaaagtcatcagcagagcaacaaggctactgtcatggtaaact

SEQ ID NO: 641749 - DNA, 972 bp, Homo sapiens
  misc_feature (246)..(246): n is a, c, g, or t
  misc_feature (282)..(282): n is a, c, g, or t
  misc_feature (289)..(289): n is a, c, g, or t
  misc_feature (369)..(369): n is a, c, g, or t
  misc_feature (972)..(972): n is a, c, g, or t
ggacagtgctgacacttacaaggctctggagctcctgggcacttcgagacatcatgagttggtccttgtcactccaccggaatttaatttctctacattctatgcatcttcttatgttctctcattcaaacatgctgtagccatatgttgcatacgccagaagactgaacatgcatgactatactgtagatgcagaagattcgtgtcagcttaatgtgtcctatactaccattgtggcagattgcnagtatttccgtgttcatacatgtatccaaatcgccnaaacgtnacgactaaaggtactcataccagctcatcttgggaacacgacgagtccttcagcaatctatatgttcgagaagaacgatnacacaatacacgcagagtacgaggaacaggcttgcattacataaatgcaaatcccaaaccttacaccttgtaattagatttccccttgcagtgggaaattcattcgaggaacaccctacatattaattgaattacggatcgggcgtaggcgttaccctttgtagcacacgtttcccaaggggaacaacacatttgtttttagggatccgcaaacaatttgagtgggcaaccattcattggcacacgtccattcttggactttttggtcaaaacaaacgcaattgcgaacgtcccaacaggcttcaatttcccgcaagtcaatttttcgggcgaagggcatcagatctcatcgattcataatttgccatagatcaaatcccaacagaggcattgggtaccacaccccttgagcacacgactgaaacggggtacggccccccaatgccgtatggaagctggccacccaagttggccgccatgggaaagcccttttggccacagaaggaatcaacagaggttggtccaagaataagttcccaattcgaagtacttcgagccttgcgcggacaaccgaatcttggttcaaagaaccaattttgcccn

SEQ ID NO: 641750 - DNA, 531 bp, Homo sapiens
  misc_feature (493)..(493): n is a, c, g, or t
taggtggacagcgaggtgaataagatgaagggcttagcggggctaacccacggttacgagctaaatggtctcctcctccctcccccaattcgtatctggaactcctaacccgttctaactcagaaggtgacggtagtgactgtaagaaggtaattaagttatatgaggtcatctgagggggccctaatccaatacaacagtgtccttataaaaaggcaaaatatggacacagatacatacaggggaaagaccacgtgaagatgcagggaaaggcagccatcggggagccaaggagacaggccttagaacaaacccactctgatcacacctggatctcagacttctaacctacagaatggacaaaataaatttctattatttaagccatccaatctgtggtacttggtaatggccatcagagcaaattaatatactcatctagtactaagaatgaaatatcaggggtataagagaggctgcagggcacaagatnggatggatatgatatctcaatgaattgtcaattatatg

SEQ ID NO: 641751 - DNA, 244 bp, Homo sapiens
ataatgggatgaaatatgagcactataagaatatccacaccttgctccatctggcacttaattggataacatgagattgataactcgaccgcctacagaagaatgtcgaaatatcctagacatcattctttcaatctgatgactccttcctataaactctctggaagatcttatgccataatttcctctatatccgatattggtgactttaaaagaggcacggtaatagaaagacttactcatc

SEQ ID NO: 641752 - DNA, 716 bp, Homo sapiens
ggggatacgacacatattagctatacatttagctgttgtcataagttatgtggctttaaacttagtgttcaccttcctcgtttaatgcacgatcagtctgtatgtaatatctggaaagattacacatactccatgccacctcgacctgattggctatcttgcggccatgtccccttcttgctgcacacaggactgaatcaaagtagttgagactttgtctatggagaaagctgtgtaatctgttctttatctccccttctcacggaccagtcagccactggtcaatcaggctgatcatggaacatctaggaattctccaattaagggagcataaagtccagggacttagttatatcttcagaccagtgcagctgggacacacaaagttctcctgtctcaccatctgatatggtttggatgctcgtcccctccaaatctcatgttgaaactgtaattcccagtgttggaagtggagcctggtgggaagtatttggatcatgagagaggatccttcatgaatggctgcagcaccatgctccttggatgagtgagtgagttctcactcaattgcacatagagtatggttgtttaaaagagtctgagacctctcccctctttactcggccatgtgatacgccggctccccattcaccttccgcctttactgtaagcttcctgaggccctcaccagaagctataacacgtggggccagctc

SEQ ID NO: 641753 - DNA, 172 bp, Homo sapiens
atcaagatcgagtcgaggaggcgggcataggactgtctcggatcgcttcgtcaaacactcgtcttgagctcctccagacagctgtgagcgccgagcactccaggtattttacagcaccaatctccttagccatggctagaccctgcggataggtgatgggagtcagcttctt

SEQ ID NO: 641754 - DNA, 677 bp, Homo sapiens
  misc_feature (490)..(490): n is a, c, g, or t
  misc_feature (677)..(677): n is a, c, g, or t
gtgttacatggtattttctgccctacccatccctcaccggttctcatatattgtcttttccatgacctctttacctttgacagagtctccctttgtagaccgggctggtgtgcagaggggcaaacaaggctacctggaacctatagcttccaggtacaggtgattgtgccagctcagcctgccgagaagctgggactacaggcacaagccaccacaccccattaattttttatatggccagtagaagcagaggttaaccatgttgactgaactccgtttgaactcctgagctcaaatgattctggctgctaccaaagagctgggattacaggcgtgagtcactgcggtgctccagggctagatatttcacacatataactaatgaagcgttcatatctagaaactgtatggagtttctattaagcaggacgggtactatagtctaccacatagtagatatgctctcaaaagatatctaagagaccagcangatgcttaacatcactagtcatcacgaaaatgagcactaaaacctcactatgatactattactggacacctgtcagcatggctaaaaattagaactttgagatatgcagggttgtcaaaatattgagcaacaggagtgcctctacatgctggcggtagccattagtgtgataacccctggttttttn

SEQ ID NO: 641755 - DNA, 421 bp, Homo sapiens
ctgcatctgcttcagggaagaacttggcgattgggccagaaataccatcagcggttacctttaaccaagctaagccctttgcgccaaagcgttcaatatattgcgcaagttgtcaatatctttacgtgagtagtgcgccgcaccaccaggaacggcaatcgctttgacaactccaccaccatctttgaccgcattcgcaaagacaccaaattcagaatccttgaccgctttcagacaaatccttaagttcgtagggaatacgcaaatcaggcttatccgtccaaaacgcgtcatcgcttcttcccaagtaagtgtttgaattgcatcagtgtcaagatcataaccgatgacatcatgcatcatcgtcttcaccactcattcactaaggccgatttcatcagccgcataaatgatgttctag

SEQ ID NO: 641756 - DNA, 572 bp, Homo sapiens
gggcgtacggccgaattcggattattattgggagtaaagtccttgaagagaatcctattactttttacactgtgcttgataattttttacttggaaacctcatcttttggcgtttttttttttggagctatttctctagtgtggctattggatttaatttctgaccttcattttggttcccaaccttttttttggttggatagtgaggggttccgtgactggaggttcttgagctggctgttggatggtgctatacctccttgcaattctcagctatcaagggggaaaacaactggcagaggatggggaaattgctatactggccatgcctgggaaacacccacgggaaaattaccagtttggagctggctcaactggcaagaaaacactggagggagacagaagcagccagggacaacaattaatcaacagagggggcacctatgggtgagagagcacacgactggtgactctctggaccaagagaaacgggtggctacatcagctcccgagaaatcaccaggtcatgaacagagggaacaattcatggacagatttttctccagagaagg

SEQ ID NO: 641757 - DNA, 152 bp, Homo sapiens
cgggttgggatgagtcacgtatttaagaaatgaggaacagcatttcagggcgagaaaagcatagtgaagtccctgaggttgataggcatagagcagatttaagggactttttttttgggagacggactttccatcttgaggcccaggcttgg

SEQ ID NO: 641758 - DNA, 1171 bp, Homo sapiens
  misc_feature (315)..(315): n is a, c, g, or t
  misc_feature (376)..(376): n is a, c, g, or t
  misc_feature (563)..(563): n is a, c, g, or t
agcgggaatcccaggtcacgttgggaggcctgggtcgtggcggatctctacagcggcctcacatgacctgataggcaagagatgaaccttcagtcgctcaaggctgcgcaattctacttcctgtgcagagagacgctagtgccatctaggcaaagtcatagagcgcccagcccgggcaggggactactctagcgaagccggacacacgtgcagtctgaacgcgtttgacaacgttagtgcaagacgcctctcgacagatcgtagcatacctccgaggcagctgacgtagaaccacgctgaatcctcgggagttanaaaccaatggcgcgtggaatgtgtgcgcagaaagtctctccagacagggtcaggacactgnacacgctctcgcagcatcctcgacagctccaggattagtaagcgaagcagactagctatggtaagacgggagctccatgcttatatgaaggacctctgttgcgtacgatactatagcacctgcaggtctctcctgcacgagacgtgcatatcccatggccctagacatacatgaactgcacacgtcntgacgcgcggacttggacaggactcttgggatggcaacgcaggacgcaagggacgtgctatacccgtggtacgcttctcagaaagcagagactcgcaagagggagtcgaacgcgagacaacatctagtgggcacacggatggttagctccacgttggagaaacacaacggtccataggctcccgcaccctagatgacaactaggagtggcccacttgggcccctaggaaggggacccaagtaagcgtggcccctggggcgggtgtgcgtctttgtgttcttgtggttccggcgtcctggtcatctctttcgcgccccactttcatgccaaagcgggcgaataccccaagcaagggtccttggtcccttcgtctcccacgtctctcatactgggactctggaccaggataggggacaggccttctccaactttatgtttggtccatagagcaacctttccaacttgggggggcccccaaggattacccctggaaaatgacaccactttcctttgtatcccagagggccctggaaactctgtgtgcaagcatgggcttgtccccgggtggaactgtgacaagggagcctccaccgtcccactgggaagtc

SEQ ID NO: 641759 - DNA, 559 bp, Homo sapiens
aattccattccagcgtacaatcagttcgcagctatattcaattccattccagcgtagctttactagtgctttaagaggtgtttctcacttaatggtgagaccttcagatttatacaagaatcctaccttatctttccaaaataatttcacatggtttctgtaaaatctagaaaataagaaaaaaaaaaaatccgcggatgaaaatagtactttactattggtagatgtacgggttactttaaaagattaagagaatgttggcgggcggggtgcaggggctcatgcctctaattccagcacttgggaaggccagggcaggcagatcactggagccccggagtctgagaccagccggggcaacatggcgagaccccacctctactaaaaataccaaaattagccgggcatgatggtgctggctgggggtcaagggctgctggggaggctgagggggggaggatggttaaagcccaggaggcagaggtggctgtgagccgagactgtgctgctgcactccagcttgtgtgacagagcgagaccaggtcccaaaaataaaaaa

SEQ ID NO: 641760 - DNA, 261 bp, Homo sapiens
tgcaccatgctataaaagtgagctctccatccgtattcaaagtatgcgtgtttatgtgtatttatgtgtgtagatggtgatatgacaaattaatcattttgctacactcataaccctgtacatacttcttcccgtgtcgatttcaatacaagtacccctttagatcacttagcaaatctgaccttgacgagggttagggttgtgatatccatgtaagcgacagtattgctttggaagtctctggttaaattaatactcttt

SEQ ID NO: 641761 - DNA, 815 bp, Homo sapiens
aaatattatctagtaattcactacagtattacttttggtaagagatgcccgataagtaattctgaaggatgatgttcacataaaacagttacctaaagatacagtcataacattgaatattccacattcataaccctttgaggatgagaacaatacagcttaatggtgcttttatacattttatatagtgtgcttttatatgtttatttttcatgtgtgccttaagatatagagactcctttggaattggatgctagtgcttgttagaacagatgtttatcaaaattaatgcctcattgggtgacatggggaaaaaattactgatatcttgcctttagcctgatccagatcttttgaaggatagcacttttatcgtatagttgtcgtacagtttaggagacagagtctcactctgccacccgggctggagtgcagtggcacagtcgtggctcacctgcagactttgaactacctcccaggcttaggttatcctccacacacctacagctcccaagttgctgctgggactacaggtgtacgccatcacacctgtctaatttcaagtaatataattgagacaggggtaccccatgtagtccaggctgatctagaaatccatgggttcagagcgatctgaccgaatatgactcccaaaagtgctgggatatcaggcatgaaccactaaactggataaggctccaacctttagaaaaatagatacaaaacataagatcaaaggaagacaataagaatgacaatgagatccagatagcatctacgacaactaaggaaactgcaaagggtagacaacgcaa

SEQ ID NO: 641762 - DNA, 456 bp, Homo sapiens
gtagtcagaacatataagaaatacccagtttatattacattccaaaaggtatcgaattgtataacagcttgcccaaggtcacatagacggctagtgacaggaagtgacccagtgtgtagattctagtcaaatacctagcccaggtttgctttccatgtataaaatacgtaaaggttagaatcacaggtactggtgtaaaatcacctgggttcaaattctagctccgtcacttcctagagctgtggaacttaagcaaattacttaatcatcctgtgcctcagtttcctctggtaataacagggaaatacatcatcattgtaactccctgggttgttgcaagaatgaaattagttaatgcatatagttcctagaacaccaaacaacaccgaatgagcacggcccaccctgctactgttgtcctcgtcatagtcattggcatcatgatcttcatatagt

SEQ ID NO: 641763 - DNA, 246 bp, Homo sapiens
acttcagtcttgatcttccgggctcaagcagctcttctcaccccagcctcttgactagctgacaccacaggtgcactccaccacccctggctacatttttgtatttcttgtggaaacaaggtctcgccatgttgcccaagctggtcttgaactcccaggctgaagcgatctgcccacctcagcctcccaaagtgctgggatcacaggcatcagcaccttgcccagccactgttctttctttctgtc

SEQ ID NO: 641764 - DNA, 450 bp, Homo sapiens
accaaacagggcctatgatgcagatgaatgcattggacaatatatttcaatcaagtcacagactcacttccccacttccatgaaatataacaaaggactaagaaacattaaaaataacgtatcaaacttcccacaaaccaaaagcatacaatgggaaaataacagtcttttcaataaatgctgctgggaaaactggataaccatatgcagaataaaactagatgccatctctcagcataaaaaaaaaagtcaaaacagattaaagacttacatctaacacctgaaactataaaactagtagaggaagacccttgggaaacaatccagggcattggtctgggtaaagatttcttgggaagatctcaaaagcacaggcaacaagagcaaaaacaaacatatgagattacatcaagctaaaaagcttctccacagcaaaagatacaatcaaca

SEQ ID NO: 641765 - DNA, 250 bp, Homo sapiens
  misc_feature (14)..(14): n is a, c, g, or t
  misc_feature (203)..(203): n is a, c, g, or t
taattaattttttnatttctattaagctagccaggcatctcatttctatgtactgggcaattatatgccaaacactgctgggtgccggagatagtgatgttcgagttcattaactaatagaagacagacaagtaaaccagttgtcacactagggtgttcattaacagaaatatgtatgagatacgtaatagatatcagatctnttaacaatcttgagtgtgaagcccaataaagtgctcttttcataagt

SEQ ID NO: 641766 - DNA, 336 bp, Homo sapiens
cccccggagggttttcccgagcccaggacgggtgggggtcatttccaaaacccccccacccctttggggggcccctggttttttggggccccgccctttttgggcccccggggccccccccggtaaattaaaggggttttttttattttggggccccccccccgggggtttttccgggggaaaaaaacggtttgcccccccggggttttttttttggcccccccccccttttggggcccggggtttccccccccccggggttttttttttaaactttggcccccgaagggcccgggggggttttttttttccccttaaattttgggttccccccca

SEQ ID NO: 641767 - DNA, 995 bp, Homo sapiens
cagcatattagatttgacaacgttgagtacttatttaagggtctcgccctctggtctgtactgaatctttgacagatatccaactttcggcgcaagataattcgtaagtggaataacaaaacagaacatagggcatttcacactgagaacagtccttgaaatcattcctagagactatcttaaaatatagcactgagatgacattctttccacacaggcattgcatcctgcctctatctgccatcacctgtttgggcactgccaaatagaacactgtaataatttaaaagtagtaaacaagtgtatctttatcaggtaacacgtatcaacaagaacagtgacaaaataagtggttcaacacgtgcaaccccttgcggagagaacttgcacgttggaccagtttctagctatgctctatatgttacagaatttccttcaaagctcatatggacaaacctaagaacagttagaaaaacactgttaaaacaaacaacacacggtggcgcacggcggagcgacctgagggcaggacccaatgcccactacacttaaaaccccaacacgccctggcgccactctaacaaccaagtgcgcgccctaggtgccctgacctaacatagagccactgacaataagacacccgcatccccgcagaaccagcaagccagatccccccgccacactacctctcgaccggatcctcaccatccagatccaaggtacgccctccccaaattccgatccaaggacacaaaccagaacaggtccatcacccaaccactcgggcccaacctgggcctataaaaaccaccccgccgccacacccactcgaggcctacacacccgccacaggcccacacctccaagccccccaacacaaggcccccgcaagggtcgaaaactaccacaggcctcacaaactagggcacaccctacacgcatcggcacgggacacggacaacacctcaccccactacgagcgtacaacaccagcc

SEQ ID NO: 641768 - DNA, 2037 bp, Homo sapiens
taggctaggtacgaggccgggtggcacgaggccaaggagtacagatagccttttcaaaaggcgcagcttaccgcggtgcgcgcggattctggacttgggcgccaactcgtagtccacgctccccggggtcagcagaggggcgctcacgctctcgccacccacctcgctttctcaccccgcgcttcccggcctgggtttttagtcttccttggagcgctctctggcctccgcctccgccagggagcggaaggcggagacagcgagactggccaggggggaggaaagaggacgcgtgtgggcaagggggacaacgggatgtccacgggctcggtgagtgatccggaggagatggagcttcgggggctgcagcgggagtacccggtccccgcctccaagaggccgcccctccgcggcgtagagcgcagctacgcctcgcccagtgacaactcgtcggcagaggaggaggaccccgacggcgaggaggagcgctgcgctctgggcacagccggcagcgcggaaggctgcaagaggaagcggccccgtgtggctgggggcggcggcgcaggtggtagcgcgggcggtggtggcaagaagcccctcccggccaagggctcagccgcagagtgcaagcagtcgcagcggaacgcggccaacgcccgtgagcgtgcccggatgcgcgtgctgagcaaagccttctccaggctcaagaccagcctgccctgggtgccccccgacactaagctctccaagctggacacgctccggctggcttccagttacatcgctcacctgcggcagctgttgcaggaggaccgctatgagaacggctacgtgcacccagtgaacctgacatggccattcgtggtctcgggaagaccggactctgacaccaaagaagtttccgcagccaacagactatgtggaaccaccgcttaaatcggactggaactcacttgatgggattattcgttaaatgcgagtgtttgggggccacggagagaagggagagctcgtgagatgggaagaagtttccgctggattctccttgacccttcccctttccctggaactgtgatcgtgacaggtggcgggtgtggctgtcactgcacagcgcccacggctacagctgcgccggatctgggcgaccacgttttgcctctccaaaaagagcttcctttcgtgacgagacgcggacgcaggtccaccctcgggccctagctctgtagactaactctcggctgctgccccagcccgcgccagacagcccacggatccgttctcagcggagccagattcatcgcacacgtgcgggacggttccacacagccccggcctttcgcggtgacacaatggttagggaacggttagaacgcgctctacatccgctttaaagacagaggtctagacgtgagatccgcgtcgggacagggttttaagtgacaaagaagggcgagtggcttctctgggccgggttcgtactccagcacagcgcccttctaacgggcgggaggaaggccgctgctcgcagggctaggtggagacacacttcccagatcaccgcaggcgggttttacccggagagctctgggccgttcggcctccctgccgggtggcttcttcaatcccgtctccttcccaagctcccggctttttctaatcaggcaggcgtctgtcaaccctctccacttctgggctgaagcctccccaagccccgctgcgccaacctgtgtggggtcttcttcgggcctccctctccgccccgctcctgctcctacctgcagcacccccagctccgactccagactctctgcatcaggtctccccactccacgctccgggcgccccaactccaacaccacgtcctgccgcgcaggttcttccccgcgcggaggagcgcgcagggtgggcggcttaccatagcaagtgatcctgcgatagggaacgcgcccttgccccgaggctgcactaccacaggaaataacatatgtaaataaatttatttttttatgaataataaaacgcgctgtaaaaaccgtg

SEQ ID NO: 641769 - DNA, 2077 bp, Homo sapiens
taggctaggtacgaggccgggtggcacgaggccaaggagtacagatagccttttcaaaaggcgcagcttaccgcggtgcgcgcggattctggacttgggcgccaactcgtagtccacgctccccggggtcagcagaggggcgctcacgctctcgccacccacctcgctttctcaccccgcgcttcccggcctgggtttttagtcttccttggagcgctctctggcctccgcctccgccagggagcggaaggcggagacagcgagactggccaggggggaggaaagaggacgcgtgtgggcaagggggacaacgggatgtccacgggctcggtgagtgatccggaggagatggagcttcgggggatgttgatcctgtgagtgagatgtgatgcttctgtgggtgctgcagcgggagtacccggtccccgcctccaagaggccgcccctccgcggcgtagagcgcagctacgcctcgcccagtgacaactcgtcggcagaggaggaggaccccgacggcgaggaggagcgctgcgctctgggcacagccggcagcgcggaaggctgcaagaggaagcggccccgtgtggctgggggcggcggcgcaggtggtagcgcgggcggtggtggcaagaagcccctcccggccaagggctcagccgcagagtgcaagcagtcgcagcggaacgcggccaacgcccgtgagcgtgcccggatgcgcgtgctgagcaaagccttctccaggctcaagaccagcctgccctgggtgccccccgacactaagctctccaagctggacacgctccggctggcttccagttacatcgctcacctgcggcagctgttgcaggaggaccgctatgagaacggctacgtgcacccagtgaacctgacatggccattcgtggtctcgggaagaccggactctgacaccaaagaagtttccgcagccaacagactatgtggaaccaccgcttaaatcggactggaactcacttgatgggattattcgttaaatgcgagtgtttgggggccacggagagaagggagagctcgtgagatgggaagaagtttccgctggattctccttgacccttcccctttccctggaactgtgatcgtgacaggtggcgggtgtggctgtcactgcacagcgcccacggctacagctgcgccggatctgggcgaccacgttttgcctctccaaaaagagcttcctttcgtgacgagacgcggacgcaggtccaccctcgggccctagctctgtagactaactctcggctgctgccccagcccgcgccagacagcccacggatccgttctcagcggagccagattcatcgcacacgtgcgggacggttccacacagccccggcctttcgcggtgacacaatggttagggaacggttagaacgcgctctacatccgctttaaagacagaggtctagacgtgagatccgcgtcgggacagggttttaagtgacaaagaagggcgagtggcttctctgggccgggttcgtactccagcacagcgcccttctaacgggcgggaggaaggccgctgctcgcagggctaggtggagacacacttcccagatcaccgcaggcgggttttacccggagagctctgggccgttcggcctccctgccgggtggcttcttcaatcccgtctccttcccaagctcccggctttttctaatcaggcaggcgtctgtcaaccctctccacttctgggctgaagcctccccaagccccgctgcgccaacctgtgtggggtcttcttcgggcctccctctccgccccgctcctgctcctacctgcagcacccccagctccgactccagactctctgcatcaggtctccccactccacgctccgggcgccccaactccaacaccacgtcctgccgcgcaggttcttccccgcgcggaggagcgcgcagggtgggcggcttaccatagcaagtgatcctgcgatagggaacgcgcccttgccccgaggctgcactaccacaggaaataacatatgtaaataaatttatttttttatgaataataaaacgcgctgtaaaaaccgtg

SEQ ID NO: 641770 - DNA, 155 bp, Homo sapiens
caggagacacctgtaatccgtgatagttctcatgctagagatcaaagagaggtttctctatcatttctgacttgtatatcagtgatgtctttcaatcccgagtgtaaatccagagtcttctgagaaggggtaaggcgtccagcgacgaggctttt

SEQ ID NO: 641771 - DNA, 1790 bp, Homo sapiens
ggaaagagagaaagactggccagtggggaggaacgagcgcgtttgtcaggggacacgggattcacgggctcggtgatcacgggctcggtgagtgatcgaggaatgagcttcgggggctgcagcgggagtacccggtccccgcctccaagaggccgcccctccgcggcgtagagcgcagctacgcctcgcccagtgacaactcgtcggcagaggaggaggaccccgacggcgaggaggagcgctgcgctctgggcacagccggcagcgcggaaggctgcaagaggaagcggccccgtgtggctgggggcggcggcgcaggtggtagcgcgggcggtggtggcaagaagcccctcccggccaagggctcagccgcagagtgcaagcagtcgcagcggaacgcggccaacgcccgtgagcgtgcccggatgcgcgtgctgagcaaagccttctccaggctcaagaccagcctgccctgggtgccccccgacactaagctctccaagctggacacgctccggctggcttccagttacatcgctcacctgcggcagctgttgcaggaggaccgctatgagaacggctacgtgcacccagtgaacctgacatggccattcgtggtctcgggaagaccggactctgacaccaaagaagtttccgcagccaacagactatgtggaaccaccgcttaaatcggactggaactcacttgatgggattattcgttaaatgcgagtgtttgggggccacggagagaagggagagctcgtgagatgggaagaagtttccgctggattctccttgacccttcccctttccctggaactgtgatcgtgacaggtggcgggtgtggctgtcactgcacagcgcccacggctacagctgcgccggatctgggcgaccacgttttgcctctccaaaaagagcttcctttcgtgacgagacgcggacgcaggtccaccctcgggccctagctctgtagactaactctcggctgctgccccagcccgcgccagacagcccacggatccgttctcagcggagccagattcatcgcacacgtgcgggacggttccacacagccccggcctttcgcggtgacacaatggttagggaacggttagaacgcgctctacatccgctttaaagacagaggtctagacgtgagatccgcgtcgggacagggttttaagtgacaaagaagggcgagtggcttctctgggccgggttcgtactccagcacagcgcccttctaacgggcgggaggaaggccgctgctcgcagggctaggtggagacacacttcccagatcaccgcaggcgggttttacccggagagctctgggccgttcggcctccctgccgggtggcttcttcaatcccgtctccttcccaagctcccggctttttctaatcaggcaggcgtctgtcaaccctctccacttctgggctgaagcctccccaagccccgctgcgccaacctgtgtggggtcttcttcgggcctccctctccgccccgctcctgctcctacctgcagcacccccagctccgactccagactctctgcatcaggtctccccactccacgctccgggcgccccaactccaacaccacgtcctgccgcgcaggttcttccccgcgcggaggagcgcgcagggtgggcggcttaccatagcaagtgatcctgcgatagggaacgcgcccttgccccgaggctgcactaccacaggaaataacatatgtaaataaatttatttttttatgaataataaaacgcgctgtaaaaaccgtg

SEQ ID NO: 641772 - DNA, 234 bp, Homo sapiens
aaacgttacaccgctttaggatgctgaggcaggagaatctcttgaacccgggaggcagaggttgcagtgagccgagatcacactactgcactccagcctggcaacagagcaagactctgtttcaaagaacaaaaaacaataaaaaaaaaagtttacccgggatttttggattgcttttgttttcccagttatttggaaggctaaggtgaagttgagggagaacgtatgaacctc

SEQ ID NO: 641773 - DNA, 2658 bp, Homo sapiens
taggctaggtacgaggccgggtggcacgaggccaaggagtacagatagccttttcaaaaggcgcagcttaccgcggtgcgcgcggattctggacttgggcgccaactcgtagtccacgctccccggggtcagcagaggggcgctcacgctctcgccacccacctcgctttctcaccccgcgcttcccggcctgggtttttagtcttccttggagcgctctctggcctccgcctccgccagggagcggaaggcggagacagcgagactggccaggggggaggaaagaggacgcgtgtgggcaagggggacaacgggatgtccacgggctcggtgagtgatccggaggagatggagcttcgggggctgcagcgggagtacccggtccccgcctccaagaggccgcccctccgcggcgtagagcgcagctacgcctcgcccagtgacaactcgtcggcagaggaggaggaccccgacggcgaggaggagcgctgcgctctgggcacagccggcagcgcggaaggctgcaagaggaagcggccccgtgtggctgggggcggcggcgcaggtggtagcgcgggcggtggtggcaagaagcccctcccggccaagggctcagccgcagagtgcaagcagtcgcagcggaacgcggccaacgcccgtgagcgtgcccggatgcgcgtgctgagcaaagccttctccaggctcaagaccagcctgccctgggtgccccccgacactaagctctccaagctggacacgctccggctggcttccagttacatcgctcacctgcggcagctgttgcaggaggaccgctatgagaacggctacgtgcacccagtgaacctgacatggccattcgtggtctcgggaagaccggactctgacaccaaagaagtttccgcagccaacagactatgtggaaccaccgcttaaatcggactggaactcacttgatgggattattcgttaaatgcgagtgtttgggggccacggagagaagggagagctcgtgagatgggaagaagtttccgctggattctccttgacccttcccctttccctggaactgtgatcgtgacaggtggcgggtgtggctgtcactgcacagcgcccacggctacagctgcgccggatctgggcgaccacgttttgcctctccaaaaagagcttcctttcgtgacgagacgcggacgcaggtccaccctcgggccctagctctgtagactaactctcggctgctgccccagcccgcgccagacagcccacggatccgttctcagcggagccagattcatcgcacacgtgcgggacggttccacacagccccggcctttcgcggtgacacaatggttagggaacggttagaacgcgctctacatccgctttaaagacagaggtctagacgtgagatccgcgtcgggacagggttttaagtgacaaagaagggcgagtggcttctctgggccgggttcgtactccagcacagcgcccttctaacgggcgggaggaaggccgctgctcgcagggctaggtggagacacacttcccagatcaccgcaggcgggttttacccggagagctctgggccgttcggcctccctgccgggtggcttcttcaatcccgtctccttcccaagctcccggctttttctaatcaggcaggcgtctgtcaaccctctccacttctgggctgaagcctccccaagccccgctgcgccaacctgtgtggggtcttcttcgggcctccctctccgccccgctcctgctcctacctgcagcacccccagctccgactccagactctctgcatcaggtctccccactccacgctccgggcgccccaactccaacaccacgtcctgccgcgcaggttcttccccgcgcggaggagcgcgcagggtgggcggcttaccatagcaagtgatcctgcgatagggaacgcgcccttgccccgaggctgcactaccacaggaaataacatatgtaaataaatttatttttttatgaataataaaacgcgctgtaaaaaccgtgtgccccttggaggtgtcaggatgtggtctttgttgccctttactaagagggtttggctgtagaagttaacttttaagggctgatctcctctggtcagggcggtgggtcattgcgggaggaatggtggcgatcacttttggatcactccatttccaaacgtcattctctattaatctctatgattctgctgcttctccgcgccgggcttcctggaaggccataactggaggcctaataaaagtcctgagtcttgaggcccctgctgtcctgacagacatacactcctcaggctaacataggtgcacgtctctcatacacacactcacacacacacacaacacacacagcagctactccagctaaaagcacactccaatccttaccattgcaagtagttcaaaaaaaaaccctaaggcccacccacaagtctccagtgtaactggcagaataaaaccctaatataagaagccaatttgtatttcaacggtgcttttcttttatcaaatgtttatatatctttttaaacgtacactcattttccgtgttattttcttccacttgtactgcaatttttgtagaaggtaacaacttggaaaccctataatacaatttttaaaacgg

SEQ ID NO: 641774 - DNA, 1244 bp, Homo sapiens
gagtttcaccaaattatcctgcgggcaaagtccaggaagaagcgtgaacggatatgacatggccattcgtggtctcgggaagaccggactctgacaccaaagaagtttccgcagccaacagactatgtggaaccaccgcttaaatcggactggaactcacttgatgggattattcgttaaatgcgagtgtttgggggccacggagagaagggagagctcgtgagatgggaagaagtttccgctggattctccttgacccttcccctttccctggaactgtgatcgtgacaggtggcgggtgtggctgtcactgcacagcgcccacggctacagctgcgccggatctgggcgaccacgttttgcctctccaaaaagagcttcctttcgtgacgagacgcggacgcaggtccaccctcgggccctagctctgtagactaactctcggctgctgccccagcccgcgccagacagcccacggatccgttctcagcggagccagattcatcgcacacgtgcgggacggttccacacagccccggcctttcgcggtgacacaatggttagggaacggttagaacgcgctctacatccgctttaaagacagaggtctagacgtgagatccgcgtcgggacagggttttaagtgacaaagaagggcgagtggcttctctgggccgggttcgtactccagcacagcgcccttctaacgggcgggaggaaggccgctgctcgcagggctaggtggagacacacttcccagatcaccgcaggcgggttttacccggagagctctgggccgttcggcctccctgccgggtggcttcttcaatcccgtctccttcccaagctcccggctttttctaatcaggcaggcgtctgtcaaccctctccacttctgggctgaagcctccccaagccccgctgcgccaacctgtgtggggtcttcttcgggcctccctctccgccccgctcctgctcctacctgcagcacccccagctccgactccagactctctgcatcaggtctccccactccacgctccgggcgccccaactccaacaccacgtcctgccgcgcaggttcttccccgcgcggaggagcgcgcagggtgggcggcttaccatagcaagtgatcctgcgatagggaacgcgcccttgccccgaggctgcactaccacaggaaataacatatgtaaataaatttatttttttatgaataataaaacgcgctgtaaaaaccgtg

SEQ ID NO: 641775 - DNA, 138 bp, Homo sapiens
aagacccagtgcaagccatgaagtgtctagatattcattcaacggctacttcttatatgttgtactatgtcttatcattaaacacaagctacttatcattatagaatgatgtacccacaaatgcttataaacttgggt

SEQ ID NO: 641776 - DNA, 1257 bp, Homo sapiens
cgtaggagagctgtttcggtttgagacaatcgtttctctctaatatctcacgttctttttgatttactgacatggccattcgtggtctcgggaagaccggactctgacaccaaagaagtttccgcagccaacagactatgtggaaccaccgcttaaatcggactggaactcacttgatgggattattcgttaaatgcgagtgtttgggggccacggagagaagggagagctcgtgagatgggaagaagtttccgctggattctccttgacccttcccctttccctggaactgtgatcgtgacaggtggcgggtgtggctgtcactgcacagcgcccacggctacagctgcgccggatctgggcgaccacgttttgcctctccaaaaagagcttcctttcgtgacgagacgcggacgcaggtccaccctcgggccctagctctgtagactaactctcggctgctgccccagcccgcgccagacagcccacggatccgttctcagcggagccagattcatcgcacacgtgcgggacggttccacacagccccggcctttcgcggtgacacaatggttagggaacggttagaacgcgctctacatccgctttaaagacagaggtctagacgtgagatccgcgtcgggacagggttttaagtgacaaagaagggcgagtggcttctctgggccgggttcgtactccagcacagcgcccttctaacgggcgggaggaaggccgctgctcgcagggctaggtggagacacacttcccagatcaccgcaggcgggttttacccggagagctctgggccgttcggcctccctgccgggtggcttcttcaatcccgtctccttcccaagctcccggctttttctaatcaggcaggcgtctgtcaaccctctccacttctgggctgaagcctccccaagccccgctgcgccaacctgtgtggggtcttcttcgggcctccctctccgccccgctcctgctcctacctgcagcacccccagctccgactccagactctctgcatcaggtctccccactccacgctccgggcgccccaactccaacaccacgtcctgccgcgcaggttcttccccgcgcggaggagcgcgcagggtgggcggcttaccatagcaagtgatcctgcgatagggaacgcgcccttgccccgaggctgcactaccacaggaaataacatatgtaaataaatttatttttttatgaataataaaacgcgctgtaaaaaccgtg

SEQ ID NO: 641777 - DNA, 1554 bp, Homo sapiens
taggctaggtacgaggccgggtggcacgaggccaaggagtacagatagccttttcaaaaggcgcagcttaccgcggtgcgcgcggattctggacttgggcgccaactcgtagtccacgctccccggggtcagcagaggggcgctcacgctctcgccacccacctcgctttctcaccccgcgcttcccggcctgggtttttagtcttccttggagcgctctctggcctccgcctccgccagggagcggaaggcggagacagcgagactggccaggggggaggaaagaggacgcgtgtgggcaagggggacaacgggatgtccacgggctcggtgagtgatccggaggagatggagcttcgggggctgcagcgggagtacccggtccccgcctccaagaggccgcccctccgcggcgtagagcgcagctacgcctcgcccagtgacaactcgtcggcagaggaggaggaccccgacggcgaggaggagcgctgcgctctgggcacagccggcagcgcggaaggctgcaagaggaagcggccccgtgtggctgggggcggcggcgcaggtggtagcgcgggcggtggtggcaagaagcccctcccggccaagggctcagccgcagagtgcaagcagtcgcagcggaacgcggccaacgcccgtgagcgtgcccggatgcgcgtgctgagctccgactccagactctctgcatcaggtctccccactccacgctccgggcgccccaactccaacaccacgtcctgccgcgcaggttcttccccgcgcggaggagcgcgcagggtgggcggcttaccatagcaagtgatcctgcgatagggaacgcgcccttgccccgaggctgcactaccacaggaaataacatatgtaaataaatttatttttttatgaataataaaacgcgctgtaaaaaccgtgtgccccttggaggtgtcaggatgtggtctttgttgccctttactaagagggtttggctgtagaagttaacttttaagggctgatctcctctggtcagggcggtgggtcattgcgggaggaatggtggcgatcacttttggatcactccatttccaaacgtcattctctattaatctctatgattctgctgcttctccgcgccgggcttcctggaaggccataactggaggcctaataaaagtcctgagtcttgaggcccctgctgtcctgacagacatacactcctcaggctaacataggtgcacgtctctcatacacacactcacacacacacacaacacacacagcagctactccagctaaaagcacactccaatccttaccattgcaagtagttcaaaaaaaaaccctaaggcccacccacaagtctccagtgtaactggcagaataaaaccctaatataagaagccaatttgtatttcaacggtgcttttcttttatcaaatgtttatatatctttttaaacgtacactcattttccgtgttattttcttccacttgtactgcaatttttgtagaaggtaacaacttggaaaccctataatacaatttttaaaacgg

SEQ ID NO: 641778 - DNA, 1576 bp, Homo sapiens
taggctaggtacgaggccgggtggcacgaggccaaggagtacagatagccttttcaaaaggcgcagcttaccgcggtgcgcgcggattctggacttgggcgccaactcgtagtccacgctccccggggtcagcagaggggcgctcacgctctcgccacccacctcgctttctcaccccgcgcttcccggcctgggtttttagtcttccttggagcgctctctggcctccgcctccgccagggagcggaaggcggagacagcgagactggccaggggggaggaaagaggacgcgtgtgggcaagggggacaacgggatgtccacgggctcggtgagtgatccggaggagatggagcttcggggggcgtgcgacgacgggcagatgatcacggggaaccggcgatccaccgaggagcggcgactccatcggggggaagaagcagcgcagctacgcctcgcccagtgacaactcgtcggcagaggaggaggaccccgacggcgaggaggagcgctgcgctctgggcacagccggcagcgcggaaggctgcaagaggaagcggccccgtgtggctgggggcggcggcgcaggtggtagcgcgggcggtggtggcaagaagcccctcccggccaagggctcagccgcagagtgcaagcagtcgcagcggaacgcggccaacgcccgtgagcgtgcccggatgcgcgtgctgagctccgactccagactctctgcatcaggtctccccactccacgctccgggcgccccaactccaacaccacgtcctgccgcgcaggttcttccccgcgcggaggagcgcgcagggtgggcggcttaccatagcaagtgatcctgcgatagggaacgcgcccttgccccgaggctgcactaccacaggaaataacatatgtaaataaatttatttttttatgaataataaaacgcgctgtaaaaaccgtgtgccccttggaggtgtcaggatgtggtctttgttgccctttactaagagggtttggctgtagaagttaacttttaagggctgatctcctctggtcagggcggtgggtcattgcgggaggaatggtggcgatcacttttggatcactccatttccaaacgtcattctctattaatctctatgattctgctgcttctccgcgccgggcttcctggaaggccataactggaggcctaataaaagtcctgagtcttgaggcccctgctgtcctgacagacatacactcctcaggctaacataggtgcacgtctctcatacacacactcacacacacacacaacacacacagcagctactccagctaaaagcacactccaatccttaccattgcaagtagttcaaaaaaaaaccctaaggcccacccacaagtctccagtgtaactggcagaataaaaccctaatataagaagccaatttgtatttcaacggtgcttttcttttatcaaatgtttatatatctttttaaacgtacactcattttccgtgttattttcttccacttgtactgcaatttttgtagaaggtaacaacttggaaaccctataatacaatttttaaaacgg

SEQ ID NO: 641779 - DNA, 884 bp, Homo sapiens
cgaaagacgggtgaaggccatgccgacttctgggaaagttccccgaaaggagaatctgtgggtacagcgtgagtgggggtcctgctcctttgtgtgctcaaccatggaaacagttcttggagcatgtctactcagcatctgcatcagcacctgcatggctctgggcgatggagtgcagggaagaggacagaggaggatgacccacgttgaggaaacgcaattctcctgactagtggccagggaatgtggctttggttctctggacagttctgtcgtgacctcatccgtccatgtctacttccactgctaccacaactagagctgcaaacagtgggggctgcaggccttgctagagccaggctgaccttggcccctgccttcctgcgactgtccagcaggcggaacgtcatccctgatatccctgcatcatttcctgtgtctgtggcgagcgactgtggagaattccttcgacaatcctgacggtggtttcatcggcgtgtggatagcacactagtctgtgctgtgaatagcgaagcagtcggcaaggacaacccggtggtgctgtgtggctggcaaaggctgtagctgcagcttcaaggaccggtagtaaagttcgagagcacctccgaaagcatatcccaggagaaagtggtagactgccctcgactgtggggggcaatgtgttggcaagcaagtacaaagttcttaagactcacaatccgcgacagatcctgatgtggagtcaaccaaagaaggtccaggggtctcaactggttccagcaatttggccccggagacgggcatgggggggccattggggaaccagtgagtcttttggcccttggtgctgatcggcgttgctcccctcgacacatgggttgaag

SEQ ID NO: 641780 - DNA, 1238 bp, Homo sapiens
  misc_feature (268)..(268): n is a, c, g, or t
  misc_feature (294)..(294): n is a, c, g, or t
  misc_feature (480)..(480): n is a, c, g, or t
  misc_feature (1021)..(1021): n is a, c, g, or t
agtatgcccctggttccaacccgttatgtactcttacccatctttggcggtgcacacttcaatcaagaggcagtctaatggcgcagtcgacatgtagttattgacatcgtcgcagtaagtgccgtaagtaaagtaacacgatgcatagccattagtgaattcacacgattactagacacgaaaataaaattaatacccttacaggtaccaactaagtagagcttgactatgcaatgatatttatacacttcaccagcaaatgacttcncacaggggtcacaattgaatctcatntcataataataaggcgtcatttccttcatacgatacgagattaatatcttcttaccggtgaataatattgggaaaggcaatttacatcctagagtgacttaacccaaaagtgcaaaacttagcatgcaatacaatatgacaataaagttctagtaacattagggatttattacgtcaatattcctnatgattcacgtgcatataagtccactctctcctgtattcaacttttcctggaggattccgcaaggagcggttgaaccgctaaggttcgactccccttctgcgatcatttcgagtactgtgtatactctactctatcatgtacaagaaggtatttaggaacaccctaatactactcattcattgtgattcagaaatctctacgcggccatggaaacggttaggtcctgtacttccctccatctccgactcaaatcgtttgtttccgactccagtaagacatggcactgtgggagggggggtctttcacaaccaaagagccgaagctaacgcaagaaaatcttggagcatgagttccctcgaattctcaccccatttgtggagggaagccactaggggggtctgacacgggagagcccctgaggagtaaacctggtcgtgagattaagctattttccaattaattctcgagagaacaaacgcgggagttagtgataggaaagtgtctgccgaagaggaaatgttgtctttccgaaaaagaganaggctgatagggtgcggaatagtgctccctactaagataggcagcgcggcagctctatggccgaagataataagagaccctcctatcgtggccttctgcttaactatgtattacagctgctagagaattcatatttctactgtgtgttggatgagcacacaatcgaaatgcagacgagccataagacagcggcaagcacaaccgagagaaccgcggg

SEQ ID NO: 641781 - DNA, 1050 bp, Homo sapiens
ggccatatggcaacgctccagattatcgaatgtctgacatagaaaacaagaagcagctaagacaccgcgctgtctaccaaaaagtatgtggagctgcaggagacagagatgatggacccagagctagagtacaccctcagtgagggtctgcatagcagatgataaacgaggttctgtccggaagcagattctatacataccatcgtcgtcaggtgcttgaagcagtaataaccaacagaggaattgatggatcccaaatgcgagacagatgatagaccaagcgccagatcacctcagaacaccagattaccgcttaaaccccatgttaagaaaagcctgtgatagctgacattcctaaattctgtcacggtatcctgactaaggccagggatgattcagacattagagaggacaagtcatctccttgctctgaagctcgtagatgatgcgtgatccagtcgaccatgtacttcagtactgtgaacgacctagatccgaatcattatccaggagtccgcccgtggactaccggctggatcctcagctccagctgcactgttcagacgagatctcctagtcatatgctgctagaaggacagtcgagtcagtcccgagagagcgagacaggtcaggtggaggagtgcctcaaggtcaacctgttccaagatccaaaacagaattgtgtaagcaggaagtgctaaagatgctgaagaggaaagcaaagccgacatctttgtggacccggtaactctaattactgttgatgccctggacattcatgctcactggagcaagcatcaccctgacggggcgtcaatgtccggctcatggaagcctgaggtaacggcgtaggtaaaccgcggcataagcggctaagaaccgatggaatgggcgtacgcccaagggggaccacaaaaagccccggatctgacgccaaagggagtccaccggagaggcccccggaacacggccagcgaatgtcccaagccaagggagaacccaagggcaaaaccagggacccgagcaaaaaaatcaccacagaccctaccc

SEQ ID NO: 641782 - DNA, 692 bp, Homo sapiens
acagaacaagactacgtctcaaaaactgggggagatatattaaaaggactggtccagggagagtttgctttgtaaccccgacaatcctggagggaatttggtgtttggttaaggaaaagagagaagttaaaagtcatgagttacatccagcagtgtaaaaacgaaatacccgccgggcgcggcgtctcacgcatgtaatcccagcactttgggaggccgaggcaggcggatcacaaggtcaggagttcctggccaacatggtgaaaccgcatctttactaaaaatacattagctgcggttgggggcgtgtgcttatagtaccagctacttgggaggctgaggcaggagaatcggttgaacccggtaggcggaggttgagtgagattgctccactgcactccaggcctggcgacagagggagtatgtctcataacaaacaaacagatgccatgtacaaggtgctgatgaagagatgcttcccaaattcccatgtcagctgcgaagctgacctccctgtgcgcctctatgccaagaactgtcacctgccttatctggactcttcccggatagctcttgaagtccacagccttttgaatcttggctagaggggggttttttctcttctgcacccagccaattgatttaggagaggttccagtttttgtgaggggacacaagacttgttgcttgtt

SEQ ID NO: 641783 - DNA, 125 bp, Homo sapiens
gcagcgctctcaggacatctccaccattggccttgggcttcttgcttgcttccttcacccttccttcaacttcaagggcgacaaaggggtctatggggccccagtcttgcccttgacttcaaacc

SEQ ID NO: 641784 - DNA, 633 bp, Homo sapiens
tgtcatgggtcactgaggctttgtattttggagcacaaaaccaccggggatctagccggtggccaccccggagatgacacgaggtctcacatgacttcttagacacttggtggggaaaggttgaggcgagaagaaacaagtgtatgtgggcgcctacatgtgtactacggactgtgctaacagcttagagtcttgctcaacgagggcttccagggagcttgggcattctgtagaagttcttaaggaagcggataggaacttccaggggcggaggggcggcataactatagcgagggtactctcctgtgtcacagtgtgttgtggtgtccgagggggccttcgaagtccgtgcctttgagcttgacacgaggggcaggggttctggtgtagccaactaggtgtgaccgaggggctttgcctgtgcccacgagctttactgggccaggggtctctgaagtaccggcgggcgaaacttagcctgtgttgcccagttcctttttcaattctgaggagctggtagtactgtggccaagcgctcagatcggccagggggcaccagtcttgatctgcccaggtgcacacgcccaaaaccaggtcagcgatgaaggtatctgcagtctcccccgaaggaga

SEQ ID NO: 641785 - DNA, 445 bp, Homo sapiens
ctaactcatgcccccatgtctaacaacatggctttctcagcaaaaaaaaaaaaaaaaaaaaaaaaaaaaatttgggggccgccggggcccccggaaaaagcttcttggaaaaccattcgcgtggtggggcgcgcggcgggcccacagagaggtcacagtggaaccggggcgccaaacgcggtgttccccgagaggagaaaccgcggggcacagagaacaagggcgtgggcgatttcccacaatataagaaaagccccgcggggggaaacacgaggagtgagttccgagaacacaaactcccaagagaggcgaggttcggagagggcacataagagggggaacccttactccaacgaggagagtcccaagaggaggagcccgaaaatattccaaattatccgcgcccccggtccgtggggagaaaagacgaagaaaagacagagag

SEQ ID NO: 641786 - DNA, 416 bp, Homo sapiens
  misc_feature (64)..(64): n is a, c, g, or t
gtccgcctacttgtgttctgtccagccctcctaagattccaatccgtctcactcttcctacacnatttccctgaacctaccctacctgcacctttcaactggtcaatttttggccgtcctggaatccgttcttggaacttgcttgccattgcaattgctcaagttgggccattaacaccaaggcctggtcttcttaattaagaccaggccttgttttcaagcttgttctatcccttaaagaatgcttccccagaacccagcttccagcctctggaaccaggcaccacccaggccaggcacatcagaatccttcctggtagcttccggtcagggccatgcttttgcatgggctgggctgccgctctcatttttgtgtaattatctgacttctcttttatcactcagctcagctaatc

SEQ ID NO: 641787 - DNA, 546 bp, Homo sapiens
  misc_feature (148)..(148): n is a, c, g, or t
  misc_feature (270)..(270): n is a, c, g, or t
  misc_feature (299)..(299): n is a, c, g, or t
  misc_feature (329)..(329): n is a, c, g, or t
  misc_feature (336)..(336): n is a, c, g, or t
cctaatgaagtcatctgtcagatgccatgatagtgtgtctcgttacatagtaagatcaacgtgccctccttattcttcaaaattctttggttattcttatccttaccctttatatgaattttaggattcgtctgtcaagttctatccnaaaagcttttggcagattcttttttattggaattacactgaattttatgaattaatatggggcaaactgccatattttaatactgagtcctttcatctgtaaagatgtacctctttttgttncttaggtaaatttttatatgttcaataangttgtgtatagccagcatgtggctacaccngtatccnagtgctttggggggggcccaggcaggaggatcacttgagcccaagagtctaaggtcagcctgggcaacagtgagacccagcctccacaaaaaatacatagccaggtgtggtggtgcacacttgcagtcccagctactcaggaggctgaggtgggccaagatgaccactgcactccagcctgggtgacagagcgagacccctgtgtcttta

SEQ ID NO: 641788 - DNA, 102 bp, Homo sapiens
tttcctactgcattggggacttctagataggttaacgaaaggccttttattctgttactggacatgaaaacttgtctaatttcttactctactgtacgttta

SEQ ID NO: 641789 - DNA, 854 bp, Homo sapiens
ggcagtagacggacagaggagtcgtagcggtcgaggttttgggctccggcgtgcccgaaagtatgttatgcataaaagtggataatttacatgataaatgaaaatggcaattcttgaagaggagaagtactaaaatttataaaaatctggtgtatctttggacgagatctatccaaaaggagcagactatttcaaaaagcgttgaagaacattttccttaaaaacaaagatgtgaagaatccagagaagatcaatgaacttatgtgcacagggcgaatttgtatgaaagagctagaagcttgtgtacttccttaggaaatacagagtatgaaaaaggctattattcagataccaacaaaataatgtgatcattactattgaatttagctatcaggtgccagtgtttatgtataccagatgttgtaaaataattctaacttaaaaatgggagatatacatgtggtgtaaaaaaatccctgaggtgccctatgaactaaataggttcaacgttctgtcataccggagaaagtatcagcaacttatgctccatgtgtgtaccaaacataagcaattaagtataataacgatcataaattaatgagcaccaattggatgacatatatacatttaatctctaattaataggattagcaattattttagttattctccattaattggagaatgcgttacggacattatagcaataattttaccattttccttatttggaggaccctttttccctggttgtaaggtcccgggctaaaaaaagcggtgttttggtgatcaaaatggggatcacacggggggcacaacaaaaagggggcacggttgaataaaaaaccaagggt

SEQ ID NO: 641790 - DNA, 127 bp, Homo sapiens
cgctcactcggcaaatcagccaagcacattcaccacactgtctgaacctgcggttagaccgtcgtgagacatgttagttttaccctactgatgatgtgttgttgccatggtaatcctgctcagtacg

SEQ ID NO: 641791 - DNA, 173 bp, Homo sapiens
  misc_feature (80)..(80): n is a, c, g, or t
gtctagacgatcgctttagtggttgtgagtagcatgctcgttgagattcatcaccaatccctaatctcaagtaatcaggnacacaaacactgcggaaggcgcaggtcctctgcctaggaaaaccagagacctttgttcacttgtttatcttgctgacctacccacaaccactg

SEQ ID NO: 641792 - DNA, 202 bp, Homo sapiens
tggtgcatattggccttggtctgcatatctgtgcctctacgttattgtgcatactttggttttaagaagaatgccattgaacacccagttcgaaccaatcagagttccacgtcagagttcctgaacagtcgttctacacgaaggcctttccttggtattatcatgggaggggttttgccctttggctgcatctttatacaaa

SEQ ID NO: 641793 - DNA, 346 bp, Homo sapiens
cgccgactcttgaggatacccgaactcatcagccagcagtgtataagcattcccttttctccacaaacttgccaacatctgtttttttgacttttttggggggtttttgttaacggagtctcgctctgttgcccaggttggagtgcaatggcgtgatcttggcttactgcaacttctgcctcccaggtccaagcgattctcctgcctcagcctcccaaatggctgggacttcaggtgcatgctgccatgcccgactaactttttgtatttttttttctagtagagacagggtttcatcatgttggccaggctggtcttgaactcctgagctcaggcaatccaccca

SEQ ID NO: 641794 - DNA, 527 bp, Homo sapiens
tggacctggaactcccgggggggcatgtgatggggagaaggtggtgcaaataggacatttacgaaccacagaaaaactctggtacatgtctagcgcctggcatcagaggtgtgcagctgcgcagaagtgggctggagccagcgctatttgtagaggatatcgtagtgtccaggccggtagacaaggtagaccttggcgctcggagcccgtccagggcaagatgtgcgagattggttggtgtcgcccgtcgccgcagttccattgtactccatctgtgatggactacgctgtatggcctgggccagcgcaatgatgtggatgtggtcgctctccttgcacatggtgtccatctcctgctggcagaactccttgacatgtccgtccagcctcgatgaattgctcgaagaacttgctctcgcgctgcaggtagcccgaggtgagcagccgcaggtagaccataaggtactcggaggtgctctggtcattgaaggaggccacaagtcggcgacagaggtctgcttctccat

SEQ ID NO: 641795 - DNA, 429 bp, Homo sapiens
catctcctcccactcctgggtcagtcttatgcctcagcctgccaagtagctgggattacaggcgtctgccacacacctggctacttttgtattcttagtagagatgggggttcaccatgttggccaggctggactcgaactcctgacctcaagtgatccacctgcctctgcctcccaaagtgctgggattacaggtgtgagccaccgtgcccagcccacttgttcttttctggccctcacatcccagtcccctctgagacagccatctctggcctcatagtgcaggtcacaactctcacttctaggcacatctccatcctctctctagacccacctagggaggggtgcatgtttagaaagttgctgactttggcttcagggtgggagtgggaaaagggttgtccagttctgaagcagaaggaggtggga

SEQ ID NO: 641796 - DNA, 234 bp, Homo sapiens
  misc_feature (129)..(129): n is a, c, g, or t
gctcaccttcaagggcattcttcgggggtgcatcagagggagggcagagcctgaaggatctaagcgaaggcttccccgggtgtaatttcctagggctgtttgtaaggaggagatcgaattcgcctcctnctatcaagcctctctgctcctgacttttagtttggatgccggcgctactgactgtggcctcccgcctttgttactaccccggagtattggctgaccatagcctct

SEQ ID NO: 641797 - DNA, 352 bp, Homo sapiens
  misc_feature (110)..(110): n is a, c, g, or t
  misc_feature (328)..(328): n is a, c, g, or t
aaattgtcacatgttgctgagcatcagggggaagtaagtgatctactagatttatgaacaaaatggaatggaatagcgattcgaacggaatgcaatgggaatggaatggnaatggactcgaatggaatagagtcgaatggaatgggagtcgaatgggaatgtaatcaaatgggaatgggaatcaaatggactgggaatttgaatttaaattgttaagggagcagaatgggattggggtgtttatccaaaagatatccgattgggattgggattgccagttggattggactttgattgggattggaccttgggattgggaattgggatnccgaattgggaattgggaattggg

SEQ ID NO: 641798 - DNA, 214 bp, Homo sapiens
tgctgagagacaggagggagctgcacagcaggggaggctgagcacagacccttgagatacagtaaataacaaagccctaaaatcactagtaacgagcatgactggccacctcccccagaggccggcagccgccaaaatgtagtgcttggagttacagggggtgaccctcactcttaactacccacaagggaggactaccaaagagtggtcagtt

SEQ ID NO: 641799 - DNA, 105 bp, Homo sapiens
cgcccgggtgtgtacatgcacctacggggcattgagtcagctcccccaagatgagctgcagccccccagagagagctctgcacgctcaccacagtaaccaggccc

SEQ ID NO: 641800 - DNA, 927 bp, Homo sapiens
  misc_feature (73)..(73): n is a, c, g, or t
  misc_feature (127)..(128): n is a, c, g, or t
  misc_feature (192)..(192): n is a, c, g, or t
  misc_feature (194)..(195): n is a, c, g, or t
  misc_feature (205)..(206): n is a, c, g, or t
  misc_feature (259)..(259): n is a, c, g, or t
  misc_feature (355)..(355): n is a, c, g, or t
  misc_feature (445)..(445): n is a, c, g, or t
  misc_feature (467)..(467): n is a, c, g, or t
  misc_feature (486)..(486): n is a, c, g, or t
  misc_feature (531)..(531): n is a, c, g, or t
  misc_feature (555)..(555): n is a, c, g, or t
  misc_feature (558)..(558): n is a, c, g, or t
  misc_feature (593)..(593): n is a, c, g, or t
  misc_feature (608)..(608): n is a, c, g, or t
  misc_feature (634)..(634): n is a, c, g, or t
  misc_feature (640)..(640): n is a, c, g, or t
  misc_feature (661)..(662): n is a, c, g, or t
tagtatgagctgtgttaaatctggccgaggcaagcggcggtgctatggctgccgagctcggcctggaggcggngagaacatggtgcgcaggttcttgtgtgaccctccggattcggcgcgcgtgcgnnccgccgcgagtgagggttttcgtggttcacatctcgtggttcacgggggagtgggcagcgccangnngcgcccgccnntgtggccctcgtgctgatgctactgaggagccagcgtctagggcagcagccgnttcctagaagaccaggtcatgatgatgggcagcgcccgagtggcggagctgctgctgctccacggcgcggagcccaactgcgccgacccctgccantctcacccgaccctgtgcactgactgctgcccgggagggcttcctggacacgctggtggtgctgcaccgggcctggggcgcggctggacngtgcgcgatgccttggggccgntctgcccgtggaccctggntgaggagctgggccatcgcgatgtcgcacggtacctgcgcgcggntgcggggggcaccagaggcagtanccnttgcccgcatagatgccgcggaaggtccctcaganatccccgattgaaanaaccagagaggctctgagaaacctcngggaancttagatcatcagtcaccgannggtcctacagggcccacaacgttgccccccgcgccaaagaatcccacccccgctttcgtaggtgtacactaggaggacgaactcgaaggcattcataagcaaccaatggttccgtggccattctcagagcgttacgactattagttgcctttgcccgcccagctagccggtcagcgtggtccgttgatagtcattttttctcactcatattccttcatacacaaggtgtacagccacggaccgacatcaaaaagcgagcacaagc

SEQ ID NO: 641801 - DNA, 322 bp, Homo sapiens
  misc_feature (77)..(77): n is a, c, g, or t
gttgggagtaacgctgttttgttttggcaggttaaaggggcccggccaggattcgggaaagggtggcctaaaaccancaataacttttggggtcattgtcccaggagggatttcacttggaacaaaagttggaggcacccgcttgcccaggaggtttgtcccttgaggcgtttcgccagtaaggtgggggctcagggcctcaatttttttttggagcacgggttggggtgggccggcagtttacgggggggccagtctttgcccacaacaatgtggagccctgtgaaagtgggatttgaataaagggccaggtgggccccca

SEQ ID NO: 641802 - DNA, 638 bp, Homo sapiens
atcccagctctcagggaggctaagaggcgggaggatagcttgagcccaggagttcgagacctgcctgggcaatatagcgagaccccgttctccagaaacaaggaaacaaaaaaaaccaaaaggacaaaaacaaacaaaaaaaaaacacaaaaaacaacaaatgtggggcgcgccgcgccgcggcgccctcgagaagagcctttcaaagacaccacccgcgggggaggcgcgcggggggccccaaaaagaagggaaaggagaaaagtgggcgcaaacgcgggggcccctagagaaagaacccgcggggcccagcgacacagcggagggaggagtctctccaccacaaaaataaaaaaaccgcccgcgggggagcgccccccgagaaccgcggttctagcgagaagacaactccccaagcgagggggagagtctaaagagaggcgcaaaatcagggggggtctctatatcaaaccgcagaggggagcgccacaagcggggacccccaaagaatatacaaaaatgaaaaagcccacagatagacggggggagaacaccgtcaaacacgcgaaacctaacagacgaagacgacatcaacacgagacaaacagcaacagaaatagccaccaccagcaacgagg

SEQ ID NO: 641803 - DNA, 233 bp, Homo sapiens
tatataatacaaaaatatagatagggcatagggggtgtatagcctgtaatcccagctacttgggaggccaaggcaagagaatacacttagaacccaggaggctaaaggcaggagaatacactacgaacccagaaggcctaggtatgcagtagagccagagatacactagcatagatcacgccaatagcatagatacaagagtagagacagggcaagacaggaaataacagcaa

SEQ ID NO: 641804 - DNA, 422 bp, Homo sapiens
  misc_feature (382)..(382): n is a, c, g, or t
gttttgaaaaagatgtgggttccttttggagtctagtgtaaggtgctgagaccttaacaatgggctaatacagtgaagagagtctacaataaaggtagtcagcactattttctgcatccagtgtggtggcgtttctcacctgaagagtaatcaagataacatcggtcatcttcctgggttaatggagtgaaagtgcctctcagctctaggggacagggcagagatgagagaaagaaagagggggtttcagaagtgtcagggtggagtgatcccaagggggatggtggtggcattagattaagctgaataattaatctcaattggggcagtgatcctgcttttggtaacgccggggccaatggtctccggtaaggacggtggnttcaggcatgtggtccttggtagggactaatggtgctgaa

SEQ ID NO: 641805 - DNA, 1028 bp, Homo sapiens
ttaacctcgtccctcgctgggtttctattgtgggtcgccatctgagggatctaacgccgttaatccgagcatttgtgtagacttcaaactttcgtaggttctggttttccgcccaaaagttttcagtcccatgtaacagaaattcagccaccaagaaagttgattgcttcctagaaaaggttggcatggaaattcacacaaggctcaatgacactatatccataacttcttgctaacgatcccagcagccctccttcacgtggcgcagatcagatccagacaagctttacccaggcaacggatagccaggggaggcctgctcaagccctgcgggaacgcgcccctagactaagagttactagtagtttctgaattctgctttcatgcagctagatccgtttgtagaggacttcaaatactctggtctcgctctccagcgacgactcgaccttctaaaccgtactgcaagaaatggcaattgcacgttgatgctcacgtccaacagacagactgtcatgtgcgctagactccggccatgatgtccaacggatgtggcagctgttgactgccagtgtcatctaacgtcatcctgtcctggaggattaaacacgatcgtatgtcccttgggaataagcaccgatacaggcttaagctcataagatagataggagtttatccttttaccatcgagctacttccccataataaccactgttgcatccaacactcttcacccacctcccataccgtcaaggggattagtggatagcttggtcccaaagtaactggtggtaggatatcttagaaacaagaccacttatactgtctgtctgaggcagcagataacagcagcatctcgagccagcctctgccttaaaggcaaatctttacttcaatcacgtatggttcacagataattctttttttaaataacccaacctcctagagaagcacaactgtcaagagtcttgtacacacaacttcagctctgcatcacgagtccttgaatttaacccaggggatcaaag

SEQ ID NO: 641806 - DNA, 361 bp, Homo sapiens
gtcttaaaaaattatttatttttttggatttgtaaatctgtggacaaaaaagggtttcctccccccttttactccctggggtcatgccagtgaaggaaaaggtccatttggttttccccctttttcttgctgtagtccaatgggctatgagcatcagcttactttgtcccttagagcaagcaaaacccagggcaagagtttcgttcagctttaaaaaggtttgcttttttttagttccagggccccttttgaaattgcccaaccagttttagggcccctttaaaccgggcgaactaggggtttaattttcccttttcatgttcaattaccagttcaaattaaaaaaaagggttattggaga

SEQ ID NO: 641807 - DNA, 231 bp, Homo sapiens
ggttgtggggtggggagaggggggagggatagcattgggagatatacccaatgctagatgatgagttagtgggtgcaacgcaccagcatggcacatgtatacatatgtaactaacctgcacaatgtgcacatgtaccctaaaacttaaagtataataataaaagaaaaaaaagaaaaaataaataaacttattgatcatctatgtgctaggcatattctctgtttgtatat

SEQ ID NO: 641808 - DNA, 194 bp, Homo sapiens
tagcccctggcttgctcaggtctgggtcgtgtgattgtaaactagtcaggtcaggatctgtgatagtaaactagtcggatcaggatagtgtgattgtaaactagtcaggtcaggatcgtgtgattagtaaactagcaaggtcaggatcgtgtgattgtacactattccggtcaggatcgtcgtggttgtaaact

SEQ ID NO: 641809 - DNA, 713 bp, Homo sapiens
  misc_feature (234)..(235): n is a, c, g, or t
  misc_feature (247)..(247): n is a, c, g, or t
  misc_feature (254)..(254): n is a, c, g, or t
  misc_feature (268)..(268): n is a, c, g, or t
tctcttaggtacgtttttttatctaacccactgtccagatgttgttgcacgcgacgcgcacaccaatgctttataatatagaagacaggaaattaagaatgatagaaaaggtgccgagggcatacagagaagcacctacactataatttcaaccatatattaaaaatccctattatttaatttacccagctccccatgtttcctgttacactcatgggtttgaggtggataggnncaacaataaatnctatagntatgaatgcacatnacagtgattcctgaaacacaaccttacccagcgaggccgccgatacgccaaccccccaccgcgccgcctcccctcatgcttcgtacgctcatattcctcgccgcttaaccttgagcccgcccccataatagaccccgagatgatgctgcggccccaccaccaagttgaaacgatttcttataagagacaaaaacaccccgccctcacatttatacaacacgagataatccacactgcacagaaactaccctaccataacctgacacacggacaccatgctcacagagaacaacttgatacacagggataaagctagaactctcccactgtaagagaaacaaaccaaaattatatgtcaacacgtctacccaccccgtccctcgtgtctcagtccatcccgcacccgccgcgcgccccctggccaacaaggactcatcgcccgcct

SEQ ID NO: 641810 - DNA, 345 bp, Homo sapiens
  misc_feature (31)..(31): n is a, c, g, or t
  misc_feature (94)..(94): n is a, c, g, or t
tacccccaaggagggtttgtttttttggttncgggggttcaaaaaattcccccccaaaaaattctttttttgggttttccggggggggcccaanagggggcccccccctttttttgtgtccaaaaaattgggggggggacccgggggttggaaaaaggggggccccttttttttggtgggggggccaaggggccctgcgggggggttttaaaaaaaaaacatttggcgggtggggggggaaacccccccattttatttttttttttttttgggggggggggggggggcccttttttttggggggcggggggtccccccccctgaataaattttggggtcccccca

SEQ ID NO: 641811 - DNA, 268 bp, Homo sapiens
tctacaaatgaggtggacagagaagacagacagatgaccatgggacccccctcagcccctccactgccacgattgcactctcccctggtaaggaggtcctgcttcacagtcctcacttctaaccttctggaatcccacccaccactgtcaagctcactattgaatccacgccgtccaatgtcgcaaagtgcaaggaggttcttctactcgcccacgacctgccccacaatcgtattggttacagctggtacatataggtcagagacgt

SEQ ID NO: 641812 - DNA, 300 bp, Homo sapiens
aaaaactttttaatttttccccccggccccagagaaaaaaattttttttttttattaccccccaaaaaaggccaaatttccaaattcccccccgggggcctttggggggggtttaaggccttttgggtcctgggaaagggcctgtcccccccgggggccccccaaacctttttaaattccaaattggttggggaaacaaactttttttttttttccaaaaccgccccctcccccccaaaaagttttttttttaaagaaaatgggttttttaaaaattaaaaaaaatttgcctttttttta

SEQ ID NO: 641813 - DNA, 435 bp, Homo sapiens
tttagaggcatgatccagctcgttacctgtctggagcagtgcgctgcggtgcaggcgagttctcgaacgcgcgcaggcgacctggaagttctggatcagtaccggaatgccggcaaggctgcgggtgatgaagcagttgttatcgggcagcagcgtcttgaggccggcgaacagccataccttgcggaagatcttgcgctgttcgcgggcgaagatgtccgtggacaggtagtagccggggtgcattcgcgatcgcattggcgggcttcctcaggaatccttgtggtaaatgacccgcgcagggttaccgaatacgctggcaccggccggcacgtccttgaccacgaccgaaccggcaccgaccactgcagcgtcgccgatatggatgccgggcaggatggtggcgtgtgggtgcacgatcgcatgcttaccgat

SEQ ID NO: 641814 - DNA, 620 bp, Homo sapiens
  misc_feature (19)..(19): n is a, c, g, or t
  misc_feature (31)..(34): n is a, c, g, or t
  misc_feature (173)..(173): n is a, c, g, or t
  misc_feature (176)..(176): n is a, c, g, or t
  misc_feature (179)..(179): n is a, c, g, or t
  misc_feature (486)..(486): n is a, c, g, or t
  misc_feature (513)..(513): n is a, c, g, or t
  misc_feature (561)..(561): n is a, c, g, or t
  misc_feature (569)..(569): n is a, c, g, or t
  misc_feature (589)..(589): n is a, c, g, or t
  misc_feature (618)..(618): n is a, c, g, or t
ggcggcacgagggcatggnagtataaaatcnnnnttttcattcatgaaactattaaaccttttaaaggggaaaaaatctctcttgagaatcttggaccaaagtctgcaccaaacatggatttggaattcaaatacattgttttccctgtctgtaaatccccaagttgagaaanttngtntcaaaatttctcctgaaagcaaaactgtctctcttcacagatgatatgattctatacctagaaaatctcaggtctacctgttataaccttcttctctcttttttgcagcaattatttttgttgaaagaattggttatttagacctttagcattttctacattctgtattttgctgattgcagagctgtgactttaatgtggttccctataaccctgtggatataatccatagctaatgattataacttctggtaattgtaccctccaatggaaaagagaacaactccagtatgagcaatctctctcnggccttttcagatttttccggtcaaanccttcaccttctggacagacctcaggacaactccaacttggtggctgnggcttccnggggtcatccacacaattgngggtcaataaacccttatagattttttcngg

SEQ ID NO: 641815 - DNA, 823 bp, Homo sapiens
agcgggctgcctctaggttctggcaagatggcgaaggtcccatgaccttgacgatgtcacttgtgcacgaaatgagagatatccatgagaacaccatggagacgaagaacaactcccgtaactagtgagcaacattgtggtagagttgtgcgaagaatgtacttatctgatatatgcttctatgctgggagatgatatttggactcatcatatgaacaggtgcatgattgcagcaacatatgacgtatggatcgtgcgtatgactcgtgccattggtttgtcttcaagagctgagaaagacaggttccctgggccagatcacagagtcgagtcgattaacagtgcatgcagtatttgaagccatcgaaagatctgtatgatgctgtacaatcctatatgtatgggattttacacagaacgatccaactaacactgctgctgaggaacagcgtatagcattgaccagttcgaagaatgcccagtgggatatctactgtgtgatggccatttcggcgagactgaaatgacgttatctgctaaccagattgggctcggagcaccaacagtaaagctctggcagttgaactgtgcaggagatcttcaccatcaatgaccagtgactatgcaaaagcagtctctatgtgtccacaggaactaatgatgactaatgtcctcagaaaccatcttatatctgtcatggcagtatgtctgaaagtgaagtgataccctaagtggacttgaaataatcctcgcaacctttcaaagaaaggtatttttgcaccaggcagttgaatacgtgaccaccacgacgataatatgacta

SEQ ID NO: 641816 - DNA, 169 bp, Homo sapiens
agtgctcagccatcttaagccgcgtttgcaccccgattgatttattcgctgcttcaagctgttcgctgtgtggtacacatccttgaaaggtcgcagcagaggattacctgtgtggagtacctgtgtgcgccatgggcgattcgtgctatttaatcttctacaactatgt

SEQ ID NO: 641817 - DNA, 168 bp, Homo sapiens
gaggaaccacaccgacaccccatccactttatctcagtagagaggtttagaagcagtgaagcacaagtgcagcaagagctgcgagaaggaggagcgggcagcaatggcgaggcacagcctccttgccgtgctcctcgtcgggctagtcgcggcctccggcttcagcca

SEQ ID NO: 641818 - DNA, 263 bp, Homo sapiens
ggcagataagtatggacgggatgagtagagagagttcctggaacaagaggtatagaactggctggcgtgtagctcacacctgtaatcccagcacttggggagtgcaaggtgggcagatcacttgagttcaggaggttcaagaccaggctggccaacatgatgacaaccccatctctactaaaacacaaaaattagctgggtgtggtggcgcacgcccgcaatcccagccactcgggaggctgaggcaggacaatcgcttgaac

SEQ ID NO: 641819 - DNA, 809 bp, Homo sapiens
cccgcctggccctgggactctgaccctcggctaccctttcctgccccactagcgtggccgcgagcctcggtgagcctggccgtattcccgctctcgcttagtggggcacagggcttgcagtgcatctgtgccctgtgccactccaatgccttctggtgctgctgggctgctgtcttggtgatactgtgtgccctggtgagtgctgccagcccatccgtcctgccctggttgccctctcaagggaacatgctgaacctgtgagagatgctgcctgagagagtttgggctcagtgccaacgagagctcatggctgcactgggtgtgcccccaatgccctgttagctgccccccctggaatggctctggggtgccaattgggcccatcactgtgggatggttgtgtgcccgtgaggtcggccttgcagggccatgggaggaacacacgcattgccccccctgttgggttgccctttgcgcaaggtaaccattttacagcaagagaggccccccaatatagaaataggctacggagctttgggaggtgctccaattaaaacaattccttggctatggcaggcaggtatgaccttccagggacccactggcttagcattgtgtggtgcacaacttggggaagaaatgagcataaaaagatggttaggtacagagatggccgcactatgaatcagatagcccctcgtgagaatgaaccctttcacacggggacatagacggggacacacaattgctgggagcacaaaaaccatggggcatgcctggggccaaaactgtttaaccaccagaagctg

SEQ ID NO: 641820 - DNA, 431 bp, Homo sapiens
  misc_feature (20)..(20): n is a, c, g, or t
caacccctttttaaaggacntggtttttggttttaataaaaaggtttgttttttccccaggggttggtccccaaggggccctcctgtccccccaagaggggcccctaggttagggccccccttaattcccccgggcccccccccccccctttgggcctgcccctggggggttttgggggcattgctgggaattagcccccctggggaaatgtcccaaattgggtaaatttaaacccggaattgtggggccatttatttaaaacgcccctaaaagcaggaaccttccccctaggggggggggggggaaaggttaaattttgttttccgggggtttttggggcccttttggggtttttaaaaaatgtttttggggggggttaggccccccccctgttttttttcggggcccaaaaaatttgggggggcttcca

SEQ ID NO: 641821 - DNA, 1141 bp, Homo sapiens
aaagccatttatttaaatgacagatatgtagatataacgggataaataaaaaaagtgtgaaatcgagattgtgaagcaggtggttaaaattataaactcattaggggccacttccctttggacaggtgtttcccccccagtcccagaacagatacaatgtggcttcagaaatttacacattagaaaagtgacagctccttcccttccaccctcgccaagagctcgtgaaccgaaaggccccacacaagaaacgtgaatttcagttgggaaccaagcacccccttcggccccgtgcctcctcttccacccttctccgtgcatttctaagcgatattatattttatacatttcactccgtgttccgtggaatccagcgcgcccgtaactttccggcggagaacgagcaccagaaggcgtggtgtgcaccagaaagctttcggggcagaggcccaagcacccactgtgtgtgtgtggcccaaattcgtgggggccctgtgccttggccctgtgccccttccctgtggtttcaccttccccacaaaaacaagaggggccgaacacccagtggacttccaacagatgtggaaagaaagacaagggtacgaggattaacgcgggcgcggcatccctttgagatacgtgttaaggtgccaaaatttcaccagggacaccccttgaaacccccaaggggcccccagggggtatacaaatcatcacctggtgccgtaccggagaaacacaaaccgtcgatagaagtcccaaaggacccccaagagaatcctgggtgtgcaattcccccctcctctaaagggcgaaaaggttgggaaacgggtccaagagatataagacaaaagtgggcaggcgaggcaacgaaaagaaaatgtgaggggaacacggagcatataacaagtaggaacacctcccggggaaatactaaaaaaaaaacaacagaaaggtgacggaattcacaacacagtggagggaatcaggaaaggggccctgtaaagcccaagagagcccgaaaatatgccacacggagaaaggggagattagagatgaacaatggtaaaacgcagcacacttgatgaccgcggagaagaccacacaaggagagaacagagaagaagaaagcaagtaccag

SEQ ID NO: 641822 - DNA, 100 bp, Homo sapiens
ttctccagcctgggaaacagacgcaagactctgtctcaataaaagaagaaaaaaaatggtaatgaccatgtatttattctgagtacaacctgccggctgg

SEQ ID NO: 641823 - DNA, 193 bp, Homo sapiens
cgccgagccagcgcctgggcctggaaacggggcgtagcccccccagtttcgcccaccacctccctaacatggacccccggaaagtgaaagaacttcgggcctttgtgaaaatgtgttaacaagatccgagcgttctggacaacgaagaaatgcgcctcctgagggagtgggtggagaacattggtggttaaat

SEQ ID NO: 641824 - DNA, 337 bp, Homo sapiens
tggttttggttttggttttggtttccaataagaattaaagaattctaagtggttgagaaaaactggcgacaaatttttatgggagacaaacgcctaaaaaaagaagaaatggtggtttggaatcataatcataaactcactcggatagtgaataaaagagagggaagagtttgtggggtgccaattaattttctctccttttcaccgtgggtgtgtgggcactttaaatctcagtgtggcacagagtgtttttctctcgtgttcacccaacaattttagcgcctttcaatataaagagtttataaagtgtggctcttaggtgcacattctcaaaaaa

SEQ ID NO: 641825 - DNA, 686 bp, Homo sapiens
ttacagcgaaagaggatgatcaggacatccgtcatcaaaaggaaggttaactctgtgagatgaatgcacacatcccaaagaagtttctcagatagcttctgtgtagattttatgtgaagatatttccctttctactgtaggccacaacgtgctccaaatatccacttgcagattctacaaatagagtgtttctaaactgctcaatcaaaggaaaggttcaaatctgtgagatgaacaaacacatcacaaacaagtttctcagaatgcttctgtctagtttttatgtgaagatatttcattttccaccatagactcaagacgctcgaaatgtccacttgcagattctacaaaaagagtattttaaagctggtccaacaaaagaaaggttcaactctgggagatgaatgcgcacatcacaaagaagtttctcagatagcttctgtctagattttatgtgaagatatttcgttttctaccacaggccacaaagcactcgaaatgtccacttgcagattctacaaaaagagtgtctccaaactgctcaatcaaaagaaagttcaaatctgtgagatgaacacatacatcacaaagaagtttctcagaattcttctgtctagttcttatgtgaagatattccttttccacattagacctctagcgcccaatgtcattgcagttctaaaaaa

SEQ ID NO: 641826 - DNA, 421 bp, Homo sapiens
tccccaatgatggtcctcagctccagcatcaatggtcaatgtgctcccttgggctggagctgcagcagccgtacctgttctttgctgtgggccgtgagctccccgtcagctacctgtgggatctgggggactggtgggcgtctcgagggtccggaggtcacccacgcttacaacagcacaggtaacttcaccgtatagggtggcctggctgcaatgaggtgacgccgcagcgacgccctggctcaatgtgactgtgacacgcggcgcgtgcgggggctcatcgtcaatgccagctgcccggtggtgccccttaatgggagcatgagcttcagtacctcgcctggaggccggccgtgatgtgcgctattcctgggtgctctgtgaccgttgcacgcccatctctgggggtcctgccatctct

SEQ ID NO: 641827 - DNA, 147 bp, Homo sapiens
atgatccacatatatccaggagaggggaagggaataggtgcagatacactgcacagttgcgtttatcacaagtgcctggaatacgagaagcagcagagaatattcactttcacagatgatccctgtgtgccaatgtggtcccccaca

SEQ ID NO: 641828 - DNA, 925 bp, Homo sapiens
tgtcttgatgtcctttgtagtctgaatgacgttttgccgtctatgttcatgttaagtccagcttttaccggatcctgttctgcacatgagttggcccttcttgtgggcctgaacatcccttacggttacaggttggtcattttatcctaccatcgccccctgggcttcccctatgatctacatccaccgattctggccgtatgtccttttcagggtttgcaggttcaaggtccatcaacgctggtgacacatgtacgattatttcacctgttgctacagccatcgaggagcagttctagtagatagctgtagtgagttctccgttggaagatttccgatggtgtctacagatctctcacacaggtcaacgttggtttcgaagagagtgttgagatcaaactggaagcaggcccactgttcgaccgaaaagaaggagatcaacaaacggaagcagctgatcctggaggggaaggaccctgaccttgaggccaagcgcaaggctgagctgtccaagatcaagcagaagaaccggcgcttcatacggacgaagcgtggatggagacgcatgaagcgacagaaggctggcagggctggccacaagggggcgtccacccaggacaccgtctgggtcccactcaggcccagtcccctcccagggccttggatcatgagccccacacggccatactgcccagtccgtagactcgtccatggagactgagggtcggaggaacgcttacctctggagggcagacagcccgttacctcgggggcctaccacagatgcctcacagcagaaccacgtgggcgctcagtgtatgtgacgggccatgctcctcagccccagaaaccactggctggccccattccctgagccctggcgcaagattacaggctgacaggggaagaaagaacatgaccggga

SEQ ID NO: 641829 - DNA, 1324 bp, Homo sapiens
  misc_feature (1228)..(1228): n is a, c, g, or t
actctgggatcacggcaatacatctgggagacgactgtagtaagactggatcctgagccagttcgccatgtggcatccaatcaaggcgtgctagaacgatgaattgtaagagttgtgcgtctccaggcagacgcactatctctcacgccatgcgggctctacgagtgcctcgtcgaggagctgtacatcattgcgacatagcatgaatgggtaacactgtagaagaattgttgctactagtcgacacgaagagacgtctgttatccaatgcgttagatgattagcatagcttgaatgacgattcgactctcgactgtatagagtcagccctatggaagtagatcgcatttatcaactcctattgaagtattacgctaatatggcaactgcaggccacgtctgaaattccatgtggctagtgctgcacctggacagcttgagcttgcttgtgcagtgatctatgttctctgatgaggaattagtaagctaccattttccaagagtcaagggaagaatcgaaggaatagtccatgggacgtggaaaatttgtgggtaaagggcaagctgttcgagaggacgaatggtaatttgatagacagagagggtgctcagggaaagtacaatagctatattgtgagctccgatccacaattggggccttcctctaggtagcggagaaccaattgtagatacctttaaatgtgcgctcggaaccatagaagaaacaacgtggatggcgatggattgaaggcgaaaaaagggtccagaatggcttgacttggctgtacataggacgcccaaaagggtcgaacgcgttcagtctttgaaaaggagttctttccatactttttcgcaaacgtttggtgtggctaacaattcgccgtaaacgcccaaaagggcacaaaacgttcataacttaaacagttgggttggcttggacccaaagtacgctcgagttctagcggacagtataaaccaaaagcggacaaggcgcgaattttagttggacattaaccccgccatagcgcatataaattactaaaagaccatttttggtatcaaaaaagttggcaccccgggtttgaacaactctggtttgccaaggtaccaccacattcaaccatgggaattttttcccatgccttccgaaggaatttacgtacattgatgccatttatctccaagatggtccttttctccttgcaaaaattccacgtccagttggttntccccatgcgccccttacaacattaggagagcggcctttttctttttgaatctggataatccccatggttgagcacaagatacaatttgcgctaga

SEQ ID NO: 641830 - DNA, 109 bp, Homo sapiens
cataatctacaggcgtatgtaaaagacaggaagaatactgggtcatagtttcatccagtgtgactctgtgacatccttcactagaaggagagtacttttttcacacagt

SEQ ID NO: 641831 - DNA, 139 bp, Homo sapiens
aagttgtctggatcaggaagaatgaggttcgagtcagtggggtgaacaagatcaatgaggagctttactgcagtgttagaacagctcgagaggagtgccctggcagagggtagttccacctgccagcttggtaggtctt

SEQ ID NO: 641832 - DNA, 165 bp, Homo sapiens
cgatgctctagaggatcctcacactgggtcgagtacacgactaggctgtgcaacttaagaccttgtttctacaattaatcaggcgtggtggcctgcacctgtggtcttggctactcaggaggctgaagtgggaggaacacttcagcccacacggtgtgaggttac

SEQ ID NO: 641833 - DNA, 221 bp, Homo sapiens
tgaccaacaaaatttcagggagtaataaaggctgtatacagagtttaaataggatgatgttttaaggaagtaattgattggtaccatggcttacaaccttaattcccacactttgggagggccacacacgtcagtgtgaactcagagagtgtcacgagacacacctcggcacacctagagtacaccccatcctctcatcacaaatataaaagtttttgtgt

SEQ ID NO: 641834 - DNA, 988 bp, Homo sapiens
cggcgagcatgctggtgcagcggctgcaggcctgggcggcggcggctccggcctgggacccgatgccgggtgacttcctgtgcccgctaccgggtggtatcgaacaagctgaagaagcggttcctgcggaatgccgaacgtggcggagtgccggcgagcagttcggacagctgggccgggagctgcgcgcccagggagtgtctgccctacgctggccttgtgccagctggctggtggcgcgctgccaggcaggcgctcttccactgggcccggggagtgcgctgtgcctcaccgaggccgcccgcctcttcctgcggcaggagcgcgacgcgcgccagaggcctggtctgcccctgccgcctaccgtgggacggcctgttgctagggccggccggccaggcgccacttggagaatcccggggagagagatctgacacccttcaaaaagccatggagaccaaaagaacaagagccaggaaaagaaccaaaccgaacaacatataagcacctataagatgcaatgtagacgaaacacgaaccaatggagagcaaaccctagggaccaaaagaaacagagaaacaggcacacacagaacggagaaacaaaatatacaagacaagaacaacacaaagcgacacaaaagagaaacaacacaaaagatgccggcaaaaaggacagaagaacgccacgcgataggagacagaaagacgcaagacaaaggggcaacacaaatgtagaacaaaaaggggaaaagaagcaaacacatatgacacaacgcacataaggacatagagacaaacgcgcaagaaacataaaacagacaggagaaaggcaccactagaagaaagaaacaaaaacaacgacaccgcacaaattatccacagagcaggaccatgtcggagagaagagaagaaaaacaacaaaggaacaaataccaaaaacacaacgaataaggaaagaaaaagtaagagacgagagaagagaaca

SEQ ID NO: 641835 - DNA, 104 bp, Homo sapiens
gggcgacctagaggatcccctcccaagatgaggaattgatctgggtgtggacatgtatgaattttagtgcatatagtaagatggggacatcttgggagcaattt

SEQ ID NO: 641836 - DNA, 162 bp, Homo sapiens
cctgccggtcgcatctcacagcatccccgcttctgcttctgccccgcttctgcttcctgcttctgccttctgctgcttcctgcttctgccttctctctgctgcttcctgcttctgcccaggtcttggtgcagggggtcacgcagctcgcacattcgtaatcc

SEQ ID NO: 641837 - DNA, 159 bp, Homo sapiens
  misc_feature (24)..(24): n is a, c, g, or t
  misc_feature (32)..(33): n is a, c, g, or t
  misc_feature (50)..(51): n is a, c, g, or t
  misc_feature (69)..(70): n is a, c, g, or t
tttagtggcagccaaaatcttcangtgtgatnngaatggtgcgctcaggnncagagacctgtttcttgnntcattcacagtgaggaccccatcagatacaggcataagtaatggtgagagggtctacatcagctgggatccggtatttcctgtggaact

SEQ ID NO: 641838 - DNA, 202 bp, Homo sapiens
  misc_feature (152)..(152): n is a, c, g, or t
  misc_feature (162)..(162): n is a, c, g, or t
  misc_feature (178)..(178): n is a, c, g, or t
caggtgtgagaacttgaagctcagaagcctcggtcagaaatgctgagcccttgcttggggatccagtaaaatgagctcagaggggagggggctgccgggctggggtcccggaggaatcaagtgtggggctcagtgtggtgctgcacctgctncataccaacnctccacgtgggctcangaggggtcgtgggccgctttttct

SEQ ID NO: 641839 - DNA, 116 bp, Homo sapiens
atggaatataagggtgtagacatgtaagcttgatacagtgtgcgagtatagtagtaggtgtctgtggtgctggagtttaagtatgagtagtcaggaatgacggtagatagttagtg

SEQ ID NO: 641840 - DNA, 95 bp, Homo sapiens
  misc_feature (66)..(66): n is a, c, g, or t
aaaagaaacgtaaaaggaataaatttgttatttgttaattaaaaaaaacaccttgagagtcaaccnctgttatggcgttaatctgtttcaagcgg

SEQ ID NO: 641841 - DNA, 93 bp, Homo sapiens
agggctctggtttttgtttttttgttttaatcattgggcattcacatggggcggttaaaatgggctggtttttaattaaaccaagaagtttta

SEQ ID NO: 641842 - DNA, 638 bp, Homo sapiens
  misc_feature (19)..(19): n is a, c, g, or t
  misc_feature (61)..(61): n is a, c, g, or t
  misc_feature (79)..(80): n is a, c, g, or t
  misc_feature (85)..(85): n is a, c, g, or t
  misc_feature (110)..(110): n is a, c, g, or t
  misc_feature (118)..(118): n is a, c, g, or t
  misc_feature (177)..(177): n is a, c, g, or t
  misc_feature (186)..(186): n is a, c, g, or t
  misc_feature (310)..(310): n is a, c, g, or t
  misc_feature (344)..(344): n is a, c, g, or t
  misc_feature (612)..(612): n is a, c, g, or t
ttttactcatccaaatgtnttttgttttgtttagttgttttttgttcaggttttgttcaangtccaatacagtcatggnnaatcnggggctagggggcctttataaaggngggtgggnttgggggcccttggggactgggcggtcttattttgggctagcatgttttagtcaaaggngtggggttnatcaaatatcaattaggggttgctggggtgcgcactcatgccaaatggcaactaacatgctatttcctactatgatggctctttggtttggggcagatggctttggaggatattgctagctatnccatgggttttgctcttctgcttctgctctctanagcggaatcttattttttcacataagcggctcatggaatcgaatgttaattaaagaaaagatagggtaagtacaactaggggaaagacagtacctctaattacataggaaatccatgaaagaattaatcatcataagagaagaatcatttttccagtagccccactaccatgaatgatattttcatgagcctcggccaccttctccaatggatattgagaacctatcacaggtttcaaccagccaatttccattccagcttgaagggntgctgcatattgctgaaattcctcct

SEQ ID NO: 641843 - DNA, 196 bp, Homo sapiens
cgtggatcgcttctatagggtgatagattggtccacttgggtgtgaggagttcagttcatatgtttgggatttaaataggtagtgggtgttagagctatgaacgctttcttacaattggtggctgctatttagagcctactcatgggtgttaaatttatttactactcatctacaacggtttatatcctagatgtc

SEQ ID NO: 641844 - DNA, 126 bp, Homo sapiens
aaatttatcacccctctttctaggataaacacatggtgaatgctgctgcgggggcagatgtacaaactcttgcttggtggccatttgggctatcagaccatttgaatgcctgagagcatgtttaat

SEQ ID NO: 641845 - DNA, 113 bp, Homo sapiens
tattatgtgcgtgtgctacaattagttgggatatctgagtttccctcgtgaagaaatggaaaaagtgttgggtgtcccatcgccgcctccccctccccgatacgggctaccga

SEQ ID NO: 641846 - DNA, 548 bp, Homo sapiens
  misc_feature (494)..(494): n is a, c, g, or t
gacaaggagggtattaatgaccacgattggttgaatgacgatggacgacactgtacacttgccacatgagggagctaatccgtcccgaagccaatactgccgctaaaggtatgatggcacatatacgaacagctaattcttaaagccggcgaatgattgatccaaaaggaagggacgcgtttatttataaggataagacttttgccaggatagaaaatataacctgttcactttcaaaaaagtgagaatgctcacatgtcgactatgacaccaaaagggaatacgctgagtacatactaattggctaaacatcaatgtgctggaacaagtctgtcgaacgattactctatgcttgagaaaatgaggagctttgtgactatgccataaactatgagagtaatatctgatggacccacatctactaacgtggtcgaaaggagtgaatacgctagctattacccttccgagcatgtccgaaacaagacagaggtatngcaactgctggtgccaagattctcgaatcggtgggatccacttagcttagagtg

SEQ ID NO: 641847 - DNA, 577 bp, Homo sapiens
aagtgtacacgatccccatctctaaaaaagaaaaagaaagaaagaaaaaaagggattgggggcagggcagaaagaagacttaacctcagagcctgtctggcttccatcctggtggggttcatgccttccctgccggctgtctgggtcctcccctcctgcccgagctgagaaaggccagctgggtctcctcttctgtgtgactgtttctggcctaggttctttctaacttcaacttcctgtctgtcctctggcctcttcgttctagctgtctaactctccgtggtacactctgctttttgttgttgttgtttgatttcctgttagctgctgcctcccagctgtttccagatgaggttcaacagctctctggggaggaactaagtgcaggggaagttgtggttattttttaccgagtcctgagaagtggcctagggattctgactgtgatccattcctgaactggcagggcttcacctcctgaagggtctttgcccggggctgactttgggtgtggaccagggtgtatgaggacttggatatgagtgtgcccagggcctgctgggtagggaaccgtgca

SEQ ID NO: 641848 - DNA, 102 bp, Homo sapiens
  misc_feature (6)..(6): n is a, c, g, or t
  misc_feature (13)..(13): n is a, c, g, or t
  misc_feature (19)..(19): n is a, c, g, or t
  misc_feature (24)..(24): n is a, c, g, or t
  misc_feature (27)..(27): n is a, c, g, or t
  misc_feature (44)..(44): n is a, c, g, or t
  misc_feature (62)..(62): n is a, c, g, or t
  misc_feature (66)..(66): n is a, c, g, or t
  misc_feature (71)..(72): n is a, c, g, or t
  misc_feature (91)..(91): n is a, c, g, or t
  misc_feature (93)..(93): n is a, c, g, or t
  misc_feature (98)..(98): n is a, c, g, or t
atcccnggccggngtcccnactcngcnttgggatagtgtgagcntcattttgtacacgtgtnactncgtcnngttacaaaccgggtaaacncngtagngtgg

SEQ ID NO: 641849 - DNA, 165 bp, Homo sapiens
gcgcaagtaggtctacaagacgctacttcccctatcatagaagagcttatcacctttcatgatcacgccctcataatcatttcccttatctgccttcctagtcctgtatgcccttttccaaacattaaaaaacaaaacttacctattactaccacttaagacgtt

SEQ ID NO: 641850 - DNA, 881 bp, Homo sapiens
atcccagcatctttggtaggctgaggtggtcgggcagatcacctgatgtatgggagtgtcgagaccagcctgatcaacatggagaaaccccgtctctactacagaatacatagcattagccaggtgtggtggtgcgtggctgtaatccctggtagtctggaggctaattccctttatgtatgtggttccagctaggagtagtggtgctttcacctgccgttaggccaatgtgatggtctcccatctcctgtgcctcgtgatccacccgcctcggtctcagatagtgttgggaacacgggacatcagcgatcggattggtccgaagctgcccagatcgtaactaggccatgccagtagctggagaatccatctggctgacattcaagattcccaaacagtcgtccatgaagtcagacttcaatacgatctgtcccaagtcttcatgcactgagtatgtagtacagatgtggtgcatcggcactcctacttctcaaagggatcctctacatgcaaacacaaacaaaccaacaaccaacacaccatcattcgcgtcccgcccaacctccccaacagcgtactcaccacctacccatcagcgcccggcccacaaggacagacgggcacaccggccctcaagctcgcacaagccgccaccgggcacacaccccgagcagagcaactccaaaagacacatccccgcccggcccacagcccgcaaaccagcaagaagcagaaccccacgcgcatccacagcgaaccaagacatacaaacccgcaagcgctccacccagaaaccaccgacgcacgcaaacagagccacccaccgccaccctccaacacccgacgcaaccatagaaccgaccacacacgacgcaccacca

SEQ ID NO: 641851 - DNA, 650 bp, Homo sapiens
  misc_feature (592)..(592): n is a, c, g, or t
ccaatgccccctcgtgcagtgccagtgggactaaggttttcattcatcaccagcttcctgagattttagtcctaagaaaagcacagggtagttcattccttgaagccagcttcctctatgagttctatacaaagcctcagtagagtgggtcccattagcaaccaagttgaacaacttttatttgctgtctgaatatagatacacctgaattgttgactgcttttgtaactaaacactcctctcctgtcttccaacgagtggtcatttttgtccgcaacttgaccacagcaatccctggggccctagctctactctcaataaagagttatggctgtgtgttttgaatgacaccttaggacccatcctgcctccacctccttctccataaaatagaaacctaactggcacctccaagctctgaaatgctgaaacttaccaactcccttttctccccgctatttcttccttccatggcagggactttcaggttttctttcttttactaacaaggcactaagcatgattttctcatacaaaatcgagagccataaagtggcttaccacagtcctatttcaataaagatgaatactngacatctggcaagtagtgtgtgcctgacagtgtccccaccgtgcttatctcaatccgg

SEQ ID NO: 641852 - DNA, 105 bp, Homo sapiens
aaaaatccttcactgatgtcttcaactttgatcttcatcaacagttacactcaggatttgatgtctcatacatgtcatgagtctcgaaagctactgttcatatct

SEQ ID NO: 641853 - DNA, 324 bp, Homo sapiens
gatccccttagacggtacccaacaccaattctgctaatttattttttgggctcaatcttggctcatcacaacctccgcctcccaggttcaacggattctcccacctcggcttctgaatagccgggattacaggcacctgccaccacgcctggctaatttttgtattttaagtagagaccgggtttcgtcatgttggccaggctggtctaaaactcctgacctcaggtgatctgcccgccttggcctcccaaactactgggattacaggcgtgagccacctcgccccagcctggatgaaggtgttttcaaagccctacctccccc

SEQ ID NO: 641854 - DNA, 257 bp, Homo sapiens
cttgttctgaagccactcgtgccctgtcttggctgtgtgcttagggtcgttgtccttttggaaggtgacccgtctcccccagtccgaggtcctgagcactttctctgttcatctttcccctcgatcctcacagaatgatgctgccaccacgcatccccgtagggatggtattggccaggtaaaaaacagtgcctggtttctcccagaagtgacacttggcattccggccaaatagttaaagcttggcttcaccagag

SEQ ID NO: 641855 - DNA, 347 bp, Homo sapiens
  misc_feature (12)..(13): n is a, c, g, or t
  misc_feature (33)..(34): n is a, c, g, or t
  misc_feature (38)..(38): n is a, c, g, or t
  misc_feature (55)..(55): n is a, c, g, or t
  misc_feature (58)..(58): n is a, c, g, or t
  misc_feature (60)..(60): n is a, c, g, or t
  misc_feature (95)..(95): n is a, c, g, or t
  misc_feature (113)..(113): n is a, c, g, or t
  misc_feature (143)..(143): n is a, c, g, or t
  misc_feature (146)..(147): n is a, c, g, or t
  misc_feature (149)..(149): n is a, c, g, or t
  misc_feature (161)..(161): n is a, c, g, or t
  misc_feature (167)..(167): n is a, c, g, or t
  misc_feature (175)..(175): n is a, c, g, or t
  misc_feature (198)..(198): n is a, c, g, or t
  misc_feature (208)..(208): n is a, c, g, or t
  misc_feature (211)..(211): n is a, c, g, or t
  misc_feature (231)..(231): n is a, c, g, or t
tttttttgaganngggttcactctgtcgcccanngtgntggagtgcagtggcgtnatntnggctcactgcagccccgacctccctcatcctcccntctcagcctcaagtagcnggaccacaggcgggtgcaccatgcccagcnaanntntgtattttttgnagaaanggggtttngccatgttgcccaggctggcctngaactcctgngcncaagtgatccactcgcctcnatttcccaaagtgctagggttacaggcgtgcgaccatgcccagcccagacttccttctcatccaggaaattccaaatgtctttacatacatattcttatattgtgtaataaaagat

SEQ ID NO: 641856 - DNA, 380 bp, Homo sapiens
atgcataaaagggacttcacttaactctattaacatgggtctcacatgggtcatcaccattcagctcttgtataaagtaggccagtatattgcctctcaacttctactagcaaattatcgagagtgctctcattcgctcttcttcatcttgaatgtgacccaaagatccatatcttcatttcatgcatttgaaagactcatcaatgacatccttggcatgagactccttgccatagtcctttcctatgacacatgtgcaaccatccactttacgaggtttcacctcagtgtctacttttcaaaggcctacccagtctcctagtttcgtgctgtcatcaaccttaattaggttgatttggtggtcagcacagagcctggtc

SEQ ID NO: 641857 - DNA, 725 bp, Homo sapiens
taaactgaagggggggtacttggtggcagcgggttctgtcatggctcagcctagtgggcgtccagctgggccatttcctgcactaatagatgcctatatctctcgctgtcaaaaagcacgaagttacaccggtttggagtggaagaggacattgtgtagacacgaagttaacgtggagagtggcctctcagaaactcagcgtgagcgtgcgtgatcgtgcttggagaaaaccgattccgtgccggctgccgagtggagtggaaatgtgcaagtggattttcagctttcttatccatcggccaggggccaagcaggttttatccacctggtgtcttttcccaagaagtgtttcttcaccatcttggttctggcccgcccaaatctgggactctattcacaggtgggatccccaaattcttgggcatggcagggccatgggcctggcggctgacaggcagcctccaaggttacttctccaagggggcccggtgtctttttcgccagaaatatatttattacatagcatttataccatctcctcactctcttagggaatacgtagtattatcggcgtcacaacgcttcattatcctctcgccttacttagtgcctagaagggaattaatacgtaatcgcgtggtccattatagctacgtctcataacccttcaaagacccatttcccttctttagccaatattgggggcctatggccatactaggtcg

SEQ ID NO: 641858 - DNA, 128 bp, Homo sapiens
aacaccacagccattgctgagggccttgggttcgcctgggagccacaaagttttgaccctgatgtattgcaagcgtgcctttgttcactggtacgttggttgaggggattgaggcaggcgaggtttca

SEQ ID NO: 641859 - DNA, 658 bp, Homo sapiens
agggcttatattgtgtggctatccgtgacttcaaacaggcagcagagctctttctcgacactgtttctacgtttacatcgtatgagctcatggattacaagacatttgtgacttacactgtttacgtcagtatgatcgccttagaaaggccggacctcagggaaaaggtcattaaaggggcagagatccttgaagtgttgcacagtcttccagcagttcggcagtatctgttttctctctatgaatgccgttattcagtttttttccaatcattagcaatcgtggaacaggaaatgaaaaaggattggctttttgcgcctcattaccgatactatgtaagagaaatgagaatccatgcgtacagccagctgctggaatcatataggtcattaaccctcggctatatggcagaagcttttggtgtgggtgtggacttcattgaccagtaagtttaagaaatttatgtatctaaactgccttttaatatgtgctttctacattttctgagtttacactgcttccctcagttttaaggaagagaatttctgaactattattttaacagtagcatgtgtccatgtctgccttcctcaggatacagtttccagtgagatgagcaaagcattgcttgagtaattacacaagtttatgtggctac

SEQ ID NO: 641860 - DNA, 282 bp, Homo sapiens
  misc_feature (75)..(76): n is a, c, g, or t
ccaaccgttttcctggggggggggggacccaacttttttccataacccccctgtgaatccccctcccccggggtnngaagatgaataaaaagaatttgggcccccccccgggcccccggggccccccccctggtttgggccgtttctttgcccctgggcccaaaaaaggatttggggccctaagcccccccttttttcttggttccaatgaggggggggaaacgggtctcccccccccttgcttggggcggggggggggtttaataaataccttttccttta

SEQ ID NO: 641861 - DNA, 493 bp, Homo sapiens
ggcggtcgtcggtcccgcgggtctgtctcttgcttcaccagtgtgggacggaacagatccggggactctcttccagacctccgattcgacctccgataggccatctccgtatggcaacctccgggagcatcttctcggccactctcctgctatctgggacctgccgagcagcgaattagtggttagcatccttcttggcaaaacaaagcagtgagctcccagattcgtcagagattattttcacgcggacgatggagggggagaacgatcaatattagtcctgggtcatatataggtgggcgtgcaggaccttccgtaccagggtgagcgctcatctactggcggcttgtcttataaaaagacccgaggattggatgatgggcgtgctggtaagcgaagatgaagcacttatgtgtcttacacgcagaatatcgggtccgaaggcaggagaggggcgaggggcataagagggggttaatcctggaaagaatga

SEQ ID NO: 641862 - DNA, 291 bp, Homo sapiens
  misc_feature (187)..(187): n is a, c, g, or t
tggataaagaggaaattggtttcccaggctggtgatttggggttggtaaacattccaggaggaattaaggagtgtaactatagttaatacttctataaggtggtcttacatttacattttaaagtgcctattggtttaaaacgtgatttattgtttctcttctaaagaggatagtgtgtacgtgggntttcataatctctttgggtttggcttttataaaaaaggcaagagcctatacttggtatttacctaataaaccacgaggtgacatcaacgagtcttttcaaaatt

SEQ ID NO: 641863 - DNA, 1443 bp, Homo sapiens
gcccttttatttttttattgggcaaaaattaagatctcgctattctttcttcgggcgtggcctcaccatgtggaagggatctcccaattttgtgaaaagaaaaacgcatgtggtgacagaccaccaagaaccagggcagacgacagatggtgagtggccgcggaagtgtgcgccccaatggtccaccccgcaccgcgtggcgtgtgcaccgcacgataggagctatcgcgcccaagaataaactcaccgcgacgagcagacaacgaacaaatgcaggagaaacagtctgcacacacaaaacaacgacacgaaaacatgcaacccacacaagaaaaatacaccacacacagtgggaacacaccaacaaagagaaagcacagaagtcctagacatcccagcagcgcgctgatcacacaagagacagagagtacccgcacgccagtactagaacaataccagcggaaccaccacagcacgcagccacaacgccgccgtgcgccgacgacacgccgacgccggcacaacaacggcgaagagcaacaagaggaagaaaaagacagcgtggcatcacacgaaaataagaggcgaagcagaccacgcagagacacacaggagtagtcgaggaagccgaaagaaaacaaacacctacaaagaggaggtggcgcagcagaaggaacaacagaaacaccgacagacggaagacaccgaacgaggcagacaacgacagtcagaaaacaacacaacaacaaagtcgaagaagacaggagacagagacggcgtcagccacaccacaaggaggcacaaagagacaccccacatcacaccatacacccaaccaaacacaccagacgtaacacagaccagaaggagacaatcacgagagacggaccagaagcgaccacaaccagagggacaaacaactagaagacagcacaagcagaacacacgcacacaagatcgacgtgctaacgatacatcgacaaccagaagaggacgtggagaacacgcccgagcaaggggaagcacacacgaccgcagaacacgacagagaagaagaccatccgcgccagacgtaagtagcgaaaccacacaggtcacagagaaaatgggaataaaacagagacgcaaaggccgacaaacagagacacgagccagaagaggaaaaaacgaaaccagggagaacgaaatcgcgctatcacgccgaggctagacaaaagagagacaaagaagcaaggagacgcacaaaagagaggcgaagtaacacaaaagccaagggagaagagaacagagcaggacccagccataagaacacctacaggaaaaacaagagaccgaaagaaaagaatcatacaccagccggagcagaagaccaaacaaaaagcacaccacgactaactagaacacaagatacaaaacaaaaaccaagacaaaaccacgacagag

SEQ ID NO: 641864 - DNA, 944 bp, Homo sapiens
  misc_feature (911)..(911): n is a, c, g, or t
ttttacccatttgtgtaccgggtctgatttctgccttatattatgtttctagtggctttgttttgttttccctttagtcctcgttgttaagccattcgttctgcgcgcgatttctagtgtggtactactagaggagagtttgaccttggaattcacctttttctacctggtgtcacttttccttgcgctcagttatcagactgtcgggtcttttggtactatcatctttggattgcaccgttcaggagtaccacgtccacatgtctctgacaccttaactgtctacttctcattgagtgtaatgtcttctggttctctgatccttaggcagctcctagttctagggcctgtcttccgtgatctgtctgtccagttgactaataccagtgaagatctcggcacatccttaggagatatggccaagtctagttccatttctagggactatgaattttactgggagtatcctccttctgttctgtcattgtgtgccctgattgtggccatctgtacgttaattgcctttttcggaggtctaacaaaagtaaggcggcttcgggtactgggactataatgcacagttctcatatcagctaaatgaagcaatgttggaagagcgagagaggctatgttcttgcggatctgcaagaaatttcataaattacgtggccctgtatatggcagcaggagctcagatacacccatggagtcgttaactgaagttcatctaatattcctgctatacctcctaatctgggaatcttatcaataatgttgtcgctacaaaatgttctcatgcgtggcagcataccatgcaacgagagactgaaacacaaagttcatttctgactgacattcctttctgcaactgacaggtggcacacacaaatatccggtctttgtgcttgctntaagctgggggggtggcttttgttataaaggcc

SEQ ID NO: 641865 - DNA, 635 bp, Homo sapiens
cggagtacgcacagcatattcggagtgaaatacactagcgctccatctcaggcatggcgcgctcgacccacctcccagtgttgtcaaagtacactgggccagagaccccgaaaaacatcccgaagagacaagaggctggagctttggacgtgtaaagcacccagaggacgccggacccgagtacaggataagggtacatcatacaggggagtggcataacactacgatcagtaataatcttgaggtaacgaataacgctccaaggaaggtaaaagtgcacttaaccgctcacacgtcagagcctacttgacaggctaccacgtgacggcccgtagtaaggtggaaaaaagcgctgaagcgcaatctcccggcgattttggacgcagacgaatgcccttcttaagatccgttcgtgctaggaaagcctgtagctacgacgctcgggttacggagccactaagccatcccaaagagcggcgagtacccctatgccgcatcagacgagcgcatgcgcatccgctccaggcatatgacgccaagagctttacgtgaatacgtctcaatcgtcgtaacataccccggtactaatttgaaagtccggaccggaccgcggcacagttcctagcgcccctcgg

SEQ ID NO: 641866 - DNA, 160 bp, Homo sapiens
  misc_feature (85)..(85): n is a, c, g, or t
gtcgactaactaaagagagcctttttgttaaagtaaaattaatcggttactttaagaagttggtccccattgataaatttttttncgcccgcaggttttttagtcgagctaaaaaccatttgtgataataaaatccaacttttaggactatttcaatgat

SEQ ID NO: 641867 - DNA, 654 bp, Homo sapiens
gccgccgcaccactggctggctccctgcgctcggcccgcgctttttcttgggcgccatgggttggtgcctggaccaccaggactggtcctgcacacccatgaagcgactgacccagctggtctgaagcaccccacgaggagccccactgcacccgcgcatctgccactggagggtctcggttgctcttggcctttaaatccctggtgagatggagaaaccgaggcaaggtacctcagaacccaggccagatccacacaaggctctcggtcagtcccagatggaagctccagtcccaggccgtgacatgcatcagctcccacacccaggattgtcccagagaaagcgctctgccctccccgtccacagcaccacgagggccataactgcactgccacacctctccagttccagagacatccctgagaggcagccatcaggggtgcccagctgaggacacgcctccttggggaccctcattcctgagtccatgcctccagattcacgatctcagagacaaccacatccgcaactggcacgtgtccccaccgaaggggctcaagtaagtgactggagtgaccaggtggatgggcctggagtacctgggtctatagcccacgcccggagcaggaaatgggggagacctggggtacctg

SEQ ID NO: 641868 - DNA, 571 bp, Homo sapiens
taatcagctcggtacctaaattaagaaacagctaggagcctgcgtgttcccagacacgcggctggggcatgggcctttacacacgggcctcgtctgggcagtcagtagagttggaaaaggcagaatgagttcatggtgatcctcagtctgatgctgatggccgcccctgccatcactctccgtccctgtactcgaatcctacaagcattggctgctggggtgactgcatgctaaaagtacccatgtgcctcagtttcctcaccagtaaaacaggtcaaatagtacagctgccttacagaatgatggtcagattaagacagtgaactcagggagcaaagaggtaagcattgtacaagtgctggccaggaccctctgaatcattatcatgcttagtaagcatcagaggggtgcaggcctccagcacttattcagcagaaagatcagcacccagccttcacttcctccctgcgcccagcatcatcctatggggcaggcctgggtgggggagctgcgggtccctgaggcaccaggtcacctgactgggccccctctgaggccttctctctccact

SEQ ID NO: 641869 - DNA, 389 bp, Homo sapiens
  misc_feature (44)..(44): n is a, c, g, or t
  misc_feature (75)..(75): n is a, c, g, or t
  misc_feature (187)..(187): n is a, c, g, or t
  misc_feature (196)..(196): n is a, c, g, or t
  misc_feature (199)..(199): n is a, c, g, or t
  misc_feature (213)..(213): n is a, c, g, or t
  misc_feature (256)..(256): n is a, c, g, or t
  misc_feature (274)..(274): n is a, c, g, or t
  misc_feature (297)..(297): n is a, c, g, or t
atagaaaatttcattataatttaatcagagttgactaactgganaaaggtttttccacattcactgcattcatangggcttctcccctgtgtgaatgctctggtgtgctatgagggttgacattctggactgaaggcttattgcacattcagacagcaatatcataagagattctctcacgcgtgtnagtactttnaantacaactaagtatncattctggataaacacttttccacattcagtacatttgtagantatctccccagtaatganttctctaactttttctaaaggcntgcctttcgcggagggctttccctcgttgattagggtcaaaaaatctctctgcaggttgagctttatgaagattataatggaagcatacttt

SEQ ID NO: 641870 - DNA, 390 bp, Homo sapiens
  misc_feature (37)..(37): n is a, c, g, or t
  misc_feature (44)..(44): n is a, c, g, or t
ggggataattcccagtgctttctactggaaaactcanaaccaantctgaaataatgccacatactgtgtgatttgcccttgctgtcccaaccctgttcttgctgccatttaaaaacaatcaggccaggtgtggtggctcatttctgtaatcccagcactttgggaggccaaggtgggtggatcatttgagctctggagttcgagaccagccagggccacatggcaagacctcgtctctgctaaaaattaaaaaaaaaaaaaattagctgggcatggcggtggttcatgcctgtagtcctagcactttgggtgccgaggcgggaggatcgtttgggctcagcagttcaagaccagcctgggcatcatagtgagaccctgtctctatttata

SEQ ID NO: 641871 - DNA, 2284 bp, Homo sapiens
tgttctgttgaattgctatgttcagcgactattcctagggggctggggcgcagcggactcttttcgtaactaagcacttgctctcacttcttgtgctgctgctggagctactaacaggctacaccccttacttgtaaaaaaacataactaactaacctaacaactgacacagaacacaacgtcacgcaccagccactctactctaacacgtgctaacctctgctcctagctacaacttgatcacgtagcaacctacaacaccaggaacaacagacaacaagaacaacacaacaacacaacaaacacagaagacacaaacaacaaagacacaaacaacaccagacaacaacgagagagggggggcggcggcgcgcggccaacaaagatatctatcctcaccctagggagagggcgcgccccattcctctcgcttacacccctgttccaccccgcgcgcacctcttctctgagtgcacacgcacagagagggggtgtacccctatacatcatggagagagcgagcgccagcccgactgatctcgccacgacagacccgaggacgcgccggggccgccgcagagggaagcagtggctcgaccgctccccaccactacacgccgagcttctcatcaagggatcaaacccgccgcggggcacaccaacacagccgaggggcgcggcggaccccgcccgaagaccgcgaccccacaactcctccaccgtgtccgccagcaatccccgagagacggtcccacgaaacagacagcacagcaccatcctcatgatccgcgccggcgagcaccgccagagctcccgacccctacaatccagaggtgcgagagccctcaacacacacacaccactccctccccccccccaccagccacgggcccgtatcaccctcaacgcccaacagccccgacgctacccaccaccaccggcgcgccgcgggcccgagacccataggcatcctacaccgcaccacgcgccgcctgcacaggaccgccccacccggccaccatacgacgcgaccgacacccagaagagacgacgcaggacggaggagaaaacagaaccaacgaaccgcgcacgccaccaccgccccagcacaacccagtcacacaccgccgagtgcatgatcggacagaccgatcgccactgcctcgcgacgtgccggcccacagcctcgaaacgtgacggacgacaagcgctcacccccccccctccgccctgcgccggacgcccacatgcgcacgtgcgaccagtcacctagccaagaggagggacaacgacatagaccagcacatgactgccacaaccgacaagctcacaccaccaccacacccacggtgagaggcggaagcgcactaccgcagaccaggcgccccgcgcacacacacaccacagccgccttgatcaaggcagtcgcgcaggaccgcaggcgggagggcacggtgcgggagagagcgaggcggggcctaggccgggccgacgctcgggcacgtcgcacgacgggagggggagggcgcgcgagaggggccggggcgctcgtcgtccggcggagggcgagtcgggcagtagtgggggcgagacagggcgggggggggcgagcgaggtcggcgaggcggggaggcgccgggaggctggagagacggacggcgggcgggcgagtgggcagtctgctccgaccgaggatccagtgcacgaccaactgtacgctcggagcgacccacagcaggctagtggcgcctccgacgcgcacctgcgcggcgcgaacacgagcaccttcggcgcgacgccgcgagagaggcgagcgcgattgacgagaaacgggtcgcgctgtaagagagcggccggctgataaatatgagggagcaggcagaggagggacgacagctggatgcgccgtgagtggacgctgaacatcacgaagctaagtgagcacgagcatcatcagcagagcgtgacagagtaggatgactcaggtagacaggcacaagtacaacacgacgtcgcacagagcctcgcacgagccactagcaccgagaaccgcggacccagagcgcacactccgcagcagcctagcttaggacccacgtagagccacgccacagaccgcgactccgggcggcgagcacagcagaacgcgtgcagcgccaacaccaactgacgcccgcacgccacacatcacagacgacgaacacacacgccgcccgaagcacgtgaacgctgcacgtgcagctcgagcgcactcacacgtcccagaccgctcctgaatgcatgt

SEQ ID NO: 641872 - DNA, 1183 bp, Homo sapiens
gccgcccttttttgtttttttttcagttacacttttcctgtgtcttaaatattggtggtctttttctgctttggaaatgtgagcctcttcaatttacaaaattaccaaactacactcaaaagaggggtgtaaaaaaagccagccattgtggcacagcatgtggaaaagcccacaagttaaggacagattagcagcagcgaggtgtggcaaaaggtgtgggagggtgacgtgaagcaggtggtttacaaatgtgttcacaggaagcttaaaattatccaacaggtttggtgcccataatgtgttagcacaggtttaaacatagttatacataccttggcatagggtggccctcgaggggtgtttcagaatttcttagcgcagaaattacaattttctttccagttataagaagtttcttgggacttgtgcaccgattcacagccagtgggtgtgaagggttacgtggaaccgaatcttgggtagagattttctcaaaaagggcgtgtcgttagaaccgtggatagaagtgtattggagaagaattctcgagggagcttctaacatttcaggtggacaggcggtgttaagtgggggggttcaccggagcgtggaatacgataagttgcggccaagaactccaaagtgccatttaggtagagctctcagggaattgggtaacagcattgtccgtggccttccaaatttcctctggggcaaatagtataaaacattgggtggctcttggccaacttggctgggaacaccggtgtcaggcatttacactgaccattcctttaatctgagacctgaagtcccaattctcattgcggaaatatacccttcctgttcgccaacggaaaacaccgggcggcccaatttgcgacccttctcacacaaaaggcgctttagggggaccacacgcgcccctacatagcaacaagcacgcgcgagtggggggtctacaaagcacccaggggggagaatcacaagggagcacactcaatgaagggggcgccggaaaataatacgagagagggaaaaaaactccggtgggaaccaagaaagcagcagtggtcaagcaaatagtgggaaccacacaaatgttaaccgacggcgagaacacagtgcgaccacaccagggacagaccacaacaaacgcggggaaagtagaagacaacaccag

SEQ ID NO: 641873 - DNA, 854 bp, Homo sapiens
taattttgggaatgaagtctcactcttgtcccccaggctggagtgtgatggtgcaatctcggttcactgcaacatccgcctccgtgggttcaagtaattctcctgcctcggccgcctgagtagatgggattataagcaccagccaccatgcccaactaattttttttattttttaatttttagtagagacagggtttcactttgttggccaggctgctctagaagtcctgacctcaggtgatccacccatttcaccctcccaaagtgctgggattacaggcaatgatctaccacgccaagccctgatgattgtattactgtagggccagtgctgatatctgcttatatcattttaatggtgtctattcattcttctctctttcttttattaatctagctagtggtctatctcatttatttaattttttttaaacagctcctggatatatcgatttttcgaagggtttaggtgtctctatctcctatggttccatctgatccgggtaataggctccagcgaggctaggggtaagaaaggaccctgggtcacactatgcctttaagttgtgatgtccgcgaagccacttgaaatcttccagcctgtgggaagggggatatcaagcgctatatttcccccttaagacatacttaagtgatttccaagaattcgcataatgctccgggtccctgggctcaagaacttttattgtgactatattattacccgaactatcggactttataaattccgcgcggtgtgcgtaggacggacaccgcgccatcatgagcgggcgcgaaagtgatgtcgtcaatcataagcgtccaattatcatagtacggtcaagtagtgtgct

SEQ ID NO: 641874 - DNA, 464 bp, Homo sapiens
  misc_feature (8)..(8): n is a, c, g, or t
gaaatcgngccaagttattcagtagggggtactatacaattaagaagtgagaaagtacagactactcagaggatcacctgtctaagattgctcaaagagctgtcattgggagagaggtctctctcgcaactccaagtgctcggaggcagaagagttgggaaacgtggcagccacatcagaaaaatggcagctcctggaagcatcagcccaaacccctagagagggaggtaaaaaggctgggaggaagctcagagcaagggcagttatcacttgagggctgagggaaccgactggtagaggacaaagcctgcttctcaggagagaggcttttctccggcaacactcccaaggaaggagtgatctatagatttgggtgggctcagttttacctcaccaaggtaactcactccatagttcagagaggatagggataaagaaatggactcctgacaggacaggtctga

SEQ ID NO: 641875 - DNA, 247 bp, Homo sapiens
  misc_feature (84)..(84): n is a, c, g, or t
  misc_feature (90)..(91): n is a, c, g, or t
  misc_feature (99)..(100): n is a, c, g, or t
  misc_feature (103)..(103): n is a, c, g, or t
  misc_feature (112)..(112): n is a, c, g, or t
  misc_feature (121)..(124): n is a, c, g, or t
  misc_feature (151)..(151): n is a, c, g, or t
  misc_feature (160)..(160): n is a, c, g, or t
  misc_feature (175)..(175): n is a, c, g, or t
  misc_feature (177)..(181): n is a, c, g, or t
  misc_feature (184)..(187): n is a, c, g, or t
  misc_feature (192)..(192): n is a, c, g, or t
  misc_feature (197)..(197): n is a, c, g, or t
  misc_feature (200)..(201): n is a, c, g, or t
  misc_feature (203)..(205): n is a, c, g, or t
  misc_feature (207)..(207): n is a, c, g, or t
  misc_feature (228)..(228): n is a, c, g, or t
  misc_feature (231)..(231): n is a, c, g, or t
  misc_feature (236)..(236): n is a, c, g, or t
  misc_feature (243)..(243): n is a, c, g, or t
  misc_feature (246)..(246): n is a, c, g, or t
ggcggcggcagcgagcggcggcgggcgtccggcggctcctcctcctcctttggtggcggcggcggcccgggaccgagacccggncccggnncccctctnngcnaccccgcgngcgcccaannnnggggcgctgcggggaacatgtggctcnggtttccgnaggccggcgagtgantnnnnnccnnnnatcgncttanaanntnnnancgctggcccggccgcaaatantanctagntaatacnaanc

SEQ ID NO: 641876 - DNA, 240 bp, Homo sapiens
aatgctccaacaagatttcctagtgtccaagagctgttctctttggactaacagttaaattacaatgggattagagggtctgtgggcaattaaagttgactatgatctatcttggacaccagctatcacaggctcggtaggtttgtcgctctacctataattcttcccactaattttgctaattagaaggggtgttgctctttaggctgttcttaggtagctcgtcttgttggggagccg

SEQ ID NO: 641877 - DNA, 713 bp, Homo sapiens
ctcctagtgtttctttgtggtctgtgtcaccgtatctcaggaagtcagccacttgactggcacacacccctccggacatccagcgtgacggagcccacactgccaccttgtggccgcctgagaccctcgggcccccgtgtcgcggcacctctggcccttgatggaatgacatcattcatcctcttcaggtgtatcaaaaggacggagctgcgggcgacagagactcagatgaggacagagtggtttccaatgtgttcaatagattatagtgagcacgaacatgcaaggggctgcatgacctaccaggacagaactttaccctcagttacagcgctgaatcacacgtccgcattggtgactcacttcaatgtgtaatttccggcctgcctgtgtgtgaaccagctaggacccaagtaaccggggggggtcgagcatgacgaagaagacacgtgcagatcagcgattcaccactaaccctttcgatacaatacttatccttggacaaaccctacccagccaaagcggtcagcgcacacaaagattgcgcttgtacatagcaccacagagggaaaggcacacggccggtcaggattagatttgaagccccaagacgttatcataaccacgacctgagcgcccaactaccagcgatccaccggctctttcgcaaccctatcagtactacatagaactatacattaacttctcatatc

SEQ ID NO: 641878 - DNA, 1301 bp, Homo sapiens
tggtgtttatttttggttaggttggttgggtttttcctcttcatctgtgctatagagttccctctacttagtgtaaattatgtgtgcaaatagccaggccttcattgaactgtggggggctgtgttcccatttgtgcaggggttcctcacgttcacttcagtatagggggcaaattgcggcgtgtagccacctgcggtataaactctcgccacagggccaactctccaatagcataggggcagggcgcaagggcatgtggataggggctcggctgtgtgtgttacaccctgtgccataaccggtcacgtggtaagcggttgtgcaggggtttgcagacagcgggtggtgtgcggttgtgcagatacgcgggcgtggtgcattactcgtgataggcgtgcattattccaccaatagaaggctcagcaccggtaaaactccgtccgtggttaaaccaacaccgtggattaggcggggggatttgcgcttgttggagaggttcaccgcttcgggactgtgcaccattattacgtggtccgcgccttctgtgccccttcaagtgtgggcctccctctgtggaaacgcgggttgcccggtgggtggctttgcaagtaggggtcacaggcggaacgccaaggaactaacaggggagactgggattaacggggacctgtaccgtcggttggatacccccttcttcctgaataggcgcgcacttggctcgcactccatgggcctaggggacaccattttgcctcggaaaaggcgtggcgatggcatgcataataaactcccgggaccaatattacaggttccaaccttacgtggcgccataatttccaacgacatttggcttattggggtggaaccaaatcgttctaatgggcgcataaccggttgctgggtcggctttattacacccccgcaatttacaggggccctctttaccaggggggccccgggggtaaatatcattccccgatgggcccgtgtgttgtggaatatggcagcagtatatttcttgtggcacgagtttctgaaagccccgagaattcccattagagaggacccgtgttatgttacaagcagagaatatcatccacacgtccagtgacgggtttggcgactcacccaacaacatatgttcggggcgaggatgagtgtcctgcaagcgggcaggaacacttattaatacagtacccgaccgagaggaagatatctactcgtacatatacacaatgcgaggctggtgagagaggaaggcagctcgtgtaccctatccgagaactaaataggttcggga

SEQ ID NO: 641879 - DNA, 221 bp, Homo sapiens
ccggctgcacaaggatgcctggaaactcaagtgcggactgatcgaccttgttgttggcccgtctgccccccaaaggagtatgacgatgagctgaccctacttctgaagttccaaaaggggaaaccaaattcaccgttaggaaacagtgagctccggcccccacctcgtgaacacaaagcctcggatcagccttgagagaggccacactacacacaccagat

SEQ ID NO: 641880 - DNA, 213 bp, Homo sapiens
tctttttttattaatacctaccttaattctactgtgatcagagaacacattctgttgggtggatcacttgaggtcaggagttcgagactcagcctagccaacatggtgaaactccgcctctactaaaaatacaaaaattagctgggcatagtggtgggtgcctgtaatcccaactacttgggaggctgaggcagaggaatcgtttgaacctgg

SEQ ID NO: 641881 - DNA, 140 bp, Homo sapiens
acggggtatggacggaaggcagatcatcaaacccagggaggaaccccaactggcggaggagaaggtgcttgaaagctctacaagaagcatgacactggcttaacgaccatgtgaccggatccctctaatgagtctcaagg

SEQ ID NO: 641882 - DNA, 107 bp, Homo sapiens
ctggttggacagtgggtgcagccacagagggtgagccaaagcagggcgtggcgtcgcttaacccggaagcccaagggtcaagggatttcctttcctggcaaaggaag

SEQ ID NO: 641883 - DNA, 301 bp, Homo sapiens
cctttcggcgcgagccgcccggctacttgctgtattttagtagacaaggggtttcaccatgttggccaggctggtctcgaactcctgacctccggtgacctgcccgtctcagcctcccaaagtgctgggatgacaggcgtgagccaccgcgcctggcaggacttccttcttgtgagcaggtagcgggtgtttgaaggtgtgttccgcaccttctcatctgttactgagcgctgtgaggcttgacttaggccttgttatagaaaagcctcccgtaagctttgggtgccaataccttcaccgt

SEQ ID NO: 641884 - DNA, 341 bp, Homo sapiens
  misc_feature (59)..(59): n is a, c, g, or t
  misc_feature (61)..(61): n is a, c, g, or t
  misc_feature (145)..(145): n is a, c, g, or t
  misc_feature (181)..(181): n is a, c, g, or t
  misc_feature (187)..(187): n is a, c, g, or t
  misc_feature (194)..(194): n is a, c, g, or t
  misc_feature (204)..(204): n is a, c, g, or t
  misc_feature (302)..(302): n is a, c, g, or t
  misc_feature (308)..(308): n is a, c, g, or t
  misc_feature (336)..(336): n is a, c, g, or t
gagcgaccacgagatcgatcggctggagctgcagaacgggcgctgctgcggagagcaantnacagcatgctggcgacctggaggcggcgcacggcagcgaggccacgctggagctgctgggacgcgtgctccggacatggacctnctgggctgcctggaggacatcgaggaggcgctttgngccccnccactanccgcccgcgnccagtcttctcagatgaggctgcgccctgcggcagcttcttaaggaccgtcctgcgagatcgccttccaaccccacttttttcttgggaaaggagggntccttncaggggcaagcaggagttagcagccgcntattt

SEQ ID NO: 641885 - DNA, 882 bp, Homo sapiens
  misc_feature (25)..(25): n is a, c, g, or t
  misc_feature (120)..(120): n is a, c, g, or t
  misc_feature (132)..(132): n is a, c, g, or t
  misc_feature (136)..(136): n is a, c, g, or t
  misc_feature (180)..(180): n is a, c, g, or t
  misc_feature (183)..(185): n is a, c, g, or t
  misc_feature (199)..(199): n is a, c, g, or t
  misc_feature (232)..(232): n is a, c, g, or t
  misc_feature (303)..(303): n is a, c, g, or t
  misc_feature (312)..(312): n is a, c, g, or t
  misc_feature (324)..(324): n is a, c, g, or t
  misc_feature (338)..(338): n is a, c, g, or t
  misc_feature (340)..(340): n is a, c, g, or t
  misc_feature (420)..(420): n is a, c, g, or t
  misc_feature (474)..(474): n is a, c, g, or t
  misc_feature (539)..(539): n is a, c, g, or t
  misc_feature (542)..(542): n is a, c, g, or t
  misc_feature (552)..(553): n is a, c, g, or t
  misc_feature (647)..(647): n is a, c, g, or t
  misc_feature (650)..(650): n is a, c, g, or t
  misc_feature (652)..(652): n is a, c, g, or t
  misc_feature (654)..(654): n is a, c, g, or t
  misc_feature (659)..(659): n is a, c, g, or t
  misc_feature (669)..(669): n is a, c, g, or t
  misc_feature (672)..(673): n is a, c, g, or t
  misc_feature (683)..(683): n is a, c, g, or t
  misc_feature (691)..(692): n is a, c, g, or t
  misc_feature (697)..(697): n is a, c, g, or t
  misc_feature (718)..(718): n is a, c, g, or t
  misc_feature (721)..(721): n is a, c, g, or t
  misc_feature (733)..(733): n is a, c, g, or t
  misc_feature (750)..(750): n is a, c, g, or t
  misc_feature (752)..(752): n is a, c, g, or t
  misc_feature (759)..(759): n is a, c, g, or t
  misc_feature (762)..(762): n is a, c, g, or t
  misc_feature (876)..(876): n is a, c, g, or t
attggcattacacttgtaaaaggcnaaatggacacaagcccttctgagggtctattgtgaagtgcttgggggcaagtggcctcaaagaaacttgggagtgagaggtttgcactgagcttnggaagggatccntggnaaaacaccacacttttgaaatcagaaaaaaaaaaaagcaagtgntgnnntttacagcccaggncgacttcctgctggtttaggtcagaaaaaaacntgagagagattcctaaaacaatgagggctgtaaggggactggtggaaaaaatccagtggaaatattttctnaggaaaggnaggagcaaagtnatggtaagttaaantntggtaccctaatgtagtagtaaatttaaggcctgtcgaggaaattttaacacttccaacaggtgactaatattcaagganggaaaaaccaagtgcttcctgcttcaccttctgctgcttttgggacttttctanagctagtatgctaaggacaagaccctgaacccattttttcactgggagaggaaaaccaccaggcntcncagctatggnntggcaactctggagttcctatggcttccatcagggctccaggccctgataagtggcctcaggcaggaggagatcgggagcggatgggagagcgnagnangnaaggnggaaaagggncanncccaaacacngttggcgnntaatnatttaaggaactggatcgtanttntgcattgctgcngttggtggctctcggangnctccagncgncttttcaggtcttgcaccggctctggtaacggcggtccgcatcatcacggctccgcgcagctggctcaattccgttttggttctctcagctgggctcaaggtcaagaatttttnttggct

SEQ ID NO: 641886 - DNA, 381 bp, Homo sapiens
cctggttcccccctgccccctgccagggttcctttttccttaatatgggaaaagggtaaatcccctccccgccccccgctgtttttaaaaagcaggtttcctggtttcttataaagaggccaagccaaaagggggttccttttttccctccttaaggaattaatcccaaagctttcccaaggctgggttctccccccccgggaatgtttggggaatttctttgtggaaaagggactttttgttttgctttaacccctcccgtttttttagggtttctcgtttctttttggggcagggctttgtggcaaaaggctggtctggatttcccccctttgccgcccctttttttttgcctgtttaataaaacccttttccctgtta

SEQ ID NO: 641887 - DNA, 279 bp, Homo sapiens
aaggtaggggaagacccaaccatcctgttctgacttctagcaattactactgccctcagtcatgaagggctccctatcctcccatcctatggtcccattgtgcatgcaatgagagatgggaaggaccgagagaaatggacgacaatttggttgccaggtagaaagcaatctctgctctgcatagctaatttggccctggccatgactacaagcaaaaagttggttgcagattgctgggccaagtgtgctgtggtatgaagtggatactcagtaggcatt

SEQ ID NO: 641888 - DNA, 108 bp, Homo sapiens
tcagatgccccttttcattatgaaactctttttaaaccttaaattaaagttcaggggtatgtgtgcagattggtaacataggtaaactggtgccatggggccagcggg

SEQ ID NO: 641889 - DNA, 766 bp, Homo sapiens
  misc_feature (339)..(339): n is a, c, g, or t
gctacacttattgcaggtgtcttaggagagaaaaaaatggtagaaaaatggagaaagcatgaataagaagagggccaggaccctagttgtgtgccacgagccatagtcacagtggccaaagcgccctataccacccagtgcctggacaaatggtagtggctctgtggtggagtgaatcctagtgtgcctggtgtgcctctagactcaatgtcgtgctgggccttgcaaatgtgtgctgtgtgtgatgtgtgtgcacgtgtgtgctccttgctccattaatggtagagatgtgtcttgtgatggactttgctgtgtgtgatgtgtgaaatgtgcacatangtggatgagacagatgtgtgtgcactgttctttgtgccgccttgtgtcctcgtgatgctgtgcctcccaatgtgtgcacatgctcccatgctcccacactgccctcaatatgtgagaaatgcttatgcgtgggacatgtgcaccctggaattctagaaagaagaacacctgacatgatgatgtgggtctggcgcatggggtgctcgctcgagttgtgtccactgccttccactctccctttctccagcctcctcagtcccaagaatttgtgaggagaagctgtcccaggaacctgttggccacatgccatcccgtcatgttgtgactcccaggcatgtcaccctgttatctgtggcagatgagattgcccacacgctcaaactctggagtccagacatgcagtaagtcgccgagcaggaatataggg

SEQ ID NO: 641890 - DNA, 195 bp, Homo sapiens
gggaaaagtttaaaaaaagtaaaaaaataaaatcagctgagcatggtgacatgcacctgtggtaccagctactttggaggctaagttgagaggcagtgatgggaggatcatttgacggcccagaggttgaggctgcagtgagctgtgtttgtgtcattgcactccagcctgggtaacagagtaaaaccgtctgtc

SEQ ID NO: 641891 - DNA, 795 bp, Homo sapiens
catgtgccagggaacatccatttataaaaccatcagacctcatgagacttattcactaccatgagaacagcatgggggaaactgcctccatgattcagttatctccacctggccccacccttgacacatgggaattgttacaattcaagatgagatttgggtggggacagagccaaaccatataattcttccccggcccctcccaaatctcgatgtcctcgatatttacagaagcaatcgtgccttccccttaagtcccccaaactcttatttcagcattaactcagaattccatagtccatagtctcatctgagacaaggcaagtcccttccacctgtgagcctgtaagaccaaaagcaagttagttattttctagatacacagggatacaggcattgggtaaatacactcgtttcaaatgggagaaattggccaaagtcgaagagagctacaggccccatgcaagtccaaaatcgccagcaggcaaatcttagagctccaaaatgacctcctttgactccatgtgtcactatctaggtgatgccagaagttgggttcccagggtcttgggcagtcccgaccctgtggctttgcagggtacggtccccccttactggactgcattgagtgtctgcagctttccaggcacacagtgcaagctgtcagtggatctaccatctggggtctggaggatgctggccctttgtgacagtctgcttggcaataccaccatgggactcttgtgtgtgggtcaacacatatttcctttgcacctgtcctagctcgcggtctcg

SEQ ID NO: 641892 - DNA, 390 bp, Homo sapiens
tgggggttctacagagacgttggctgtcagggagtgtttatttcgcgtccgattctgtttctccgggcccctgtgctgccccgacttacatactccgccagaaccggccttagtctctccgcgcagaagtttcccggagccatgcgcgagtactcctacgggaagtctaccaagcttgtgctcaagggaaccaagacgaagagtaagaagaaaaagagcaaggataagaaaagagagacgaagatgacgaaacccagcttgatattgctggaatctgcgggacgagaacaaactctggtgaaatttcaggaaccatagccattgaaacggagaagggaacctatctacatgcactcgagaacggcctttttaccctgggaagctccaccg

SEQ ID NO: 641893 - DNA, 296 bp, Homo sapiens
ggcctgaatgtttgtgtcccccaaaaattggtatattgaactttcatccctaaggtcaacagtttagggaagcgattaggtcctggggattctgccctcttgcatagaattagtggttttattaaaagaggcccgagggggtttttttgcccctcctgccatgtggggacacagttagaagttcccatttgtgaaccgggaagcccccctccccagacattgaatttgttggagccccctttttggacttcccagcctccagagttgtgagaaataaatgcctgttgtttaagtta

SEQ ID NO: 641894 - DNA, 205 bp, Homo sapiens
  misc_feature (1)..(3): n is a, c, g, or t
  misc_feature (10)..(12): n is a, c, g, or t
  misc_feature (14)..(14): n is a, c, g, or t
  misc_feature (58)..(58): n is a, c, g, or t
  misc_feature (86)..(86): n is a, c, g, or t
  misc_feature (93)..(93): n is a, c, g, or t
  misc_feature (101)..(102): n is a, c, g, or t
  misc_feature (113)..(113): n is a, c, g, or t
  misc_feature (120)..(120): n is a, c, g, or t
  misc_feature (124)..(124): n is a, c, g, or t
  misc_feature (126)..(126): n is a, c, g, or t
  misc_feature (135)..(135): n is a, c, g, or t
  misc_feature (152)..(152): n is a, c, g, or t
  misc_feature (189)..(189): n is a, c, g, or t
  misc_feature (193)..(193): n is a, c, g, or t
nnnttaaccnnntnaacaacaacctatttagctgttccccaaccttttcctccgaccnctaacaaccccctcctaatactaactanctgactnctaccccnnacaatcatggnaagccancggnanttatccagnggaaccactatcacagnaaaaaactctacctctctatactaatcttcctaccanatcntccttatttata

SEQ ID NO: 641895 - DNA, 232 bp, Homo sapiens
ggctagtacaggatccggtgagcattcgggaagaggggccgaacacctgatcatcttcgccttttttatccagtcctggtcaaagagcaattttttcagaaagatgttgtgacaaataaaaagacaacatgttcggccgcagaattacttacgtgggtatctggacgattgcagttcagacccgcgtcctcggtggtgtccggacactttattcgatgatccgaagaacaat

SEQ ID NO: 641896 - DNA, 91 bp, Homo sapiens
ctactactactaaattcccggcacgtcgacggcagatgttggtgctggcaaaaagtgagctggagattggatcacagccgaagagctaaag

SEQ ID NO: 641897 - DNA, 313 bp, Homo sapiens
ggcgctgattgccgtctcttcggaaacagaagaagagcgcacctttacctttcgtcagctgcatgacgaagtgaacgcggtggcctcaatgttgcgttcattgggtgtgcagcgcggcgatcgggtgctggtgtatatgccgatgattgccgaagcgcatattactctgctggcctgcagcgcattggcgctattcactcggtggtgtttggtggatttgcctgcacagcgtggcggcgcgaattgatgacgctaaaccggtgctgattgtactcgctgatgccggagcgcgcggtggcaaaatcattcccta

SEQ ID NO: 641898 - DNA, 268 bp, Homo sapiens
tgcctgaccacactcactgcagatctgttcctaggcattaagctccttcttcctttgccattcggtcttacttcagtggtcccatggcatgctttctatctcctccatggtctggaagcggccatggccaaaacttggagcgtggtgtcaatagaactctaaggtcaatcttactccagatgcctgccgcttcgtactgcaccagccaaggacttgcgggagggtgagcaccccgtttcttggttcccaccaaacagacctttcagca

SEQ ID NO: 641899 - DNA, 158 bp, Homo sapiens
acagtcaactaagctccagccagtatactgaagccaacaggcaggggcctggcaggttataggcagaacggaggacaccgccaagagaccacggccagaaagccgaactaatttccccattaaccaccccgcccttaaggcttaacgacatcctctat

SEQ ID NO: 641900 - DNA, 140 bp, Homo sapiens
catccaccttcagcagggaggcagcccaacaacctggggagaagagctgggggcagtgaatggtagtctgggactggcatctctcggttacttctgaggatccagctccaggagggggaggtgacactttcagatagtaa

SEQ ID NO: 641901 - DNA, 126 bp, Homo sapiens
ggctcggtaccctcacaagacctgcttctaacctccctgttcttaaattcgaacagcatacccccgattccgctgcaaaccagtaactgcacaacccgctgcaaaccagtatctgcgaaaccagta

SEQ ID NO: 641902 - DNA, 342 bp, Homo sapiens
ccaatctaatttaaaaagacatgcaataacaaatgttggtgaagatgtggagatctgcagtcttatacgctgctgctagtaatataaaatggtacagctgtgttggaaatcattttggcagttcatcaaaaagttaaacattccagcctgggcaacatcatgggaccctgtctctaaaaaaaataaaataattagctgggaatgatggcacacacttgtagtcccagctacttggtaggctgaggtgggaggaccacttgagcctgggaggttgaggctgcagagagccatgattgtaccactgtactcccttggtgacagagtaagaccctgtcctaaaaa

SEQ ID NO: 641903 - DNA, 116 bp, Homo sapiens
cgtggcccttcgtccggcgagagctaggccgaggaccgcgccgcgctccccggcacctcaccgcgtccttcattttacttcccgcgcgcggccgggcggggaagggcgggcggggg

SEQ ID NO: 641904 - DNA, 261 bp, Homo sapiens
taaaacgccgtccacaggaagccttaactatggccacagctgttgcctggctgaaaaacgacctcactatgacgcccaagctgtgatgcagtgggccatcatagcaaactgcagccttgacctcttcggttcaaccgaacctcctgcctcagcctcctcagtagctgggactaaaggcacacatcaccacatctggctaatttgtgtattaatttgtagagacagggtttttccatgttgcccaggctgggctctaactcc

SEQ ID NO: 641905 - DNA, 140 bp, Homo sapiens
gtgtgggctggacccgcctttgtgctccaggggctggccggttttcgggggggccggcttccaccacttgccgccccacccctgcactccgtgacctttgagaacccagctggcccctcgttagccccagggtttgccgt

SEQ ID NO: 641906 - DNA, 608 bp, Homo sapiens
  misc_feature (608)..(608): n is a, c, g, or t
ggcagtggttcatgcctgtaatcccagcactttgggaggctgaggtgggcgtatcacctgaggtcaggagtttgagaccagcctgaccaacatggtgaaacgctgtctctactaaaaatacaaaaaaattttgtggtggtagatgtctgtaatcccagctacttgggaggctgaggtaagaaaatcgcttgaacccaagaggcggaggttgcagtgagccgagatcgcgccattgcactccagcctggttgacaaaagagagacttcgtctcaaaaaaaaaaaaaaaaaaaaaaaaaatttgtggggggcttgggccctgaaaaagtttttaaaccccttcggtgggggcgccgcggggcgcccagtagcggtcagtgtgcaaccttgggtcacacacgctggtccccaaaagggaagatcccgtggcgccagtgagctctaatgtggtggggttttttcccccattttaaaaacacggcccggggggggaagcccgagacgtttctctggacacaatttccgaataggagatcccgagagggcccataaccggggttctctttcccccgggggttccccaagggaatccggttttcaatttcgccgn

SEQ ID NO: 641907 - DNA, 126 bp, Homo sapiens
ccgctggccaatggcatgatgagcatgctccatctctcttagcaggtgtgttgtctttctctaggatcaggaacttgcagtccttgtgccagaaggtcatcgctctgcaccacttgtagttgcagg

SEQ ID NO: 641908 - DNA, 300 bp, Homo sapiens
accgcccccttcccccccctttcagcgcccggcggcgggggcggtttgggcagcttagaccaagaccacggctcgagatcttcgcgggacgaagaaggaggagctgctgaaacagctggacgacctgaaggcggagctgccccagctgcgcgtcgccaaagcgacaggcggcgcggcctccaagctctctaagatccgaggcggccggaaatccattgcccgtgttctcacaggtattaaccagactcagaaagaaaacctcaggaaactctacaagggcaagaagcacaagcccctgga

SEQ ID NO: 641909 - DNA, 897 bp, Homo sapiens
ttctctgctctcagcacatgacgtccgtcgcgtgttcctgactggcgaagccgccagttcgaaccgggcatcgtgggaatggtgaagatgcttaccctagggaaggttgagctcggccaatagcggtaccacactcgcagtccttcctgggataccaagggagtgttatgactcactagttgattaggggagaatgtctgaaaagagccgggattccgataggcttagtcgaaagaatggaatgttggtgtgattgggatggtgagacgaattggtaagaggtagcatgcaagcacacaataggtggtttagtgggctactatgaggtgcgtacaggtggaaatccgatcgatgggtctcctgaaatattcgtaggaatgattttagtgtgatcacatgaaatgagttgacttgcaacgcacgcgaccgtgtctatgaggatattggacgattaaaagtcctatacgtactgtacaggggccattttaccgagatgtatctagctaagcagaatagcgtctaggggcattgagggatgggcgaatgagcttgcaggctggagaaaggccttcggccgaatcctgacagacagtaactgcacctacataccgtggttcgttgctccacacccaggatgatgcctgcctatcatcatgcggcatagaaaaagaagggtcaggctgcattggagatctacggtgaactagagagtgatgtggttcgactacgctaggatatggcctgccatcaggtttgagacaggcggtgcctgagacccatgtgtttggtgctcgcttgaatgatgaggccatcggggtgacccagggcaagggtaacggggtcccaaccgtggggcccagaagttcccgtaaaccacgggctcggcaagggccgatg

SEQ ID NO: 641910 - DNA, 732 bp, Homo sapiens
ggtaaaaggtgtgcaattctgtccatgtgtgactctcaagatcttgtaactttagacagcatatgctcaggtataaaagtgccgggtcagaacgcgtttggctcgccaacccaggacccccgctgccagcctaccttccaccagggaccttttggccatggtcagcggccggtgcgagctgaatttgagcatcagcgatctgcccgggtcgccggtccggggctgggcagcagccgcgcctcctgcaagccgggacccatgcggtgtgcagcagcgtagccagcaagacgcgctgcgggtcagattcggcggcaggccgtctaagcgcatcagcatcacacttctcggtgctgcgggacactagcagcgggcaggacggccgcagacggatggttgtgcacgcgtggcagatagtgcggactgcgcgccgtcgcctcgagctgtagcgggcataggcgaagccgcggttcaggccgctgaaggtcatcatcaggcggaactcgtagaggcggcccacgcgctggaacagggggataagctggtgctcgtacacgtcctgaggtgagcgcccgatgaacacctctgacccagctggcgggggctgccacccagcctgtgggaagagggtatgcaaggacaccgtcaggcgacgctttcgaattctgagccacggacccaccgcgcgggggtgggaggcgagtgaagcaaaggtctgtgaaaggggttaacacg

SEQ ID NO: 641911 - DNA, 1071 bp, Homo sapiens
ggctcggctccatgcgccgccccttccgaggctaaatcggctgcgttcctctcggaacgcgccggaaaaggggtccatggtgacagagtcccgtgttctctcctttgaatccacgtcgccaggaccgccggcctcttgccggccggaaccctgtcacacccggcccactctcactgtgccagggaacttggctacataccgagcacccaatggcccgtaccagatcatcccaggcacgtggaacccctgtgtagcaagcacagacacaggcagctggtactggaccatcctgctcaaccggcaattctgtgggacaccctgtggcaaagggtgccaatccctgaggcctggccagcatgtgctacttcccaactgtgggtggaacgccaatttgggcccaaaagcgctggagatatgcagcgtggtccacactctggagcccaccccggaagcacacacaccccgggcggggcacggacaccccggtgctgaccattcacacataacacgggatccagtgaatgtggcgtggacgatggaaacaccacggtgtgttgaacactgcaaacgcggactgtgttgcaaaaaccccccacatgtggacccactttgggcgcgcgcaggattggcatcaacaatccgcccattcattatgtcagcacagctggacatgaacaccgaacgtatctattacgcaccagcgaaacatggggcgcgtgagatcactgacattatgggtggccagattccccacattttatccgccgaccacacagtagagagggttactacgtttccaacatgcatgtgtttcccacaaactggggagcggccccagtcagcatgggtatccttcggcatgtggaggcgagcatattctacacaacaatgcggggtactacaagagaccactaacaaccagagaggcggcgctacaggttgaggaggactcacccccatcccattaatgtttggcagcgccactggtggaggaaacactcaacatcacttttgatgtcgcactaggcaaagaccatataaccctacaatgctcccaaaacaagggtcggg

SEQ ID NO: 641912 - DNA, 170 bp, Homo sapiens
cccctcagctgcatcatgtgtcttcctccaggtctctgaaaaaggcaggacctctcttagactgtaactaaggagtgagtaggtgatggttacagagttcacttcagaatcctctgttggaccaagtagcgtgcgccatttcttggtctgtagccgagcccccgctgcgg

SEQ ID NO: 641913 - DNA, 671 bp, Homo sapiens
tgggaaagggattctcattttgttgcccaggttgggtatgcaggggtgaaattttgaaatctccgcctcccaggtgtcaagccatttctccgtgcctcagccccgcgggaagcagttgagaatatacaggcacgtgccaccacaccccgtctattttatggtgtattttaagtaaagacgggtgtgtatcacaccagtgttgtggccaggtgtggtctcaaactctgtgacctcaagttgactccaccgtgattgtggcctcccaagagagcgtgggtatatacagggtgtgtgtgagccacccattgcccggcccttctttatccaatttttacctttctgtgagtaagtgttgtgctcagaactttctcccaataagggtcttctggtaaaacacctgtttgtgggaaataatcagctggtggggggatttaaacttcatttggaaaaacagaagtgccacactgtgttatttcctcctggttaaaagccaccacaattagttaccactcagaggtcctcgtaagaaagtgtgctcatattctgggtcccaacccccaattttaattccatttaacactctggtgattccggtgatttctactcgtgttttggggaaactacaacatcaacaacacaagaacacgacacatcccatgatttttttttct

SEQ ID NO: 641914 - DNA, 172 bp, Homo sapiens
  misc_feature (14)..(14): n is a, c, g, or t
  misc_feature (26)..(26): n is a, c, g, or t
  misc_feature (59)..(59): n is a, c, g, or t
  misc_feature (115)..(115): n is a, c, g, or t
gggagcttcggccnccgggggcctcncagcccgccccgtggggccgcccgggtgtggcncagccatgtcccccccccagggccttcattcacccctcccctccccacaggggaantgttgaagtgtggcgagtctgggcccgggacaataaagcttgtgacagggccaggaa

SEQ ID NO: 641915 - DNA, 138 bp, Homo sapiens
  misc_feature (60)..(60): n is a, c, g, or t
agtaagactcctgtctcacaaaaaaaaaaaaaaaaagtgtactggatttttctatcccanaaaacctggcatttcaggggccaaattatttagttgggtttggccggtcagttggccattccactttgttccctgttc

SEQ ID NO: 641916 - DNA, 308 bp, Homo sapiens
tgcaaggagccacacagcaggaggtgagcggtgtcgagtgagggagtgagggaagcttcgtctgtatttacagccactcccctttgctcacattcccgcctgagctccaccttctcagatgagcagcagcattagatgctcataggagaacgcaccctgttgtgaaccgtgcatgtgagggatcgaggttgcgctgtccttatgagaatctaatacctattgatctgtcactttctcccatcacgctcaggtgggaccatccggttgcaggaaaacaagcttaacaacgcccactgattctacattat

SEQ ID NO: 641917 - DNA, 615 bp, Homo sapiens
cgaatatggtgaaacccagtgtctactaaaaatacaaaaattagccaggcgttgtaatctgagctactcaggaggctgaggcaggacaattgcttgaaccccggaagcggaggttgcagtgagccgagatcttgccactgcactccagcctgggcgacagagtgagactctgtctaaaaaacaaacaaacccgttttgtctgttggagacaagagtgcagcggggccatctcggctcactgcaacgtccagctcctgggcccaagcgatcctcccacctcagcctctccagtaactgggataacaggtacgcaccaccaggcccgactaatcttttttggaattttttgtagagatggggtttcgctatgatgccctggctagtcttcaactcctggactcaagtgatctgcccaccctcggcccctaagtgctgggattacaggcctgagctgtgtaatttcatgccgcgtgacacaatccaataggaacaaaccccgcgggtccagcgtttactcacacaagtggactgatggctgataaatcccagcatgagcccaaagagcagccacagaaccatctactaaacaggtggactgatggttgattcccgggg

SEQ ID NO: 641918 - DNA, 118 bp, Homo sapiens
tacaggatgcttagcctccacttggttgccaggtgggtcttaaagtccggggctcaagccatcctcccacctcagcctcccaggtagctgggactacgggcatgagccacaggccttg

SEQ ID NO: 641919 - DNA, 619 bp, Homo sapiens
  misc_feature (261)..(261): n is a, c, g, or t
  misc_feature (588)..(588): n is a, c, g, or t
  misc_feature (619)..(619): n is a, c, g, or t
agatacatatagaatcgagccggtacccatagttttagaagtttcaatagcatggcaaaaagattagaattggctgctttaaatatgtgctgtatggttagaaagtgaaacatattgggcgagattacccatagaaatctaagattgacagttgcagtaaccaaagacaggcaatatcttagcacaatgttgtaaacaatctggtctttaactatcaattcaacctctttgttcagtttcttcagtggttacctccatatngctaaataatgtgcttacccttgtgtgtactaatttatcagctataggcattatctaccagtatttctgaattcagagtttagacattatacactctttgtgatgacagatgaatagctcacttatcgttatcccttccctttccctatttgtctggaaatttgggtagtaatgtgtttatcttcggttcttctattgagtattttttgtcactttaaataatatttaaatctcttatttttttattcccacaatcccaacagtttctcttgtataatctgtttataaggacactactatttctatgatttccttctacctcccaanttatattaaaccttgactttagcatttgtan

SEQ ID NO: 641920 - DNA, 117 bp, Homo sapiens
agacctgacgagaagcgtagaattgctcctatttaaaacgaaaaaatgcaattagggaagagaaccctagatttcactagggaaggtaccataatttccagaatcaaaaattccatc

SEQ ID NO: 641921 - DNA, 529 bp, Homo sapiens
tgttttggggggatagtgatactgacggtcctcccaggagcttccggtgctgggcaccgtgtgcgctgggggaggtgtgtactaagatttgggctcctgggctccgtggccacgggggaggtgtgtcacaagatttgggctctgtgcaccgtgggcttgtgttacgttgtgtcagcaagtgtagttatgagctcaactctcttgtccaccttgtgtgttgctgggcttgtgattcacgttgcatgtttaggtctgggtgtccaagctgctggagtggtcacggtcaccatgctgcttatgtatgtagagtcctgaggactgtacgacagctcgtgaaggtgtgcacgcctctggttagggtgcctgagttccacgactccgtcaccggttctggtaagttctccttgatcaggcagaccagggccgctgtgcccccatatgtgctcttggaggagggtgccttggggaagaccgatgggcccttggtggaggctgaggagacgatgaccagagttccctggccccagtt

SEQ ID NO: 641922 - DNA, 111 bp, Homo sapiens
aaaccttgcaattgcgctggcactccggcagccgctgcgcggtctgctgctgttttatccggtggtaacgcttttacctgatgactatgggacttcgtggcaggagtttgg

SEQ ID NO: 641923 - DNA, 876 bp, Homo sapiens
  misc_feature (506)..(506): n is a, c, g, or t
tttttttttcccaggggggtttgcctttattcctgtttagggcaggtggtcctaaacagcatttcccattaaaagctgaacaaaaaattatcttggtactctcttcttggtgtacatggtctgtttcctgcactgtgccccatcccgcctggaacaaaaagcgggcttccagggtgctggcacccgggagggaggctacgtgtggaacaaccaggcagcacgttgcttgttggcccccaagcagttgtaacttgcccgtggctttggaccacgcacagggtttgcgcccttggtgtgtggccataatttgtggtttgatgtgtccagggtcttcactccggtggctccccgaacctgtgcgccccttgcgggttgcaggaaggcacgccacccgagggtccccgtacagcactgactttgagaaaataagccggggggcgtggggctacacgttgtttctggtgtgctttgcccaggggaatctttgcgcctcctccaaaactcgntctttcacctgggggcaggtgccaaagccccaagccccgacggccacaagcaagccgtaatttcctccgataccttgtgacccagagccaccttgtttatacggggaaaagactgctttctcaaagctccgtgtgtccccagaaccgagtcttccggtcctcccccggggggtgacccagggggctgtctttggcctggggaacagggaaaccccgggcacagtttttccgacggtgttccggccccgggcctcgcaggattgaaggccctatatcgtgtttcccaggagtgggtggaggttcccggttggcgaccatccgggtctgcgggaacccacttatgtgtgtcacccggttcaacccgtaactg

SEQ ID NO: 641924 - DNA, 303 bp, Homo sapiens
gctcgactccaaagacatcttcggagaggtccacatatccgcttgcagattccacaaaaagagagtttcaacactgctctatccataggagggttcaactcggtgagttgaatgcaatcatcacagagaagtttctgagaaggcttctgtctagattttatgcgaagatgtacccgtttcgaacgaaggccacagagtgtccaaatatccacttggagactttacaaacagagtgtttccaaactgctgaatgaaaagaaaagttaaactctgagagttgaacacacacatcacaggtcgacg

SEQ ID NO: 641925 - DNA, 412 bp, Homo sapiens
taataaattcacatataagaccatctgggcctacaccagacatacaggtcagatatcatctggatgacacagctctcaagaacagacaagatagaaacagctgtgactatcaaccccatctgcttctgggcagtacagcaagcctttctcattttctccatcagggaactggctttaattttgagaataatcacaccaacaccgtcttctaacttcactgctgcacaaggggcaacaacctcaactaaagagtccaaccacgaccggacgcattctcatctggtgggggcagcaaaccttcttatgaggccatatacgtgaaagctcaactccctcaggcctcacctccgcatcaaagaccagcccaggagaacctgccgcatctagcaacagaactgtggcaccttctgga

SEQ ID NO: 641926 - DNA, 272 bp, Homo sapiens
atcccctgtgtgccccagaaccttgcagctcccattctactttctgactctatgaatttgaatgctcagatattgaagctccccctgtgctgacaaaaccaccctgctcccctgcctaccgcaagcttgtccttcttctccacctacgaggctgctctctaattgcggaagattgaaggaggagccggcatgtcacttgtttgagaacgagggagaacagggagacggggggttcttgggtggcacaaagggttcttgggggcacacaaggt

SEQ ID NO: 641927 - DNA, 148 bp, Homo sapiens
actctagagcataaacggctctgccaaagaatacactctttagagaaatgcacttagaaaagtaccatcataagcattctatcaatatttgagaattccctgctggtccagtggttgggatttggcactttcacttccggggcatagg

SEQ ID NO: 641928 - DNA, 1882 bp, Homo sapiens
ataaagaacattaaaaaagaacaagaaagaataaaaaagaacacaaaaaaataaaagggagcggacccactcacaggaattattccaacggaagacaacgccataagatactacacgcgcgaagccaccacgataaacgcgaggcaagcaaaggcgggcacccgcgcacagctcgcgcggcgcgcgttatctacttaaccgcactacgactgagtgcagcgagcacgcgattttcaagtacacgcgccgcaagaagccctgtggggtgacagacagaccgcgtgagagagactttagtgagggcgcacctcttctagtgagggcgagcaagtagctcactccctatctcaagtactgtagtgcatcgtgaggccgagtgtgcagccacatcattatattctgtaggaaacaaaaccaaaccctaacccgctcacaccctaccgacaccaaccattctaataccacgcggcctcatctaatcaacgccgtctactaacctattctcaagaccacgaataagctctgataccccacgagtcgtgtcgtaccatcatctacgctcgcgcgcggtgagcacacacatgatatctgagccgtgacgacgtacccatagttggcgacgaaaggcgacgagccgacgagatggagaaagaaaagaagtcgtctacgcacgcgccgtcctcatcaccgcgagcgcaagagccatataattagtcatactaatattagtcctagtcaacaccactacgcagtctcgtactgatctcgaccgcgcgccgagcagagcaaccgactaaagaggcggccggacgagaatcaacacgaagaggagagaagagacgcccagacgacgcgccgcacgcagccagcgccgcaggaaagaacacacccccacaggcccaacgaccacacgcacaggaaggacgcataccgcgaaacgcaccacgcacacccatacagaccctacaacaagacgtacccaccactccccagccggagcgagcagcacagcgagaccatcctgaaatagcagcacatcagaagccagcaactcagactatccgtacgacccgaccaccgaacggcgtgcacacagagcagcacagcagcgcacgaaccacaagcccgcccacggccgcacacgagcgcgtccatagcagcgcctacgagagagcggagcacgacgcggcccgcacaaccagaggccccacccacggatagcgacggcgcagggctcgagatcgaagcaggacgaacagagcgagcccgtaccggcgcgagccagcaagcggcgcgcgcgaccgcaacagcaggagcgcgaggcgaggcgagggcaggcgtcagccgagagtcctgcagccacgccgccccggccctaccgcggctcctcccgagcacgccacagctcccgccacgccgcacacagccacacgagagaagacacacagacagcacgtagagatcacggaaagcagacgagtcgaagcacgccgttcgcggcgtcgagcctgtcagcgacatagccgtggccaaaacgatggcacatcacgacggcggcagcaggaatggcagagcgtcgatgcgccagcgaatcggaggggcgcagacatatcgagagaagagatacgcgtaatgccagacccctgtcactcgccagcggacatcgcggagagagcctcgaccgagagcagagcgataggtcgacgggacgcaggtgccatcaagagacgagcatgctgagaggacgaggagcacagagcgacagcgcaactcatatgagcagcaggcagacgaagttcgacatagccgagagatcagcgagcgagcgcagtcccatcagcatatcgcagacgcgcacaccgtcagaatcagcacgccgctc

SEQ ID NO: 641929 - DNA, 654 bp, Homo sapiens
catccaatcctggctctggggaggcacgcctggcggcggggctggggccactgaggaaatccatccgcgccgccgcgccgcgccgccgccgcgccgcctccgccgcggagaagcacagcgccgcccgtgcacgcacagcgacaacccgacgcacagatccaccgacacaggcctcgggaccagcggacctaggagctgcctccccagaagcggagggtatgagtccggcaggaatgtggtacaggaaacgacgcggacaaacacaggatacaaacgagaaaatcataacgagggaaaagaagagaggagagccgagacgacagaagctccgtaacgaaaagatgtttacaaaaggaagttcatcatatacagaaaccaccgagtcaatacgaagaggaccccggagacacagggcagaggagcgtaagcaaaacgaccccgaagggagaactatggaagcaaccaaaagaaagccgagaaagccatacagacgacaccccgcaagagaaagcatgacaaggcgcaacgaggaagcaaagcaaacccagggagaaagaccacagaaaataccgagtgacatggaagacatcagacagacagatagaccagcaaaagaggagcaccggcaagagaaatacacgtgcagaatatctg

SEQ ID NO: 641930 - DNA, 207 bp, Homo sapiens
ggtccgcgatactcagatcaggaagctcagagaacactaagcagataatataaaaaacaaaaacagaaaacgcaaccaggcatataattttcaaactacagaaaatcaaagataaagaaaaaaatcccgaaagaaactagagaggggccaggtgcagtagctcacacctgtaatcttagcactttgggaggccaaggcgggtggatc

SEQ ID NO: 641931 - DNA, 370 bp, Homo sapiens
ctggacgtactaggacagaggaatgatagagtcaacatacagttgagtccccccggcactttctcatacacatagtggaacaaaatctcaagtccttaccatggccgtcaggacgtgaggtgatctaggctcctgcttgcacgctctgggctatgttacaaccttccttctcccgcatctgctctcctgcagagacgcaggctcctctgctgtgccctgaatgggctcagcccactatcccgcctctgtgcctcgacatgtgctgcgccttcaggccgacggggctctcccctaaggtacctgtataccccctatctaacttcctgtggtcccaagcagccctcctaggacaacccgtgaatggagccca

SEQ ID NO: 641932 - DNA, 858 bp, Homo sapiens
ggtccttcctctagttgaagaacttccagagaggtagtatcgagaacgagtggtgacgcaagctctgcaaggaagctcctcgtctcagtcagtccaaatgtctgcctccacagcaggaggcctccttcaggctagttttcacgcacgcaagccatgtgcgtatgcacggcagtgactgtagatgaaacgttggcgaagcagtgtctgcccaaagcagtgtcctccatgcaagagtcctctcgtagaaatggagttccagcaagcttcatgggaataatctagatatgacacaagcgtggaaagcatcaatctagtaggaagtgcttacaggcagggctctacacgagggagactgccgcctgaaagctatgaagctcttccatctcgatatcagcatcgatgaccggcggtagttctaagcagtagcctgtgcgttcacgggtgaggcctacacccagaagtaacatggtcctgtggtgctaccgcagacaatccacagtcaagaacaggggaggttcctcgatctgaaaacacagatgacctgacgcatcctgatcatcactggacgtacagacaacaaagatggggagcttcatacccctgagtctcagcggacatgacttgtgggtctgacctctggccacgtgaagtatacatattcgatccgatgtacgaggccctgtgccctgactaactctacactccattccttaactgttcggggacgcttcccaggactaaccttgcgactgtaccgccttacgcacccacagccgctgggtagcactacaggacgcgttccactccttcacacttgcaacgtgctcgaatcaacaggcgggaggccaggatacggaa

SEQ ID NO: 641933 - DNA, 413 bp, Homo sapiens
aattttggcagctgtttagccttttcgtacttggcgtgatgtcaacgtgacttctaatctgcaggagcagaagctgttggctagtttactgcgcgtgtgtttacggagatggagtagctcgcagagagtcacagaaagtcttgcgccgtgaggcagggttttcagaccgtgggtcccagcccatttagtaaaatgggaaatcaattagcaggtggtcggccagcgattacacagcaatgaagcggaataaagtaggccagaatgcatcgtggggtaaaggcgggtactgttttgtgagacttttcacccgtacatctaaatgtgagaactggttgcaatggaagacatttcttggtgggaagttgtgagcaaaataagttgaaaacaggaataaagatctgtctgtctgagca

SEQ ID NO: 641934 - DNA, 146 bp, Homo sapiens
  misc_feature (57)..(57): n is a, c, g, or t
  misc_feature (59)..(59): n is a, c, g, or t
  misc_feature (81)..(81): n is a, c, g, or t
gttctcttcagcggtgtccattctggtccagtcccttcccgttcttttttgtctggnangttttttcctccctgtcttcanctatctcctagcttttaaacacaagggttttctagccaggacatatctcactccacacctccttg

SEQ ID NO: 641935 - DNA, 1172 bp, Homo sapiens
ggcagaggttgcagtgaactgagatcacaccactgtactccagttgaggcgacagagtgagacccagtctcaaaaaaaaaaaaaagtgtgtgtgtgtgtatatatatgttatatatatacacacacacacacttcccacataccagcccggaattacccgcccttgggtctttctctggctcttggatcatcagcccccatatcatttctggataacagagcaccagcaacagaatctctggaaagcagaccttgatgaaatcgtgcctgtgtcttaattcacaacggcgtaacgtgaatgccgctagaaaggtgctcacatacacttaccccagaaacatgagcagcctgtctcatgcaggcagtcgggagccagcgcatgctcagcggaacctggcactatgtcttcatgactgctgcatggctgctcaaccaagtggggactgacccctcctgacacgagctcggagtaacacacgcaacagcgtcacggcagcccacgcgactcatcgaaccacctcacaactactgcacccattgcagccactgccccgaccacacacgcccgcccttgcaacacgacgcactcgtacaacaccctcacaaccacaccaatcaagccccccgcgcaaccaccgcacctaccacaaacgacactcacacaaactaaccacgctgctcaacaccctgccccccacaacactgacaaaacccgccattctcgccgcatcaatgcaacacccccacaacccgccccacaccccatcgcacaccaacatgcatcccccacacccaaaatcacaaccacaatacaacaccaccacacacaacaccaccaccaataaaaaaccacaaacacaacctatcaacacacaagacgaacagtctccccacaactcacgcctaagcctcaccccaaacaaagaacacacttcctatcgacataccaaccataagactaacaaaacccacacacaccacaacacaacccaacaacgccgcacgcccacaccaacccacacagccccccacaaccccaaaacagagacacaacccccacaaccaacacacacccacggcccacccaacactaccacgaaccacaccccacacgagaacacaaacaaaaacaactcacacgcacccaacacaaacaccacaaaagaccaacc

SEQ ID NO: 641936 - DNA, 423 bp, Homo sapiens
attcgcagatggcagaagcgcaggggtgccaccaggggtcacggcagcctcaccctcccaggcccaagggaaatcttttcacctcagcctcctgagtagccgggaccacggggttgcaccaccacaccgggccaattttggtatattgtgtaaagacaagatttcaatatgtgggccggtcggaaactcttgagctcaatctgcctgcctcagtctcccaaagtgcgggaataaggagccacagcacctgggccagattggtctctttaaccacccgctcgggcatccctcttctctcaagcgatatccgtctctctcactcagcgcttctcggtctcacgtgatggtatcccttttcctacatttcccagcatctcttcctgaaaccgcttgggcaaaattctaccgaggaggctgaggggt

SEQ ID NO: 641937 - DNA, 103 bp, Homo sapiens
tttctcctccaacgtcccctctgaaatcaggtcttccctgtcaccctgtgtatcatacctcccactttctttagggcagtagctccaccccaggggtgattat

SEQ ID NO: 641938 - DNA, 627 bp, Homo sapiens
  misc_feature (590)..(590): n is a, c, g, or t
  misc_feature (627)..(627): n is a, c, g, or t
ccagctactatatatcgatggaaagttgtaccccaaggaatgttaaatagtcaaacttttgttggaaaggttattcagcttgtcagggatcagtttcctgattgctatattattcattatgttgatgacattttatgtgctgctgcaagcagggacagacggattgagtgttttgctaggctacaagaagtggtgggacttacaggtctcgctatagcaccagataaaatccatactacaccctatcattacctgggaatgagggtacaggagaaaacagtaaagcctcaaaaggaggaaattcgtaaagagtccttaaaaaccttaaatgatttccaaaaattattaggggacgttaattggataagacctactttaggaattcccacctaagcaatgtctaaactgtttgctttgctgagatgggatccaaattcatgtagcaaaagaactctgatgcctgctgcagctgaagagttacaaatgattgaggaattcaaagtgctcaagtccgtagaagagatcctagtgttccattacaggtgttagtgttccctactctccattctcctataggagtgattgttcanaatgttgacttagttcatagctattcttatggcctcn

SEQ ID NO: 641939 - DNA, 266 bp, Homo sapiens
cactcgtcgtagaagccatagcatgcggttgatgctggcacactcgtggttccactggagcaggaagaagttctcgcgggtacttaatcttatagtgccagcgagcaggcagcactgtctccaaggactgcttgcccctgtccacattgtcccccagaaagaggtcgttgctctcgggagggaaaccgccatactcaaataatcgcataacgtcgtaatagcggccgtgtatgtcaccgcagatcttgtccagaattgccccgagt

SEQ ID NO: 641940 - DNA, 633 bp, Homo sapiens
ggctgcaggaatccggaccaggaatgataggaatgctcagccaagtcccagctacttctaagcctgggctcaagtgtcctggctctacctgccttgaactggattatcctaagctgatattcggaactttttagtccagaaactatagaccagggctctgcaacactgataccataaatacttcctggattttatctgccagtagccacagataccactgctagctgctacatataggatgagtgattaaacctgcttctcaaggtcaaatgctacacatcttttgagatgctgaagaaggaagaagcactttcatggcctgaaactttagcaatcgatcattcctatattgcctacaaagcagcatatgacgaagagatacagaagttacttaaatggagttcagatttaagcgtgagtaaacctcatgccttcagcagtcgatacataggtgcagagacctaggcctttgcaatatacgtaacagtacgtgtggatcccaagcttgatcgggtccttctgatgattaacgtgattaactagggctgcagactgccatccagttagagttcagacctcaggtacaggcggacagttggtacgtggtgccttacccaagctatgtcgtctgtt

SEQ ID NO: 641941 - DNA, 788 bp, Homo sapiens
cgggttagacatccgttccagattcgtattccggaccccttcttgaatcccttccagatggacactggacagtggatcggaacctttccactcccagactcgggtaatcgctcgccaggacgctacctatgcccccagactccccccgaggacctggagcctctcctgcctctccagtcagccccttctcgccgtgttcttccactgagagccccaacccctggacgctgaagtgccttcctcccccgacggcccgcgtcctgcagacagcgcccttgttcattccacatccgaccccctcatgccgcccgagggatgaggcctcttcagagccgcctcccccaacccgcttcctcaggaaaagtccgttccccaaagccgagatgatagcagagtcccaggcctcagacatgctcatcattcggatatgctgaagaccccatggccagcccagccgcttcccagactgggggagtgaagttgctgcccccgggacacccaggaccaggcaccccagaatgtgtacgtactctgcccagccggtggccagtaatagtgaccagtgaccctggactatggagataatggttttggagctggaaggggaccagttagtgaaagccactgaagagcgctgcccccgaattgagaccacttgaagaaaccaaagacgatcccgagatagattatcgacaatttccctagagtcattccataaatttacagccatactgtgattttattagaaaaagagaagaactctctgaccaggttgaaggacagaagga

SEQ ID NO: 641942 - DNA, 589 bp, Homo sapiens
  misc_feature (81)..(81): n is a, c, g, or t
acggccgggcccgggggggtgtctcccctttcgacacggtgcgcgcgccaataataatgcagtccgggcgcaaaggagctnacatcatgtacacgggccccgtcgcctgttggaggaagatcttcaaagatgaggggggcaagcccttcttcaagggtgcgtggtccaacgtcctgcggggcatggggggccccttcgtgctggtcctgtacgacgagctcaaaaaggtgatttaagggccgcggcctcctccacacacacacacacaccaggggaaccaagagaaccacgtagaatcctcacccgtggggaccatcacccttcgagaaattccagttgtttttttcccacccgcatcctgcctgtaaatggccggggaaggctctaaaaaaagggcgcatttcgatccaacccaccgccacccaattccgttttttgatcacggggtgggagggaaccgtggggtccctgggtggggcccatgggtgagacactccagtattgagccctagagtccaaatgcttgtaggagccaagtcgtgttttaagtatttatttaaaacaaaaaaatcacgttttcccatttgta

SEQ ID NO: 641943 - DNA, 912 bp, Homo sapiens
ctacacttgggcttttgattctgtaagtacttcaagggtgtggccgagtgcaaacagctcccatgtttgagcagaccaattattaggcaattttcctaactctgcttccgcaagagtctccctatcaattactgcattacccattgtgtttatttttttccctcagtcaccccgggaggaaccaatctatcatcctgccttgaaggtagtttctgctgggatctgggtcagacctttggtatgggtaatggaggatttaaatccccttgttaggaaatctgctaggttaaggtaattaagctggaaggttaatgtaaaatcacctttactagcagaatagacccataatttaagatttatggacgttagttaagctccctttctaggcgttccaagacttaggatacgtcctcgaccgggctgaggcggtgctcacaatgagggtccctctaaaggttcactacccacctgataagccaactgatagacaaagccagtcgctgaatacagtacttggacctgcatcgggccatccaagggttccggggctcaggatctagcaaagaacaggcactggaagcaagggggataacagagactacccgcgcacacgcccttggttgcccctgacacaccaaacggtatcggacagaatcattgggcaacgcgagcacctcgactcagtacgatttgataaaaaagaccgcggatggaacgaacagggagcaccagcacaccaataatcagcgaccaagcacgagacaccatggcatagagaggatggaacccaagaagatccatgcacatgccaacaaacggtcccatacacacgaaccccactcggaacacacatgacgggataagaccgagcgcgatgccacaacaacccaggcaaccagacaaccgacctac

SEQ ID NO: 641944 - DNA, 298 bp, Homo sapiens
gattctcgaaagtgtgcagtgagcagtagtgaagcagaatttactttcccatgtactcctgtagttctgtccctgtccccgcgaaccccaggagggtacaaatgtagatcgaaaactgtaaggcctcaaaccagttaggacaagtccctttctcgtaatactttatttcattcccaatgacagaaggcaggtgcagttccagggctgtgcgcctatcgtctgggtcaagagaagaacacagctttctttagaaaaacatttagtttaaaaccaagcaccttgattgggtattataggg

SEQ ID NO: 641945 - DNA, 240 bp, Homo sapiens
ccagcgattgaagtgcaggcgtgatgggagttgctaataaataagtataaagttttagttatgcatgatgagtaagttctagagatccactgtacaacattgtgtttatagttaatactgtagactgggcgcggtggctcacgcctgtaatcccaacactttgggacaccgaggcaggcagatcacgaggtcaggaggtcgagaccagcctggccaacgtgatgagaccccgtctccaca

SEQ ID NO: 641946 - DNA, 351 bp, Homo sapiens
  misc_feature (349)..(349): n is a, c, g, or t
tcttgctctgttgcccaggctagagtgcagaccatagctcactgcagtcttgaccttccgggctcaagtgatacttctgtctcggcctcctgagtaactggaaacacaggtgtatgccaccatgccctgctaatttttttaatttttatttttgtagagacaagttctccccatgttgcctaggctagtctcgaactcctggggctcaagggatcttcctgtcttcaacctccgtaagtgttggggattacaggtgtggggctaccatgcctaaaccttgtttatttatggaagatgggggtcttggctatgtttgcacagggctgggccttcaaactcctggggcttnta

SEQ ID NO: 641947 - DNA, 206 bp, Homo sapiens
ccagacagtatcattgtagcagctgcacacccatatctagattaactctttggtctctgtatattggaacaaaacctgacgctatcgcttgccgccggcaggagtgcaaccaaaaacacagtttggggtcagacgacattaaaaatcacaataaaaaaggtgccttgattccagttgcgtgacttagaaccattcatcctgggtca

SEQ ID NO: 641948 - DNA, 293 bp, Homo sapiens
aaagaaacccctattggcttgttattttatataaataagcattttgattaaaagaactatttgaactgaatattttctcccacagaatgggaattagatttctttaacttagcctggcttagggtctctctgtcttcctttttttgaagatctgaaactctggcaaaacaatgtcatattttctgctaatttgtggttattgtccttttgcaggatttgaatcttatatgaagtttattttgtcaccaggactatataccagaatttgagtctcagctggtatcggtggggga

SEQ ID NO: 641949 - DNA, 1244 bp, Homo sapiens
acatcagctagtgattatcgctgtcttccgtttttatggctggcgtcttttgtttcctctttatactgtttatttgtcttgctctctccttgttgtttttttttctcttctctttctctattgttgtgttgctcgcaacttttcccaacgttgcgctggcgcccaactattcctggtctttcgatgtgttccgagtgtttcccccgttggcctccgcgcccttgttggtcttagttttttccgcccccaaggcgcattattccgtttgattccggggcatcacatctctgggctctactgtcccaccgtgccccccgatgtggattttcaaccaggggtgctgcgaattcggggctcctacatctgtcccccgcaatggttttcttatcggtacttctgcagaatgtcgtagcactttctgcaatgggtttaattgaggaattagaaattgtgcccctcggccaatgcgaccacaccctcactgctagcctcccgtaactgggattaagccttcgtaaagaaattgttccctggaagcttgttatctgatatccgccctggattgtagaacttgttgctgattttgaccctgtattgaagattaactgttccccctggtaatttgtttaaataccccggtacacaaatctcttgagttcacacccttatgtaacgctgtggctctggtcacacttcgctggctataaggtaaagaaacgctgctctgttggaaagacccaagttctcgttgtgctctggtgtagagttctcgtgtggcccacccacgcctctctgaattctcgtggccacgggtatattaaacgtggtccacgggctcgaagtgttttctcgggaatttttcttctatagagaggctcggccaagagaacccgcttgttttgtcttgcgggtttcgtcacgggttgtgaaagttcccaagcccgctaggagccccgctttcctcttcttatgctgaatgttctttgtgccacgaaacacccgctgggctcgttaacttggctttgaggttggagaagcggtttgcacatttacgccccgtaaaatgtgaattcacttcttaaatttaatgtaaaggttttttttgtaacgccatttctcgagattctttgaaagaagatgagcaccaccacaaattttggttttctaactgttaatgtgaggaacccttaggcccagccacacgtccttgtgtaaggaaaaatataaagtgctgccgtaaccca

SEQ ID NO: 641950 - DNA, 289 bp, Homo sapiens
aaaattttaaaaattagccgggcatggtgatgtgtgtctgtatccagcacttcaggaggcaagtgggaggactgcttgagcttagaagttcaagaccagcctgagcaacatagggagggcctgtctgtacaaaaaactaaaaaattagctgggtgtggtgatacatgcctgtggtcccagctacttgagaggctgaggcggaaggatcacttgagcccgggaggtcgaggctgcagtgaaccatgatcatgccactgcactccagcctgggcagcagagcaagaccctc

SEQ ID NO: 641951 - DNA, 130 bp, Homo sapiens
gggtgcagccacatgagctcacagcaccccctgaacacccagactgcagctcacctcacagcaaccagctcaaacagcagccaccaccgcgtcataatgatagcacaacacatcagtggcgcacagcatt

SEQ ID NO: 641952 - DNA, 117 bp, Homo sapiens
tactgtttctcatatttcaccttccttaatttggagttttctgtcttctttgtcacggcattcaaagtaggaataaactttgcttgatattgtgtgcgatatttgaatgcgggtacc

SEQ ID NO: 641953 - DNA, 222 bp, Homo sapiens
tgtactggtgtgatctctagagtctgaccaggctccagcttaactgatattttggagtgtcagcactggtgctcacgtgtcgacggaacttgtacatgtggaggcatgcacctgcagtggtgaatacacgtacgaccatggctccagtctttaacgatattttggacggtcagacacgtgttgctcacagtatctgactggaagcatttgtcctaatgggat

SEQ ID NO: 641954 - DNA, 423 bp, Homo sapiens
ggccactactctgcccctgacaggaggcatcagtgggctctgtttgtttcccattgggtttgccatggaaacattggagattggacagtggcaggaggataaagtgggggtacgtgtccttggcccccttctcacggggtcctagctcctgccctggcctttgggtcccccttcacagctctggaaactgcatcctcctctgggcagccatggagatggcttttgcttttcagcctgaggaccacactctccctctcagcactcctgagcccagccccgcaccttcctcgccattcctcattaaactgccactcattcgattgccacatgagcatgagtgaggcgagcaaggtgcccaaggtgcaaaaaaattttttttacatggaatctccagcctgggcaataagagtgaaactctgtcaa

SEQ ID NO: 641955 - DNA, 472 bp, Homo sapiens
ggccactactctgcccctgacaggaggcatcagtgggctctgtttgtttcccattgggtttgccatggaaacattggagattggacagtggcaggaggataaagtgggggtacgtgtccttggcccccttctcacggggtcctagctcctgccctggcctttgggtcccccttcacagctctggaaactgcatcctcctctgggcagccatggagatggcttttgcttttcagcctgaggaccacactctccctctcagcactcctgagcccagccccgcaccttcctcgccattcctcattaaactgccactcattcgattgccacatgagcatgagtgaggcgagcaaggtgcccaaggtgcaaaaaaattttttttacatggaatcacttgaacccgggaggtggaggctgcagtgaacagagacagtgccactgcacatcagcctgagtgacagagagactttgtctc

SEQ ID NO: 641956 - DNA, 181 bp, Homo sapiens
ctttgcctttacccaaaacctttttggaggtcccaccccgtttttttttgtgttcacccccaaaatgtgtacccggttgtaataggaacttaaatccatttttaggtgttccaggaacttgcatatttaaaaaaaaaaaattagtccctggcccatttttttttttttttgccccaggcca

SEQ ID NO: 641957 - DNA, 197 bp, Homo sapiens
cacagcaagtgggtggtgaacttcataagactatttctttcgtcacctaggggccccaagaagaaaaaggacattgaaattctccctgtctagggttgattcccacgccccagcgagccgtgttcttacttttgggaaaaaatcccccggcgtggggcccccctttttttttaaaaaaaaggcccccccaaaaaaaa

SEQ ID NO: 641958 - DNA, 224 bp, Homo sapiens
gactctagagaaatcttatcggcgcccttttttgtctctctactatcagcactggtgaggcggatacctttcctcggggaagagaaatccatggttagtggccttgccagtggggaaatgttggccaagtcgagtgggaaaagtgttgccattggccatctttcacgtgaaaccacgttcaaaagatccaggctgcctactctctgtagggtgatcacaccaaa

SEQ ID NO: 641959 - DNA, 435 bp, Homo sapiens
ggaaagcagatacagcatgtactctcttataagtgggagttaaaggataagaacttgtgaacataagaaggaaacaacagacactggggtctacttgagcggggagggttatatgaggtagaggagcagaaaagataactattgggtactgagcttaatacctgggtgatgtaataatatgttcaacgaacccccatgacatgtgtttatctatgtaacaaaccttcacatgtaccagcaaacccaaaataaaaataaatttaacaagttaaatgatgctgggataactggctagccatatgcagaagattggagctggaccccttacaccatatataaaaatgaactcaaggtgaattaaagacttaaatgtaaaaccgaaaactatgaaccctgcgaacctatgaggcggatccctctagaagtacgagctgc

SEQ ID NO: 641960 - DNA, 111 bp, Homo sapiens
  misc_feature (20)..(20): n is a, c, g, or t
ctctagaggatccggactgnagatgttggacactgggccaccaacgcaatgacgacgaaaccttctgatgaagcctccagtggagaactgggcttggcagacatctccagt

SEQ ID NO: 641961 - DNA, 753 bp, Homo sapiens
gatccctcaggcggctgcaggcttcagcctgcgctggttggtgaaacagagatgtcagaaaaggagaacaacgttccctgccactgcccaagttcatccctgtgaaggccctgcttctaccagaacttctccgacgagatccccagtggacgcaccagggctccatggtgcaaggaggatctacgcgggtgtggagtgtttaacgtgcgccacccgtcggcgtcggagctcattgcctgcctggcctggtggatcgtgcggattgctcggtggaccaatgttcggccttggccttcgtgtggctgcttcctgttcacgccttgcggctacgttgtgctggttctcggcttgtctacagaggccttccgagccgactagctcctttaggttccatggcgtcctctctgcatcttcggagcccaggtttgtccatgaccggtcagtccaggctgattggcttctccggctggggcgcgtgcgagctggctgtcggccattggattcttccagctacagcccgggcgctgccggggtcatgctgcttccagccactcatgttctcccgtgtctggctgcatgatggccatcgcgatcatgactggtgcccggatctaccgagggcgctggctggaagcttccggacagcccatactggttggcacacgggccttggcgggaccccccgcgacgggggccccgtcaacatctttcggcgaagcttgcccagtacccccttgtgcccgtaaccggcgg

SEQ ID NO: 641962 - DNA, 141 bp, Homo sapiens
ggtgtgccgatcttgctccacgcacctctgcctcccgggttcaggtgattctcctggctcagcctcccgagcagctgggactacaggcatgcaccaccacgcccggcttaatttttatttttaggggcagagtcttgctcc

SEQ ID NO: 641963 - DNA, 102 bp, Homo sapiens
cgccgccttggttgcctaactcccgtctaataggcctactccctttctaggaatacaggtaacagatcaaagaactacacgtgcatcactcacaatgaccat

SEQ ID NO: 641964 - DNA, 198 bp, Homo sapiens
gatccccactcatgcatccaacccagcagcaacacgtgcaaactacctcagcaccaggcatccaagcacatttcccagcacatcatcaagccttcaacacacaatggcctccgctgtgggtggcagcaattgggtcacctgagctcgcaattctgtcaatccatggtccatcagctgtttccatgtagtgcaacatgg

SEQ ID NO: 641965 - DNA, 276 bp, Homo sapiens
gtatgaatgaaggagctcaggcaagaacatcagtgtggcttccttgcaatagcagccaggttgtgctaggctagtagagaggtcctctactatctgcagatcatcctcaggagctccgtagatcagccacacagagattgaacatgaagtggcttgattggacctcaccctattaggagacagctatggactgtcccctctttgtgccattgtgctctgtatgtacatatcggctcggatgctgtacttgacctcttatgaactactgctcaagga

SEQ ID NO: 641966 - DNA, 492 bp, Homo sapiens
tacttttccacaggctcgtccctgttctcgtttctttcccccttttccatccgagtagtttctgtgctttagccttgtctatcattctctttgctccagtttgtcaggtgaatcatgatgctcatgagcggaaggtgcagtgctgagtaacagtgtgggaggtttccctgccatcttcccacccgtcattccttttctttttttaatttgtatttattttattttatttgttctaccctagtgaatacaacctttgtcctggagaccccagctagtctaagaaaacttcctaggctgagctctcttgggaatctaagataaagaactgagatcctgggaagaagggaactgcctcctcttctttctgcaagcccaaagccctcgggactgggcaggcaatgataccacccactttgctacagtgataacagaccctgtgacaagataatgggaagtgtcactgacattagctgggcatttaggcattctttc

SEQ ID NO: 641967 - DNA, 253 bp, Homo sapiens
atctagaggatcccggtgttccctttgtcttcctgcagcttctctcacacagtctacctctgcccttgttcttccatgaaagccgtgggcctgggaaaactctgtactgggcacctttccttactgtaattctagacttcagtgccgtcctaagaagacaaaccagccctgtgttcattcctctaagaatccgaattgtctttgaaaagtcaaaaggggtcgggtatagtggctcacgtctgtaatcccagca

SEQ ID NO: 641968 - DNA, 300 bp, Homo sapiens
tctggatcccaggagcctgaggcaggagaatcacatgaacccgtgaggcggaggttgcagtgagccgagatcgcgtcactgcgctccagcctgggcgacagagcgagatgccatctcaaaaaaaaattaaatgtgatagtagatattgagcatcttgtagactttttgctaaacatagcttttaaatacacacatttatttttactcctgctgaaaccctgccaaaatgacaataaagaaatacaaaaaggcatgcatgcccaagcccaagtaaaatgggaaaagtagaaaacagtgaaa

SEQ ID NO: 641969 - DNA, 616 bp, Homo sapiens
  misc_feature (181)..(181): n is a, c, g, or t
  misc_feature (615)..(615): n is a, c, g, or t
tggtctcgaaaaacatgaaccgccggggggccgatcaaaattgctggtttaacctgttggaccgaaagcctccggtgatatttaaaatcagcccccaattagctggccagggcaatctgaccaaggacaagtgcggtggcttgccgtttggcccagcccctgctgcagaccgtgggtgtanggccccggcacccacccgagcggaaggggtcgctgtttaaccaccaccaccgccattggccaatctccccattttatccccattccagtttattccataagccttacgattgtggttaactgaaatgttccttttaccggctgtttttaaaataaaaatgtatgtataggttttgaattttttaaaagggaggaaagactgttaagaagagctatttggtgactaacaactgaatattttagcctcaatccgtttatccagtcctcgaatctgtataaatgcattttagaactgatagacagtaaacttgaatttatctttgataagaatacatgccactgtacattcagatattatttaaatttgcaaacacattgttctatatgtaagggtactgtatgtaaaactctgtattaaaactattcccctttttna

SEQ ID NO: 641970 - DNA, 137 bp, Homo sapiens
caccgacgtgcggtgacatgctccctgtacaagttccgtcgacacgtgaggcaccgtgcttgacctccacaatatcgtataagcatggagccttgcgtcgacgtctagtaggatcactcaagctacccagaggcact

SEQ ID NO: 641971 - DNA, 126 bp, Homo sapiens
aactcagggtgcgagctgcggcagcttctccacaaggacaagagcaagcgaagtgctgtagccagcagcgtggtcaagcagaagctagcggaggtattctgaaaaaacagcagtcgcccctgagtt

SEQ ID NO: 641972 - DNA, 354 bp, Homo sapiens
tgtcctttgtttgtttgtttgttttaactgatggtttcgttttgtttttttttaagatggagtctcactctgtcgccaggctggagtgcagtggcgcaatctcggctcactgcaacctccgactccctggttcaagcgattctcctgcctcagctacttgggagctaaggcaggagaatcacttgaacccaggaagtggaggatcgcttgagctcaggagttaaaagaccagcccgggcaacacagagaaaccccccacctctacaaaaaactttaagattacctgggcacagtggctcacacctgtaatcccaacactttgggaggctgaggcgggaggatcatttgagccca

SEQ ID NO: 641973 - DNA, 1095 bp, Homo sapiens
tggcatttaaccactaaatctttatggaatttttattggtaacagcaatgcaatattaggcaaattagacagaagaaattttagagtgtgaagaagtaattacagcaataaagtttaaagagggaggggttaggggcaagtggggtttcaggtggctaggaaggaaggggctacgtgcacgaggggttacacgccagaggggtttgaatttatatcacactcttttatataacatctttccctatggaaacatattttacccatccctatcctattggcaacaatgttccctattctctaaaggccgagtaatatttatatcccaagagtgtccgatctcctatcctctctctatatgtaaatacttattttagatatctctaatattcccctctttttggaaatcttgttctccccccaatggggggggtggtttctatatcccctatgtgtcccccatatttccggctctctaaaatatacaatgtggggaggctctccccccttgaacatgttcaccctctcgcgcgaaggtttaattatctcgtgagacacatctcttctaacagcgcgtataaccgcccatatttatactcgcgcgggggtaaacacggggtgggttcaccacatgtccaaatgtacacgcgctatttgtcccccaatattatatcgacgcgcgcatatatcctaatattccacatatcgaatattatgtatattcttctacacaacatattcttcttcatatattaaaaccgcgcaaacccccaaaattttttaacaatactttcatcttttaaataaaggtccgccctttcttctttgttttccccccccaagaagaagggttccctttaggcgccccccaaagggggctcgttgaacttggtgttttttcaccctgtgtggtcaactctcttggaaccactcttcgtgttgtgccggggcgccacaacgcgcttccccttcgtttttgtttaaacccccccccaagatattttgtgggcgcctccttggagcttgcgaaaatgtggcgccctctcttattgggcccccctgggggggggcgtatcacttcatccctttggaaattgg

SEQ ID NO: 641974 - DNA, 212 bp, Homo sapiens
gctggagatcatacgatactaagcctggctcttctcactttgccgtcatttccttgtagctgcaggaagaaagtttccttctactagctgcatagaacaccatgataaggatacatcagtttcagctcttctattgctgcgtcgaacaccggaataaggatacaccagatttcagactcttctatttctgcgatagaaacaccgatgataag

SEQ ID NO: 641975 - DNA, 176 bp, Homo sapiens
  misc_feature (81)..(81): n is a, c, g, or t
  misc_feature (83)..(83): n is a, c, g, or t
  misc_feature (106)..(106): n is a, c, g, or t
  misc_feature (150)..(150): n is a, c, g, or t
  misc_feature (168)..(168): n is a, c, g, or t
tgatcctgaagtacagaaagacattaaaaatgttcccttttaaaattgtccgtgcctccaatggtgatgcctgggttgagncncatgggaaattgtatctccgagncagattggagcatttgtgttgatgaagatgaagagactgcaganaattactggggcacacancaaaaaat

SEQ ID NO: 641976 - DNA, 961 bp, Homo sapiens
gagacccatcaaagtggagatgccctcccttggaaagagtggcgcctcctccgagccccgatactttcagaatgagtgaatcatctcactcctgaggagtgattcgtcgccaagtctcccaccccgaagacccaatgaagtcctacagtgggcttaggtccccaacccggtgtgtctcgtgaaatgcttgtgattcaacgacagtggcagatgcgagggagagtgagcccggtctcggcaggaaacatgcatctactgcctcccgtgtgtggatgagccggatgctgctcttctcagaggggcccatgtacttccctgctgtggcctgcaaagctcccagttcccagcagactccgtctgacccttgcctcccagctcagctactcccaggaagtgggaggaccttttaagacacccattaaggaaagcgctgcccatctcctccagcccgagcaaatctgtcctccccagaacccctgaatcctggaggctcacgcccccagccaaagtcagggggactggatttcagcccagtacaaacctcacagggtgcctctgaccccttgcctgagcccctggggctgctggatctcagaccagtccctttggcaagtggtcccacccccttgaactcaccgcacaggtcctcagatcagaaccttagacctcatctacgtaccctttgggcaactattactaccctcagatttagaagtacccaagaccaggacccccagagacaaaaggaactgggacacagaacccaatacatcctcgcacaaacgggccctcgcccgggaacacacaggagaaggcaacacaccgacagagacccgcatggacaaacacaataacgggcctagaaacggcacacatgaagcccggacaacacacggggacccagagagccagcgggacgaagaagacccgaccaaaacaataggccctagtggataacatg

SEQ ID NO: 641977 - DNA, 461 bp, Homo sapiens
  misc_feature (56)..(56): n is a, c, g, or t
  misc_feature (73)..(73): n is a, c, g, or t
  misc_feature (134)..(134): n is a, c, g, or t
  misc_feature (164)..(164): n is a, c, g, or t
  misc_feature (224)..(224): n is a, c, g, or t
  misc_feature (233)..(233): n is a, c, g, or t
  misc_feature (235)..(235): n is a, c, g, or t
  misc_feature (257)..(257): n is a, c, g, or t
  misc_feature (283)..(283): n is a, c, g, or t
  misc_feature (383)..(383): n is a, c, g, or t
  misc_feature (406)..(406): n is a, c, g, or t
  misc_feature (443)..(443): n is a, c, g, or t
  misc_feature (450)..(450): n is a, c, g, or t
gttttgacaacatcgaacatcaagtcggaccggggatttagggcattgcctactgncaacgtgccccacggcntctgtggaggagacggccgaactcgacgctgtgccacatcctgaacctgtaccgggcgggnccacctggctgcaccagggcgctgcggganggcacacgagtccagcagcgtcgagcagatccgcgaggtggcgtccggcggctgccaggntccgcgggnanaccttgggcatcatcggacttngtcgcgtggggcaggcagtggcgctncgggccaaggccttcggctttcaacgtgctcttctacgacccttacttgtcggatggcgtggagcgggcgctggggctgcagcgtgtcagcaccctgcangaccttctcttccacagcgactncatgaccctgcaattcggcctcaacgagcacaaccanccacctnatcaacgactt

SEQ ID NO: 641978 - DNA, 165 bp, Homo sapiens
agcaatgaggcagctctccgtgaaatgcttctcccaaaaaagcacctggtactaaggggtactgctgctgctgctgctgctgcgtgctgctgcttgttaaacgttccagcaaaaatcgatcaccggccggcgagttaaaaagggctccagacccagaatggttcc

SEQ ID NO: 641979 - DNA, 863 bp, Homo sapiens
aacaggttgttttcctccttccctccccgaaaataatgggtaacctcctgtataaaatattgccccccgccggccaattggttttgggaaaattacacatgtgcgcgttccttcccccccccgatacttaggactcacacagtgtgtggccacgcgataaccacgcgctcttcctaatttcccccacacacttgtgcacccccatcgccatcatccttgtctgcaaaacatatgtgttagaaagtatctgtttctcccacacccatcctctcatgaggcataacatgtcagggtctacagaatactctctttctttatccacacaccacgcacacaaggtttttgcggggctggagtaaaactttatctgagtaaggtaagtaaccccccgtcccctcactcattcttctgcgtgcgtactcactgtcgagtgcacctctcttatgttggaaaagaaatgtctggtcactcactcccactcacacacatgctggcgggtggcaggcccttgggggacaccacacagatgaacgcctctcttcttcgcgtaataagcaggccgcaagcgcaaaatttgttgtacagcactcctcgcttccgtgggaaacttatattatgtttgtacgtcacgcccgtgtgtgcgtatcacgcacagggtagggggcaaccccctcttatgaggacgtgtatgtggtgggtgtgctgtgcgccacggcggagcacccaggcgcatattttgtttggttggggttctcacacagcggcaggtatatgttttgttataagacaacataaaaaaataattgctgagaccagctactcatgataaatttaaaagaaaaaaaaaaacgaaaaacataaca

SEQ ID NO: 641980 - DNA, 1325 bp, Homo sapiens
gggcactgcggcgctcgggtgtatgtggatggccctgcgagtggaagggcccggatgtcgaggcccaaggtgctgccttgatagcgaggagtagggatcgggactcaccgggcctggagagagcgtactcagggccaagagactgaggaatgaggacttcattatccccatgcccaactatggaagcgtagcgcatgatggaggcgacttgcctgattcaggttcatcgctgttgacttcattggaaatctaggcaccaccgatgcgacgaagggttggacaatcatttttgtcactatgttgagttggcgcgaaagaggtgtatggacgtgttgagcgagaagattaggacgcgtagaaaaagtatagtgtcatatagagcatcatttcggcgcattgaacgattatagacagttcaaaaaagatgtaggaatcgcaagaagcgaatgaaaattgatgcatagaagagagggaggaaatttatatggacgatatagaggaaacggaaggggtacgagtatgtgtatgcgtaatcgtatcgaatgacgggtcgctagagtgagcatgtagaaaattaggcgaaagaggaaaaaatgacatgtcgaagggatgctgaataggattctccatttgaagactgatttgagacagaaaggacgagcagggcaaatggcttggtaagtacccaaggtggggacattgggacacaccacagcattataaaggttgagaagccaacagaaagatgaaacacaaagcgcaacggaagtcacaaacaagggccgtgagaaggaacacagtgccaagttatacagaacggaaagcggggagcgaccaacaccagtcttaggaacatgaaattgagaccagcgaacggaacagcccaagaacatatagcaagatatacatacacgtttatatgaataacaaattcagaatagacaccaggaaggcgaagaggcgggccgtatgtgtatagggaccgacaccaaaccaaaaatctaatatctcgcgcactattccattagtagtttaaagcaccacattatcgtcgcggttaccatagaattgttacgtagtggcacagcaggaaaacaatgagcataaagacccacaggcgctagtacaagcccacagcagggcagtactcgcggagacaagaaaaaacacaagaacgacaaatccgcgaaaatatgagtagaccacctcactagtagggcatacccacgagtcggtatactatcacccaagctcgtagtgaagacaacacgtattatgttgacacatatacatagagtgagaagcaagccactacggtggatcaa

SEQ ID NO: 641981 - DNA, 346 bp, Homo sapiens
ctgagagatagtgtgatctatccacgaggattatatagatacataatgagaagccacaagtacaaccttgattagacatactgacaatacttgcaggtccgattacaaaggatggtgaaacttagtatcgaaactgttgacatactgtcgaaaggctttaatggttcttaaccgagtgaccgtactgtagcacatactatcgcaattcaagctgttcatgactctgataatcatgaagactttatgatggcccacttgagtgactgtttatttgttggctgacattggttaccccccccccccttattgtgttggggggggggatattatcttggggggggggggg

SEQ ID NO: 641982 - DNA, 672 bp, Homo sapiens
  misc_feature (332)..(332): n is a, c, g, or t
  misc_feature (377)..(377): n is a, c, g, or t
  misc_feature (389)..(389): n is a, c, g, or t
  misc_feature (400)..(400): n is a, c, g, or t
aactcggtggagaagcctgtgtcctcgattctgtccagaaccccgtctgtggcaaagagccccgaagctaagagcccccttcagtcgcagcctcactctaggatgaagcctgctgggagcgtgaatgacatggccctggatgccttcgacttggaccggatgaagcaggagatcctagaggaggtggtgagagagctccacaaggtgaaggaggagatcatcgacgccatcaggcaggagctgagtgggatcagcaccacgtaaggggccggcctcgctgcgctgattcgtcgagcccatccggcgacagaggacagccagaagcccagccnagccccagactccagtgcaccaagaagcacggcacaaggaagccntggggcgcgctngctgtgaaacngtcctgacctgtgatcacacatgacagtgaggaaaccaagtgcaactccttgggtttttttagattctgcctgacacggaacaccaggtctgctcgtcttttttgtgtttatattgctattaggtcattctttgggtttctagagacgcccctaagtcacctgcttcattagacggtttccaggttttctcccaggtgacgctgttagcgcctcagctggcggtgacagccggcccgagccgtggcgccaccagacaccgcagagctgtcca

SEQ ID NO: 641983 - DNA, 472 bp, Homo sapiens
  misc_feature (46)..(46): n is a, c, g, or t
  misc_feature (67)..(67): n is a, c, g, or t
  misc_feature (73)..(73): n is a, c, g, or t
  misc_feature (105)..(105): n is a, c, g, or t
ccttaatggcgactggatttggcctgatcacaccacagtgtggccnatttgggtccttgtagagatngtctcnggtttctactatccccccagcaactgcttccntacctgatccagagggacctggagaccccttagttggaggtcactgggtcattctgaagtggggggtgagggcccaagggcttgtcactgctgtgggcagtctttgtctcttgtagatccagccttaatgtctgacatcccaggaagcgcagaccctgcacaaagtggatatcagagcgatactgtgaggagtaagtaaggagcataggtttaccaaagagaatgagctagcacatcatgtctgcctgttacactgatctgagtgcacccttagaaaactgaatgtaccacagacccaggacagttttggaacttgtatgctctctagcaactttgtgtgaatttttatacaagcactgttttatta

SEQ ID NO: 641984 - DNA, 610 bp, Homo sapiens
  misc_feature (332)..(332): n is a, c, g, or t
  misc_feature (377)..(377): n is a, c, g, or t
  misc_feature (389)..(389): n is a, c, g, or t
  misc_feature (400)..(400): n is a, c, g, or t
aactcggtggagaagcctgtgtcctcgattctgtccagaaccccgtctgtggcaaagagccccgaagctaagagcccccttcagtcgcagcctcactctaggatgaagcctgctgggagcgtgaatgacatggccctggatgccttcgacttggaccggatgaagcaggagatcctagaggaggtggtgagagagctccacaaggtgaaggaggagatcatcgacgccatcaggcaggagctgagtgggatcagcaccacgtaaggggccggcctcgctgcgctgattcgtcgagcccatccggcgacagaggacagccagaagcccagccnagccccagactccagtgcaccaagaagcacggcacaaggaagccntggggcgcgctngctgtgaaacngtcctgacctgtgatcacacatgacagtgaggaaaccaagtgcaactccttgggtttttttagattctgcctgacacggaacaccaggtctgctcgtcttttttgtgtttatattgctattaggtcattctttgggtctgggcgcctagtacctgtcattgcggctccggttctcacgtccgtgatgccatcctgcgtacccgccccgtg

SEQ ID NO: 641985 - DNA, 118 bp, Homo sapiens
gtcgatctaaggatcccgctggcactcgtcatcacagctataatcgtggtccaccaaataagtgcaacagagtttatctatttttaaatcattgccattaagctgacgagtgcccagt

SEQ ID NO: 641986 - DNA, 701 bp, Homo sapiens
  misc_feature (361)..(361): n is a, c, g, or t
  misc_feature (406)..(406): n is a, c, g, or t
  misc_feature (418)..(418): n is a, c, g, or t
  misc_feature (429)..(429): n is a, c, g, or t
aagtagcggatcctttttgcttgcgggtggggtggtgcagcatctgtctgggagctggcattttcgttgaccggacgaggaggagtctgtactgggagatcatggggacagctcccaagctgaaggaagggatgaagcctgctgggagcgtgaatgacatggccctggatgccttcgacttggaccggatgaagcaggagatcctagaggaggtggtgagagagctccacaaggtgaaggaggagatcatcgacgccatcaggcaggagctgagtgggatcagcaccacgtaaggggccggcctcgctgcgctgattcgtcgagcccatccggcgacagaggacagccagaagcccagccnagccccagactccagtgcaccaagaagcacggcacaaggaagccntggggcgcgctngctgtgaaacngtcctgacctgtgatcacacatgacagtgaggaaaccaagtgcaactccttgggtttttttagattctgcctgacacggaacaccaggtctgctcgtcttttttgtgtttatattgctattaggtcattctttgggtttctagagacgcccctaagtcacctgcttcattagacggtttccaggttttctcccaggtgacgctgttagcgcctcagctggcggtgacagccggcccgagccgtggcgccaccagacaccgcagagctgtcca

SEQ ID NO: 641987 - DNA, 247 bp, Homo sapiens
gaatctcgatagattgtgcaggtgaggttgtaggtgtctggtcgcagtcggagtgtgtgtggggggtgagtgtgccctgtgatgggagggcatcctgtccagggtggtccctgccttgcacactgagctgttgggataggctctggtcgcccaccaccttaaactggaataactgagttggaaaatgaaagaaggaatgaataaaaaattattgtaaaataaaaattgcctcccataaccatacaaa

SEQ ID NO: 641988 - DNA, 123 bp, Homo sapiens
cctcgaggccaagaattccgtaagacggcggctgagatctgacatccatatgggccggcacaccaattcccgttagggcggcatcaactaagcttgtcacagtaccgagcgcttacaatctgc

SEQ ID NO: 641989 - DNA, 331 bp, Homo sapiens
  misc_feature (23)..(23): n is a, c, g, or t
  misc_feature (40)..(40): n is a, c, g, or t
  misc_feature (53)..(53): n is a, c, g, or t
  misc_feature (62)..(63): n is a, c, g, or t
  misc_feature (71)..(71): n is a, c, g, or t
  misc_feature (96)..(96): n is a, c, g, or t
  misc_feature (103)..(103): n is a, c, g, or t
  misc_feature (116)..(116): n is a, c, g, or t
  misc_feature (121)..(121): n is a, c, g, or t
  misc_feature (131)..(131): n is a, c, g, or t
  misc_feature (145)..(145): n is a, c, g, or t
  misc_feature (152)..(152): n is a, c, g, or t
  misc_feature (157)..(157): n is a, c, g, or t
  misc_feature (163)..(163): n is a, c, g, or t
  misc_feature (172)..(172): n is a, c, g, or t
  misc_feature (186)..(186): n is a, c, g, or t
  misc_feature (207)..(207): n is a, c, g, or t
  misc_feature (229)..(230): n is a, c, g, or t
  misc_feature (239)..(239): n is a, c, g, or t
  misc_feature (258)..(258): n is a, c, g, or t
  misc_feature (260)..(260): n is a, c, g, or t
  misc_feature (270)..(270): n is a, c, g, or t
  misc_feature (272)..(272): n is a, c, g, or t
  misc_feature (279)..(279): n is a, c, g, or t
  misc_feature (289)..(289): n is a, c, g, or t
  misc_feature (301)..(301): n is a, c, g, or t
  misc_feature (306)..(306): n is a, c, g, or t
  misc_feature (315)..(315): n is a, c, g, or t
  misc_feature (326)..(326): n is a, c, g, or t
taggtggagaaagcccagctcgnactttattcgctcctcncggggcagggggntccaggagnncttcggtnggggcgggtgccgctctcctccttncaccatncacaggctttctnggctngcgcaggatnggcgctcggccctngcggatnggctngccatngcgcaggtncggggcggtacttnttcttgcggatcatgtgtctnatgctgctgagcgtgggcgcgnncatttcttnttgatgggtgggtcccaananaggaggtggnangcttccnctggccgganctccgcttaatngaccnccacgacanctttggccgtngggtg

SEQ ID NO: 641990 - DNA, 213 bp, Homo sapiens
tcgaggatcttaagcttagtaggcacacctgtctgagttagtccacttatttaggggcacaaaccttagggaaggaattgcagggtcatatggtaaatctgcttcccttcattcataacttttttcttttttgattgaaatatagttgatttacaatgcgttagtttcaggtgtacagcacagtgattcagttatatatatatacactcacaa

SEQ ID NO: 641991 - DNA, 318 bp, Homo sapiens
gatccctccctcagctgcaaaaagttaaggatggcactcaccactccttttcaacatagtactggaagtcctagccagagcaatcagacaagagaaagaaatgaaggacatccaaaatggtaaagaggaagtcaaactgttactgtttgctgatgatatgattgtttaccttgaaaaccctaaggactcctctaggaagcacctagaactgataaaagaattcagcaaagtttccggatacaagattaatgtacagaaatcagtagctcttccatacaacaacagtgaccaaacagataaacaaatcaagaacttaac

SEQ ID NO: 641992 - DNA, 343 bp, Homo sapiens
catgcctacaagaagtacatcaaagattacatgaaatcaatcaacgggaaaacttgaagtaacatgagaccagaaagagtaaaaccttttatgacaggggcagcagtacaaatcaagcacatccttgctactattcaaaaactaccagttctttattgtgtgacaaacatgaatccagatggcatggtagctctattggacgaccgtgaggatggtgtgaccccatatatgatctactctttaaggatggtttagaaatggtaaacagtaaactaatgtggcaattattctggctctatcacctgtcatcataacaggcttctgctcgtactccaaacaacac

SEQ ID NO: 641993 - DNA, 284 bp, Homo sapiens
ccaggggcatcactgtgagcttttttccctagaactattaacaacgcaacaactctgccagagttatgagtttgggagatcaggccattaggcctggatctgtccacctcggcctccccaacgtgcggggattacatggtgagccactgcgacctggcatgagactcttttttttaatacgctatttttttttacgccctattattggttctacgtatattacagtactattataccatggtggtgtataactctcgattaaatggtttctaacgaatccagtg

SEQ ID NO: 641994 - DNA, 363 bp, Homo sapiens
  misc_feature (10)..(10): n is a, c, g, or t
  misc_feature (99)..(99): n is a, c, g, or t
  misc_feature (145)..(145): n is a, c, g, or t
gggtgaaggnccttagggatatttagggtggtttccttaccttccttattggtttgaaggaaaccaggttgtgaataaaaattaattcaaaattagagncccaggcacagtggcttacaccctgtaatgcccagcactttgcganggccgaggcgggcgaatcatctgaggttgggagtttgacaccagactggccaacatggtaaaaccccttctctactaaaagaaaaatacaaaaaaaaaaaaaaagtagccagtcggtcgcacatgtctgtaatcccaactatgtggaaggctgaggcacaagaattgcttgaacctgggaggcagaggtcgcagtgagctgagatcgcaccactgcac

SEQ ID NO: 641995 - DNA, 132 bp, Homo sapiens
attcgcggccgcgtcgacatagacgcggttctcacaccggcaatcccatcactttaggaagctgatacaggtggctcacttgaaccaaacagtttcagaccagcctgagcaacatagggacgctctgtctgt

SEQ ID NO: 641996 - DNA, 323 bp, Homo sapiens
gaacactcttaagaagaagttctagctgaactcccatccgtcagaaaaggggcagatcttctgaactagatagatcacccaaactcatgacagatttggataaggctcaattacttgaaatagtcaaagctaatgcagctgccatgtgtgctaagtctggagtccctttaccaccaaacctaaagcctgcacctgcacctactatagaagagaaagttgctaaaaagacagcaggagctactatagaagaactaactgagaaatgtaaacagattgcacacagtaaagaagatgatgatgtaatagtgaattaaaccttatgt

SEQ ID NO: 641997 - DNA, 3888 bp, Homo sapiens
agcgggttggagggcttcgcgtctgcttcggagaccgtaagggcatatcatggagcatctagaaggtgtcatcaacaaaccagaggcggagatgtcgccacaagaattgcagctccattacttcaaaatgcatgattatgatggcaataatttgcttgatggcttagaactctccacagccatcactcatgtccataaggaggaagggagtgaacaggcaccactaatgagtgaagatgaactgattaacataatagatggtgttttgagagatgatgacaacaatgatggatacattgactatgctgaatttgcaaaatcactgcagtagatgttatttggccatctctggttatatacaaatgtgacccgtgataatgtgattgaacactttagtaatgcaaattaactcatttcaactactgctgcagcattttggtaaaaacctgtagcgattcgttacactggggtgagaagagataagagaaatgaaagagaagagaaatgggacatctaatagtccctaagtgctattaaataccttattggacaagggcttcttcagcatctgtattagtctgtattaatgctgctgataaagacgtacccgagactgggaagaaaaagaggtttacttggacttacagttccacatggctgggaggcctcaaatcatgccggaagttgaaaggcacttcttacatggcagcaagagaaaatgaggaagaagcaaaagtggaaacccctgataagccatcagatcttgtgaaacttattcactatcacaagaatagcatgggaaagactggcccatgattcaattacctccccttggtctctcccacaacacgtggaattctgtagatacaatttcaagttgagatttggtggacataccaacatatcatctacctggccccttccaaatttaatttcccaatttttaaaaccaattattccttcctaaaattccccaaagtcttaactcttttcagcattaacgaaaaatccacagtccaaagtctcatctgagacaaggcaagtcccttccacctatgagcctgtaaaatcaaaagcaagctagttacttcctagataccaacagggtacaggtattgattaaagacggctgttccaaatgggagaaattggccaaaataaaggggttacagggcccatgcaagtccgaaatccagcagggctgtcaaatttaaagttccagaataatctcctttgactccaggtctcacatccaggtcatactgatgcaagaagtgggttcccatcctcttgggcagctctgccctggctttgtagggtacagcctccctcctggctgctttcacggctgttgttcagtgcctgcgttttccaggtgcacggtgcaagctgtggatctaccattctggggtctggaggacgctggccctccttctcacagctccactaggaatgcccagtagggactcgtgtgggggctcccacaccacatttcccttctgcactgccctagcagaggttctctcccctgccgctgagagggcctctcccctgcagcaaacttttgcctgggcattgaggcatttccatacatcttctgaaaactaggcggaggtttccaaatcacaattcttgacttctgtgcacctgcagtttaacagcacatagaagctgccaaggcttggggcttccactctgaagccacagtccgagctgtatgttggcccctttcagccatgctgagtggctgggacacaagacaccaagtccctaggctgcacacacatgtcaggggctgccctgacatggcctggagacattttccccatggtgttggggattaacattaggctccttgctacttatgcaaatttctgcagctggcttgaatttctccccagaaaatgggtttttcttttctattgcatagtcaggctgcaaatttccaaacttttatgctttgcttcccttatttataagggaatgcctttaaaagcacccaagtcacctgttgaacactttgctgcttagaaatttcttccgccagttaacctaaatcatctctctcaagttcaaagttccacaaatccctatgaaggggcaaatgtcgcagtctcttgctaaacactaacaacaggtcacctttactccagttcccaacaagttcctcatcttcatctgaggccacctcagcctggactttgttgtccatattgctatcagcatttgggaaagccattcaacaagtctgtaggaagttccaaactttcccacattttcctgttttcttctgagccctccaaactgttccagcctctgcctgttacccagttccaaagtcacttccacattttgggtatttcttcagcaggacccaatctactggtaccaatttactgtattagtccgttttcacgctgctgataaagacatacccgagactgggaagaaaaagtggtttaattggacttaaagttccacatggctggggaggcctcagaatcatggtgggaggcaaaagacacttcttacattgtggcaagaaaaaatgaggaagaagcaaaagcaagaaacccctgatacaactgatcagatcttctgataaaatctcagatctcatgagacttattcactgtcacgagaatagcacgggaaagactggcccccatgattcaattacctgggggtgggtctgtcccacaacacgtgggaattctgggagatacaattcaagttgagatttgtggggggacacaaccaaaccatatcagcatcctttcaagaatattagataattggagctgagtactcaggaacttgactgtagtagaatactgctagtttcttaattttaattcacatcacctgaaaagtaaaacaccaggctttgcagtggatgcttttcagtaacagtgaagtggagtgaatacccaaatgtttgccctggtggttcctatctcttcaggcaaacatggtcagtattctgtaaagttcccctggcctaaatgattacttgctctgggcaagtggatatttattaggctatttcaaagccacagcataagaatgtcagcctagccacagagtctgagattctgagttcagcctagccacagagtctaagattctgtatcctctgacattttggaaatgatacactactggcttaagtgatgactctttcagattttcagtattttatacaactactgccacatccttatactttattgcttttctgtcttctcaacctgggagagacctgaatttgagtgtgttctctaatcaatagtggtttagcttctttctatttcactcgtttctagggttttttatttgcagtttaggaactattaggaatgtcaggacttcatcagcaggggtaaaactacactggcctagcctaagtaggaagtgaaaagataattcaccaaacaatgattaatcagatagaagttctagtcaagagggatattgttgaagttacctcttttagcctagatacatggattcttttcaaatcaggaaagattagaaaaggaacccaaaaaaccctttaacagtgtgaatctttatagtatttgaaaatgagaagaagcagcagattgtaatttggtttattggatgtgatggacgttctgtaatagaaaacctgaaacgatgattgaatgggaaaaagagactacaaaatttgtcgtaggatgtatacagacttattttctttattacagtattataagaaaacatatgtatttgtaaaaatggtttcctgtgtcaagtatttgtgcagtcagagctgacttgtaaactattcttgtaatagctcattattttgaaagatttatatatgatgaattctggatatatgaccaataaaactgatgaagc

SEQ ID NO: 641998 - DNA, 123 bp, Homo sapiens
tttttgagattaccggtttgagcccaccatgcctggcccttccctgggtttttggacatggaggctggtccaagttgcgaggtcacggggggaagacccactggtcaagcattgggtacctgt

SEQ ID NO: 641999 - DNA, 1606 bp, Homo sapiens
  misc_feature (1040)..(1040): n is a, c, g, or t
ccggcggtgacggtcgttctctggactgcttggtgttgttttggtcgacgttggtgtcgtttcgttgttgcttctggttggttcttcgcggtgtgtctgctccttagttgggtccctcttgtgtgttcttcctcgtgggtgtgtagtgcttctccggcctgccgttttttcgcggtggggtggtttttttcctctgcgacggggggtgttcccccctggtggtggtggggctcgcctcttgggttgtgttgatggggcgcggctcccctcggtgttgtagtgggcggctgactcccctgggccgaataataatgtgttgtatcttttcgggggcgctacctcgaagggggtagtcgccccgtgggagcagtagggtggtgtcttacatctctcccggcatggttcagtgggagaggtgtttcatccccacggtggagagggataaatatgggcggggccaagatattggggggcgtctacacccccgtggggactggtttcgtagccgtcgctccgggcccaattggtgggttggtccgtgtggcccccttgtgtcaatgtgttgaccgcggtggccccaacgcacaagaggccctagccccagtgttggaaccccccgtgtgggtccgcacaggggctcgtggggcccaccagggtgatgttttggtgaaggaaggttctatttacgggggggtgttgcacccccccagagtgcctgtgtttcacgcaagcctgcacttagtgttataagggggcaaaagttttctgctcgagaaggagaaaattggggagacacacccgcgttgttgcacggcaactttgggagaagataccccaggagatgggttgtccgccgcgtcacattgggtatacattgtgggaaatataaagaccacgcgtgcccccgcggaagaggggtttggaactctaaagaaatgttgtgaacacactcttggagagaagttctcttgggaagaaagaatatggctgagcccacgccttggagaagaagttgaaatataaaaagagcttatactcgnagaatctcccgcccggggtttttctctgccccccacaggagatgtgtgtcacaaccctgaaagcgtctgtctgtgccaaaccttgagataaggagagaggtttaaaagcgcccccatatggagcgcccggttttatatgagaagaatcttttgtgagaggagagagttgagacaccacctgagtctctgccaccgaaaaatttcacaaagacccactatagagattgtagaaaaggaaaaggccttggtataaaaaagggtgtcacaggcacattctctatagccgagagtgtgaacacacacatggagcgccagaaacacatctgcccacgagaactgaaccggctcgccagatttcaccaaacatttgccctggccgagatgaggtgttacggaccagaaaaaagagctgtgctgcccctgaagaaatggcgcgcccacaccagctcttgccctttttggagacggaatttacccgaatttttcaacgggctgctgggggccactggccctttgcccaatttcctactctcaccctggttctccatgaaaaatagtgtcctttg

SEQ ID NO: 642000 - DNA, 891 bp, Homo sapiens
ccttagccaacagcaatttacccaaactaaagtataggcgagtagaaatagacaaccgtggcgcaatagatatagctaccgtcacagggcaaagatggaaaaattataaccaagcataatatagcaaggactaacccctataccttctgcataagtgaatgaagctagaaataacttgtggcgaaggagagccaaagcgtaatgacccccgaaaaccagacgatgctacctaagaacagctaaacagagccacacccgtctatgtagcaaaatagtgggaagatttataggtagaggcgacaaacctcaccgagcctggctgatagctggttgtccaagatagaatctgtagttcaactcttagatttgcccacagaaccctctaaatccccttgctaagatttgactgttagtccagaagaggaacagctcgtggggcacactaggaaaagaaccttgtcgagagagtaaaaaatttaacacccatagtaggcctagaagcagtcaccaattaagaaagcgttcatagctcaaggacccgactacctagaaaatcccaaacatataactgaagctcctcacacccaatgtggtcctactctatcaccctatgagaagaacgtaacggtagtataaggtaacactggagaaacattctccgcccgagataagcctgggtccagaattaaaacggtgaagctgacaaatacaggccaaggatctaacacacgagccacagggcctattaccccccggccacccacaacaaggctgccctcagggggggacacagggaaagaagctcgggacaaacccgcgggaacaaacagccgcgagacacgaaaaaggcccgcgagaaagagaggggcccacgagggaacaaccagaaga

SEQ ID NO: 642001 - DNA, 199 bp, Homo sapiens
ataggtttctatgtgcttaatttgtaaaagattatgttttgcatgaaggatacatattctcaatatagatatgaagttttaagagattagaaaaaaagaagggagtttgagtgtctaaatgcaatcatgattgcatttagacaacctacatgacatgtttatcttaaaaacaatgcctccactccaaataaatcacagt

SEQ ID NO: 642002 - DNA, 893 bp, Homo sapiens
ggccgtgtgtgcagcgcccggtccccagcaaccatggctatgggagcgtctggatctgtgtggcgcgacagcatatctctgtggatagattgtgtgcactctgtgtggcaggaaaatcatggttcccctgggtgcaagtcctgttgacatgggatgtcttccctgtaagcagacatggcagtgtgtgcgtctcaggtgtcctcagaggcctggatggtgcccgcgggatggcacggcgtgactagctctcatggagtcagactacatatggtctatgtagtatctcacaagtatatgcgcagggatttcatcatcgttatacttatatctggcattaagctagctcggagtatcatgtaccttagacattacagtgttcatcgtacgatgtattccaacaattgctaactgatcgtatgggtatactactcgttatataccaggttgattccaatttgatctagtaactgtgtgagacatgtttcctctgcgaggcatgttcctgtagcatactcgtatgcctactggactctggtagtagactgatgttggtagtgctaggtaagtctcggaatgtcgggaatctggggtgataatacgcgaagttgactgcaagctcgtgtactgaagatggttgccgtgggggtcccagcaaagtcttggcagttggctgtccggtgaaggtcctcgaggtttgcatcgtaccaccgggacgtttgattccttagttgatcaacagttgttctaacctgtggctttaccaagtttacgcttccccctctgtaactccatcggtgggcgaaagaagcctttaaaggcggccgtaactttcggacgacataggactgcatttttcgcgccgggatggccattggtatgcgttccttcggacg

SEQ ID NO: 642003 - DNA, 456 bp, Homo sapiens
  misc_feature (426)..(426): n is a, c, g, or t
gtttattaaaaaagtgttagagcaggaacgaaaggaaataaagtacacttggaggagggccaggtgggcatcttgagagagcaagtacacggttttgacctttgacttggggtttatatcttggcatgcttctgggggctgcgtcccttctcccctgattcttcccttggggtgggctgtccgcatgcgcagtggcctgccgacacttgggagggccgcgtgcacagtgtctttactggagttgtgcggtgccctcttgaggcagtcttcccttaccagttcctaggggaaggtcacacgctggttaaactttgccactttgcctcgtagtgtgcatgcttgacctcactcaccaactcctgagattttttttaaattttttaatttaaagttctaggggtacatgttacacaacgtgcaggtttnttaacataggtatggcatgttgccatgttg

SEQ ID NO: 642004 - DNA, 108 bp, Homo sapiens
cggcgcattgactcacaacctgaatgacaagccgtgtgaccaatgactggtggggttggagcacgtatctgttgctcaaggactacaagcccaaccagtcattcgctc

SEQ ID NO: 642005 - DNA, 1540 bp, Homo sapiens
  misc_feature (693)..(693): n is a, c, g, or t
  misc_feature (1540)..(1540): n is a, c, g, or t
gatgcccatacgagcattattgttgacagagctgcgttgaggctgcgtatgatggagcaactgaaactctcataccggatgcagctggacctggattatatccagggccatgtatgggcgctgtggtgcaatacatgttctagcatcgccagagtgcaacaccgggaagcatacgccttggcactaggtcccgtagtgtgcagtcgcctagcttgcgcgccagttggattgcagtcgacgttagttcgactaggcttgtgtcttgcggagggtggggacgtagactacgacactcgggtggattgactaacttgctcgtactatcagggcgtacagccggcacactgggaacaaccgcaaagtaaagatctctcaggatatctgcacaattacggaaggagcatagtgccttttctaagacctcttcccaacgtgtttatagggccaacgatttctaaatgttcgcaagaaaagcacaaggaccgaaggaagtggcaccagtatcgggcacactgaaatagactgctggcgtccagtacacatcgggggcgagagggtggaagcgattaaggttaccagaaaggcgcgcccttgtgtcttgcgcaactcctgtttgaagggtgcgagaatagattccatatcgctaggacataggccatggaatagacatcgggcttctgcacaacggcgtgnaccctaccattgtttcgacggctcttgttagaaggcaactggaatcgaactacaaggtaaggatttcgggcagggtgtgagcattagtcctaggtctggggcgctgatggaccaccagggtcctgagattggaaacaaatttcttacagagcgtcacaacctaggggagttcaggtcgaacttgggggtagacccaacaaaggatcccttgacattgcgatgggggcccttttgagtacctgaccccggggggcaatgaatgataggacgagtgaagacgggtttggccacatgacttggttaattttccccccggcgatttggaagacctttctaaaggtggccttcagagttgtgtggcgcccccaaaagttggttccacaggaatttgaaccggaatggaatggccccttcaacaaattcctatttctctttgcgggtggtcaacagaacacgaaaggtaatgcgcccgttcgaaggggggaaagggggcggtgtgtgaaaccccatgggccaagaaactccgtggtgacagggcgaaaaccctgttcccctctttggttcctcgcggattgattacccttccatccttggttttccgacaggtttacccctttccgcctttgggtaccaaaaccccgcaggttctggcacgacatttcaccccgcaagagggtgccccccagcgggggttccacaaagtggcgcgaggcgcggaggctgtctttccccttcttagcgcttctcccctttgtgtgtggaagacccccgaagggggcccacatggtggagttccgcacgtctccaaagtgggagtggtcctcttgaaggtctccgcctggttcan

SEQ ID NO: 642006 - DNA, 375 bp, Homo sapiens
tacaccaccaaatcgttaagcgctccttccttcttacctagcttccttcaccaaatacgcactaggctcctggaatacttatacctaatcttcaccacgaactgctagcttgctccgcttgctcctcagtcctagcttacatcaaacactggttcctggaatcctgtctgctgctgtcttcctagattcactagaatccacttctgtgtagcaactgggtcagctgtcaattaatgctagtcctcaggatttaaaaaataatcttaactcaaagtccaatgcaaaaacattaaagttggtaattactcttgatcttgaattacttccgttacgaaagtccttcacatttttcaaactaagctactctatttaagg

SEQ ID NO: 642007 - DNA, 288 bp, Homo sapiens
gaacatgccagctcccataccatctcccattcacccattgcagcccattccagggatccattctcgttctttaggaatttctggtgactacaacttctgcagtagtgacagagaggtcacaccagcaggatccaatagagcagttctcacaacctttgttgggtcaatgattcctttttccaccatattcacgaaatctccagccatagcatcataaccaactgtctgaggaactttgcattattttctcaactatcagagatccttcaagcacctgcattcttagca

SEQ ID NO: 642008 - DNA, 384 bp, Homo sapiens
ttggttcagggttggcccctgcccggctgcggaatgaaccacatcttgctttggtgacaaacacaggcccggctccaggctcctttagcgcccagttgggtggatgcctggtggcaactgcggtccacccaggagccccgaggccttttttgaaggacattgcggacaaccccggccaggccaaagggagtgacaaaggcagccccattttgcctgcccaggcccctgcccccctggggaaaaagtacttctttttttttatttttagacaaagtttcactgttgcccaggctggcgtgcagtggtgcgatttgggttccctgcaacctccgccttttgggttcaagcgatttttttgcttcagcctcccgagtagctggggct

SEQ ID NO: 642009 - DNA, 650 bp, Homo sapiens
  misc_feature (14)..(14): n is a, c, g, or t
  misc_feature (74)..(74): n is a, c, g, or t
  misc_feature (542)..(542): n is a, c, g, or t
tgtgaaggaagtanccgcatccataacaggatgtgatggtctacagctttccttaaaagctgaaaaggtaccanggtgctcgctaggcatataatccagatatgctccagagttctgagattcttccatgaaaggttaactagaagctagaatattcttttatattttggtaacaattggctttttttcatggggggaggggagtagagggttagtatttatagtcctaacaagtcccaaaaatttttataagtgtcttcagattataaataaccctccaaattttgcaatgtttacatgttttttttttaagatgacaaatatgcttgatttgctttttaaataaaagtttagctgttctaagagattaacttcaagtaggatggctggttatgatagtttggattttctacaggttctgttgccatgccttttgggtttcagcatcactcgagtcgcagcatgtgggtggggctgtggaaacctggccaggctggacctggtcagccacacctcagagacattgtttccatttggatgtngacaggcgcaggcctgcatgctctttcctacttagcatcatcagttcttccgcctccttagcatggttctttgtaacagccatgctgggaagctctgaacaataaaat

SEQ ID NO: 642010 - DNA, 242 bp, Homo sapiens
gccccctaaaggctaaatttagggggggggaattccaatgttttcccaagggggggtttttccaaaaggtttttgtttaaaaaacctggttgttaaatttccggtggttttggcaatgccccggtgatggggaaaaaattttcttgtttttcccaataaaaccctgggtttcccccggggggaaggggaatttggtaaaccttttttggatttaaagggccaaaaaaaacccccccctttta

SEQ ID NO: 642011 - DNA, 414 bp, Homo sapiens
gcggccgcctactactactaaattcgcggccgcgatcgacggagtctggagacgacgtgcagaaatgggacctcgaaagggaaaggagaagcaggaagaacaagacatcagcctcggacctcaagtggcatacagagagaatgtatttggtgtatacaatatctttgcaacgttcaatgacactaatgtccatgtcaatgatctttcaggcaagagaaccatctgccgtagtgactggtgggatgaaggtaaaggcataacgagatggatcctcaccagatgatgctatgatggctaccaaggatgtgacacaagaggtgcaggagctgggtatcaacggcgtaaacatcaagtacagggcagaggaggaaataggacgagacgcctggacctgaggagcagacggccatcaga

SEQ ID NO: 642012 - DNA, 726 bp, Homo sapiens
  misc_feature (585)..(585): n is a, c, g, or t
  misc_feature (630)..(630): n is a, c, g, or t
gagagagagagacagaaaacctgaaaaacacctcagtgaaaaccgtgagtaattttgtttacagccttagagtggagaaatattgcagaagtataaatttaaattattcaaaagtgaaaatatttacataacaaccattaactgaagatttaaaaaaggcaaatgatgagaaggacaaactatttgcaataggtgtaacaagcaaaaagtaacatctcaagcacataaagacccagcataaaagagcagaggccctgagcaggccattcacagatgaggaagtgacaggaccccccacggaacatccacggaagcaattcaacacggtgatgagatgccacccggctccacccagattagggtgcaaaaatgtaaacgcctgataaaagtcagtgttttcaagggtgtaggggaatgaatacgcttatatcctgtataaactggtgccatcctttaggagggccagttggcaggggtaaccaaaatgttaaatatgtgagcatttctctcttttcagaaatttcacttttaggaatctttttgacagaaatactctgatttggcacgaagacgtgtgtcgataancgcccaccttctgagctgcttgagaatatcaacgaggacatttgncaagaggacgtgtgaggagcaccagcttctgtgttgtggctgtgcttgcccataatcttgatacttgagcttgcaggcagaaattcttatctggaa

SEQ ID NO: 642013 - DNA, 628 bp, Homo sapiens
ttttcacaccagctcccgtcccccgcctacggtgggtgggatcgcgcggcagagacaaaggagatcagtagggccggacatagctgcgcagggaagtagggtgtcagttggggtggtgggcttttgcgggggctgtgggggggttatatttaaactcccagcagccgttaagttggttcgtagtctgatgctgcgcgcaaccagggtggtggcggagtgcgcatgcgtggttccggggcgaagggaacgcgcgctcaccgtgcgcgctcgcggccgggtggtagtggcggaggagaaaggggtcggcgcacgcgcggttgagtcctcgagtagttcgggtctcgcggggcctcgttgttttgggtctcgcggggctagtagggggcgcacctttgggcgggggagggcggctttgtggcctgcgaagacctagggccgtgaaccgaggcaggaggcttgctgcgcgcaactcgcggacacgggggcgtgaagggagcacgggtccaggcagggggggttaggccccctgatccccctcgttacccccgactgcacggaataaggggaggaaatgatcgagatggcggccggagaatggagccgtttctggtgccggccccgccgccgc

SEQ ID NO: 642014 - DNA, 255 bp, Homo sapiens
ttgttttggtgaatactcttggaaactgacagagttaatttgtagggtgtcagagtatttgtcttttgtgtgtgtgtgactgcttactcacagtatgaaaagcaatgaaggcctgttttttatgaagaacatattgtttaagctattcgggattaatattgattgcgtatccatgtgaagtcagacatagtactttgtgtaaccccctaccaaccacgtcgacgcggccgcgaatttagtagtagtaggggccgc

SEQ ID NO: 642015 - DNA, 110 bp, Homo sapiens
agaggcctcaccagagtgggtgtggacatggcggctcgagcagtacccagagtaggtgtggttagccggccagtctttaacggggggcgtgcattcaacacagctggaag

SEQ ID NO: 642016 - DNA, 942 bp, Homo sapiens
cggggggccgtcctgccggctccacgggcactttctagcttgtgcatgggctcggtttagtacagaattgccattaaacattcgctgctccaaagagaaaaaatggaccatgaaagaaataaagaggtcagctggctgggtgcctgtgaagaatgtcaaagagactcagctgttggcgtaagcgccagcataagaaggctgactgcacgggtcacaactggttgcactcaggagcttccgttggtttaatgacttggtaggagatgcacctccctcagtaggaacgttcctctgtcaaaggcaaacccgtggttttcgagctggcaaccaatgggtcgtcgctagtgagagtaccagggtcttcagctcacagggagtgcaaggcgtaggctctgaaagaattcccttcggccggggtgtttgacacatcacgatgagatatatagatatatatccatacatcttatttgtcacgaatttagactgaaaactacacattggcaaaatagcgtggatagattcgttctctttaactgggtgtgaaccaatcctgtttctcctatgctctgcgtgactacgaggctgatggtatactactgctttgcggaattgatagcaagtggcattacaagttataggtactatggtcggggtacattgagttccgaatacaataggacaggtcaatccaagactagttaacaaaaggttgtgggctaaagtatattaaggatatcgggagaatcaggtaggattgctggagatagtaagacaagtcaggtgccgattggtgggacacgttcaatacatctaagtctacacagtgaaacacgcagtgcttgtttgaagtttcaacagtacatatacgtagggttaaaaaataggtaagagtgtgagagatggagtgtgcatctacgtgcggaagagttttcaagcggacag

SEQ ID NO: 642017 - DNA, 678 bp, Homo sapiens
gaactttcaaagcagcaaaagaagtagagagagtagaataacaaatccccatgaattgataattactgaagtgggtgatgggctcatgggcatcttgttcaccccgtgcctgcttccctgcttcccctcattctgcagaggttcttttcttttgagacagagtgtggctctgttgcccaggctggcattgtgcagtggtgcgacttcggcgcactgcagcctccgcctcccgggttcaggtgattctcctggcttcggtcctctcgggtagcttgggattgacagatgcccgccaggcacacctggctaggattttcgtatttttgttagagatggggtttcgcctgtgttggccaggcgtggtctcgaactcctgatctcaagtgatccggcgccttggcctcccaaagtgctggtgattacaggtgtgaaccacggtgtcctggccactgtacaggtctatttataggaaggtggaggagtgaagggttgagagacaagccatggggcagatgcgggtctggaggatctggtgcctacaggcccgtctcttggctcccagacggcatgaggtagcaatgagggatccacctcttggtttggtggctcgtggatgacgtctctcacctggaaccagtacagagttggagtagcgcaggatcctgtcttcagaggagg

SEQ ID NO: 642018 - DNA, 867 bp, Homo sapiens
catgtccttccggtttttaagcctctaatgggagtcgcctcctttgggtcgcacgggaacctggtccttgaagtcgctccttttatatacgtctgtttcgccctctttattacggtttgtctcgtctagttaggctcttgttcaagcatcggtaagtgtgtttatccctatgcggcgcgacgtaggctgtggttttcaccctgcacttctgtctactccgcggtctccggggtcgggcctcctcgccggtgtccccccgggttgcaggccctcataccgccgttggtaccggtggacaacggctttaagaggcccttgtcaaggtcagctgttcttcatgttgcgacgatagtagtccccctccttcgtgctggcacggtcttttatgttgccttcgtccgcgcattcgccgcttagttaagtttatgcaccccctggataagcgttcacttcaggcttgccccccttgtgggcctcgtcccccttctccctcctctgctctttgagggcgcccctcgcccccctttacatccgcggttgttatcccccagatggccgctatctggatttcctcccatcacctcgtcttcactactcctcacccataataacccacacgtactcccctacttaaacttccacttttatagagcccccgtattttgtgtatacccgcacctcgatgaatcacgcgtcttcacccccaatttctatccagcagctaaaaacaagaaccagcaacctcttgtagaaaaatacccatatacacccccacccctccttctccacctccccacaccttgagaccccccctccccccttccctccctattccccctttgaaaaaaaaaacccaaaaacaaaaca

SEQ ID NO: 642019 - DNA, 142 bp, Homo sapiens
ctctgtcttgtctcccatctggtctggaactgtttgcaagtgaagcaatatctccgtattttttatatacaaccgctcttgtagcctatggtttagttgaatgtagagaaacacagattctttatacactttgtgagattta

SEQ ID NO: 642020 - DNA, 587 bp, Homo sapiens
  misc_feature (42)..(42): n is a, c, g, or t
  misc_feature (44)..(44): n is a, c, g, or t
  misc_feature (49)..(49): n is a, c, g, or t
  misc_feature (54)..(54): n is a, c, g, or t
  misc_feature (57)..(57): n is a, c, g, or t
  misc_feature (60)..(60): n is a, c, g, or t
  misc_feature (63)..(64): n is a, c, g, or t
  misc_feature (70)..(70): n is a, c, g, or t
  misc_feature (73)..(73): n is a, c, g, or t
  misc_feature (76)..(77): n is a, c, g, or t
  misc_feature (92)..(93): n is a, c, g, or t
  misc_feature (104)..(104): n is a, c, g, or t
  misc_feature (106)..(106): n is a, c, g, or t
  misc_feature (118)..(118): n is a, c, g, or t
  misc_feature (124)..(124): n is a, c, g, or t
  misc_feature (133)..(133): n is a, c, g, or t
  misc_feature (145)..(145): n is a, c, g, or t
  misc_feature (149)..(149): n is a, c, g, or t
  misc_feature (154)..(154): n is a, c, g, or t
  misc_feature (160)..(160): n is a, c, g, or t
  misc_feature (166)..(166): n is a, c, g, or t
  misc_feature (178)..(178): n is a, c, g, or t
  misc_feature (182)..(182): n is a, c, g, or t
  misc_feature (197)..(197): n is a, c, g, or t
  misc_feature (208)..(208): n is a, c, g, or t
  misc_feature (212)..(212): n is a, c, g, or t
  misc_feature (223)..(223): n is a, c, g, or t
  misc_feature (242)..(242): n is a, c, g, or t
  misc_feature (253)..(253): n is a, c, g, or t
  misc_feature (259)..(259): n is a, c, g, or t
  misc_feature (268)..(268): n is a, c, g, or t
  misc_feature (286)..(286): n is a, c, g, or t
  misc_feature (313)..(313): n is a, c, g, or t
  misc_feature (320)..(320): n is a, c, g, or t
  misc_feature (491)..(491): n is a, c, g, or t
  misc_feature (499)..(499): n is a, c, g, or t
gccatcaatgccattgtgcgcagccgcgtgggggtggccggnangcacncaganttntcnttnntgttcntcnggnnggcgtcacgggcaannacagtttgccnantcggcgcactcnatgcgnaagcagaangtggtacccacngtgntggcnttgggnagcgangtggacatggangtgntcaccacgttcagcntgggtgaccgngccnccgtgttccangagaaggattatgacagcntggcgcaaccnggtttnttcgaccgnttcatccggtggatttgntagcgccgccgcccgggccccgcagtngagggtngtgagcccaccccgtccatggtgttaagggggcccgggtcccacacggccagcaccgttgttcattgggacaaggccttgggcttgcacttttccagttcctcccagggggtcccggtagcccgggcccccgcccagccccaggtttccccaggccctccgcaggttgccnggcctccntccccctgcagccatcccaaggttcttgacctacctggcccctgagttttggagcaagccctgacccaataaaggttttgaacccata

SEQ ID NO: 642021 - DNA, 462 bp, Homo sapiens
cacgaggtggatctcctgggagcacaggaatgccgcagcaaatgccatggccatggggtctgcgacagcagcaggcactgccactgtgacgagggctgggcacctcctgattgcatgacccagctcagagcaaccagctccctgaccacaggcctgctcctcagcctcctgttgttattggtcctcgtactacttggtgccagctactggtaccgtgcccgcctgcatcagcggctctgccagctcaagggatccagctgccaatatagggcagcccaatccggtcctcctgagcgaccaggacctccacagagggcacagcagatgccaggcactaagcaagctaatgtcagctttccagtacccccctccaggccgctgccacctaaccccgtgcccaagaaactccaggctgagctggctgaccgatccaatccccccactcgccctctgcccgctgac

SEQ ID NO: 642022 - DNA, 510 bp, Homo sapiens
  misc_feature (509)..(509): n is a, c, g, or t
tgtgaaacagcctttgtcctaaaatgttgaggacaataaggtggaggctgcagacatggcaagaaaacactgggaaccaaaaatccggcttctgtctctgaagttgattggacgtgatgggcccaggcaagatttgcctggcacatcgttcctaaggaagcaggatcccaacaatggaactttccttctctgctgtcaacaaaggactaaaaaacttctgtgtgatttgatacagacaatttagaaaacttttgtttcaaagtttcccatccagactagccaaggagagcaagggaggggagctaataagcccattaaggtgtcttcccaaacaaatgttttctttgtccttctgcccaaatgcagaaacagctgcagctttaaaaaatagcatacttttatcttttgaaggaaatatgtgaaagttttagcactggttgtctttggttgggcaagaaattgtttagtgttatttatttcttcctatttttctgaattttccaaattgng

SEQ ID NO: 642023 - DNA, 130 bp, Homo sapiens
cggcactgaggatcccggagcatatagtctgaagtaaataagtggaactcacactctattcaaagtactataaaatgtagcatcacaagtgtgatactggctagataccacataatcattgacgaaggac

SEQ ID NO: 642024 - DNA, 978 bp, Homo sapiens
  misc_feature (26)..(26): n is a, c, g, or t
  misc_feature (28)..(29): n is a, c, g, or t
  misc_feature (32)..(32): n is a, c, g, or t
  misc_feature (39)..(42): n is a, c, g, or t
  misc_feature (44)..(45): n is a, c, g, or t
  misc_feature (55)..(55): n is a, c, g, or t
  misc_feature (82)..(82): n is a, c, g, or t
  misc_feature (186)..(186): n is a, c, g, or t
  misc_feature (265)..(265): n is a, c, g, or t
  misc_feature (601)..(602): n is a, c, g, or t
tcatggggttactggaagtgcgcagncnnctnagaggannnngnngaggagaggnggcgccttctcccgagccgagcactanggtttcagaggaagccgagtcccagcagcagtgggatacttcaaaaggagaacaagtttcccaaaacggtttgccagctgaacagggatctccacggatggcanaaacggtggacacaagcgaaatggtcaacggcgctacagaacaaaggacgagctctaaagagtccagccccatcccctncccgacctctgatcgtaagccaaaattgccttccaagcccaaatggccgccactttaccggccggaaccaagaagacaccttcggcccaaatggaaggcttcctcaatcggaaacacgagtgggaggcccacattatgaaagcctcaagcaggtcctggcacaaggttaatggggacataaataaccaagaaagggttttatacaaaggcgcaaagactgctgcttctggaattccctaccacagcgaggtccctgtgagtttgaaagaagctgtctgcgaagtggcccttgattacagaggaaacacgtattcaagctaagactaaatgatggcnntgagtacctcttccaagccaaagacgatgaggaaatgaacacatggatccaggctatctcttccgccatctcctctgataaacacgaggtgtctgccagcacccagagcacgccagcatccagccgcgcgcagaccctccccaccagcgtcgtcaccatcagcagggagtccagtcccggctagcgggaaaaggacaaagagaaagacaaagagaagcgggtcgacctttggggcaaaaagaaatgagctccggtcattaacctcctgcccttgttttacccactccccccaaaatccgcaagcaaagctcagaaccaacacattaaaccacatggaggaacatcaggcaacagagagtaatgtgtttggtttgaa

SEQ ID NO: 642025 - DNA, 267 bp, Homo sapiens
cggtgtataaagaaaagaagtctgatactgcaattgagacacccagaagctgcatttggcatacgtcctataaaataatgagtctactgtggtgaattgaattcagctagaaagtggtgacacactttgcatacttgaacaatacatgtgaacagaaattataacttattaatgaggttttacagcagtcacacttgacttggaaagtattaaacaaattaaacttgtggactttggtcattcgactcagtccttacgctgccttga

SEQ ID NO: 642026 - DNA, 374 bp, Homo sapiens
  misc_feature (26)..(26): n is a, c, g, or t
  misc_feature (28)..(29): n is a, c, g, or t
  misc_feature (32)..(32): n is a, c, g, or t
  misc_feature (39)..(42): n is a, c, g, or t
  misc_feature (44)..(45): n is a, c, g, or t
  misc_feature (55)..(55): n is a, c, g, or t
  misc_feature (82)..(82): n is a, c, g, or t
  misc_feature (186)..(186): n is a, c, g, or t
  misc_feature (265)..(265): n is a, c, g, or t
tcatggggttactggaagtgcgcagncnnctnagaggannnngnngaggagaggnggcgccttctcccgagccgagcactanggtttcagaggaagccgagtcccagcagcagtgggatacttcaaaaggagaacaagtttcccaaaacggtttgccagctgaacagggatctccacggatggcanaaacggtggacacaagcgaaatggtcaacggcgctacagaacaaaggacgagctctaaagagtccagccccatcccctncccgacctctgatcgtaagccagactgcctcccagccagagtgcgcacttacagcagaccggagcactggccagtggaggttctcatggaacaggtggagccacataga

SEQ ID NO: 642027 - DNA, 545 bp, Homo sapiens
catattagtactatttctccggagaaccacatttcttatacaaatgtatcagactttctttaggatgtctgggcattcctagtaggaattctcctggtgaaaagatcaactctactgaaatgaagcctccttagtattccaaagtacagattacattccagctgcatagttgaaatcgccgcggaacatggttttaatataacatatttggatatagatgaactgagcgcgaatggacaatatcaatgtcttgctagaactgaccaccagccccatcacagtctgtcatggctctcgtttctgttgtagaaatgcacaaatgtgatgcagctcacaatgctttgcagtattaaaagataatagcagaaagcacagtagatctggagcaacttaaaaaatctttcagtagcacataaaaagttcccctctggccccttcccaagtaaaacttttaccgtagtgtttatgtcttgtttctaaatctcttcatagattccatcaacactccagattaattatctcctcatagttgttattaagctctt

SEQ ID NO: 642028 - DNA, 637 bp, Homo sapiens
  misc_feature (116)..(116): n is a, c, g, or t
gggcacacacctgtaatcccagctacttgggaggctaaggcacaggagaattgcttgaacccaggaggtggaggttgcagtgagcccaagatcagtgccgcctagcattccagccntgggctgactaagagctgagacctctcatctctaaagaaaaaaaccaaaacaaacactctcggaaggaattctatattggtcggcgaggttgcagtgatcatatgggggtctttgttattttggccctctgggtcattccggtggttccctgttggcgccccagttttggcgtttggtccgcgccatgggtggtcgcatatcttgcgcttgcggctctccccttgatgtatctcgggggggtcgctcgtttttctcccctcattctcggcctcgcattttggttgcgccgcgaggtgggcttatacgtccccttcggcgactatatcacgcgtagagcgcccccgtggcccccaattctgtccgctgcgctttgaccttccgcctcctgcgctcgtttgcccgcggccggccgcctcgctgtcccgctggtcctcgatcgttcgtccccctctcctcgcgtgggctcttccttcgccactctgcgtcgcctgctccacggtggccctcgctgcgtcccccc

SEQ ID NO: 642029 - DNA, 208 bp, Homo sapiens
tctacctactaagctcccccaatatcttctattgctcggtctggctatgcaccggcaggtaatcatcttttctctcttctctaggtgcctaaacttctgcagaggggcggctctacacttaatactacggcttcctaggactactactattataatcagatacgggttcaggatcaggtagagagccgggcaaggggtaccgagctcg

SEQ ID NO: 642030 - DNA, 818 bp, Homo sapiens
gtatcaacgcagagtggccattatggcggggggggttaaaaaaaaaaaaaaaaaaaaaaaaaaaaaatttgtgggcggcctgggcctggaaaaagtttttaaaaccatcgttgggggcggggccccagaggataagtagagcaggggactaaacgagggtgcccagaggaaaggcgccgggggcataacataagggctgggttccctcaacaaaaataaaaaagcggccgggggggacacccggggtggtgcttggaacagatctcgcaggatggggagtccggggagggggccgatacggggatcggcatcccaccggggaggtcaaagggaagcatccattagatcaaaattcaccccccgcccgggtgggatggaacacccaccgtacaaaacgatcgccgactcccatagacaccaattcaccgacaaccggattgcaattgaaagcccacacgataagaacgctagaacaaactacataacaggcgtcaacacaaaaatggacaaaccaatacagtcccagagttcaccacagcgaacagacaaataattgtaattcgatacattacgaaaccggggagccaggccagcgaaacaacggcatagtgcgacgacaaccatggtccaccgatacggccataccaccccaacgccccagatgagtaatcactacggctaaacacggaacaacgaaccaaacacgccacgacggaagcaaatcccgccacgcgaaaggagaggaaacacaacaaaaacccgaacactcggctccgcaaccattacgagctggcaactgaccacagcaaaacagacaa

SEQ ID NO: 642031 - DNA, 417 bp, Homo sapiens
cgtcatcgctcgtccgggcgccaaggacttcaactacgtcccttcacacagatggaggtggcatgaacagaacagctgaactgcagtatcgctcgccggtgcaccagtcgcatcagtcgccaacatccgtgccgcgctcaccgttcgacgccgcaccagaaagtcgccttcattagcgcactggagagggcagattcgccacatctgggtacaagagaggacattggtcaaggcaaagtcaacggtcaactaaagggtcagtatgggactccttctggaacgcctagcagacacaccagtgttaagaaggtgaccggagtgggcggaaccacatatgagatctccgtgtgactgacagctcggggagccaatgcctgtgaggaacagcactgccatggcaaacccaactcgtgctca

SEQ ID NO: 642032 - DNA, 114 bp, Homo sapiens
ggcttctggggcccctcaccgcccctctccgggctccaggcgtgttcctgcctcagggcttccctgatagcgtcagcgcggactacttgccctaccagctgtggtattccgtgc

SEQ ID NO: 642033 - DNA, 301 bp, Homo sapiens
ctaaaaatttgctttttcattttgtgcacttgccaagttggaaatgtcatcaagtttcatcaagattgaaatggggtccaatttgctaaaaatgcctcatgcataaggaagttttgtgctctcttccacatgggagtcagcctgcacaatacattatgcacctcgtgctggaaagatctcgacatgccactcaaatactgaaacggagggagcagtcacgcttcagggtctttgcactttcagagggaggggcccctagccctcaaatattcaattcccaaataaaaccgttctatgtaaa

SEQ ID NO: 642034 - DNA, 231 bp, Homo sapiens
ctcccgacggggtggtcgaggcctgcgctaccatggcatccagatctgggagctgacaggctggagagaacccttcttgtctggtacctctcagccctttctggaatcccctagtgcggactccagtccttctctggggtccaggagtccagactcccagtgccctcctccctcagtcccaggcaggacccaggagcctggctcccagcccaaccaccccgtcgggtggag

SEQ ID NO: 642035 - DNA, 164 bp, Homo sapiens
cctagtaatcgagccggtacctcgcgacgtgtatccctgccttttatggtttctcggttagttgttccctcatttctcaacttagtcctcaagacttctgaaacgtctgtgtgccaggcacttggtgtgcctgataataccaaaagggataacacgttcgcgag

SEQ ID NO: 642036 - DNA, 150 bp, Homo sapiens
acatctgtgggatcttaccttctgtatagagtttcagagaggtcataatccagaaaacttatcatgttttcttttattccttttggagaatatctgttcagactcaggtcatgtgtttccccattctccacccccattagctgttagctt

SEQ ID NO: 642037 - DNA, 803 bp, Homo sapiens
  misc_feature (159)..(159): n is a, c, g, or t
  misc_feature (350)..(350): n is a, c, g, or t
  misc_feature (360)..(360): n is a, c, g, or t
  misc_feature (370)..(371): n is a, c, g, or t
  misc_feature (408)..(408): n is a, c, g, or t
  misc_feature (416)..(416): n is a, c, g, or t
  misc_feature (428)..(428): n is a, c, g, or t
  misc_feature (460)..(460): n is a, c, g, or t
  misc_feature (494)..(494): n is a, c, g, or t
tcttccagcttccagcatagttctatgcttagcaaaacacttgcttgtattaaatgcttgctttgcattttagccaagaactttaccctcattttacctgtgtagagatcatcctttgaagaagccaagaagaagaatttactcaaggataaatgattntcattcttttcctcttatggcatttgatgtaatttagaagttttcaagtcatagttaaactgctttttggttactcatgctctagtaccctactactaaagtaggatttgtgggtaaaaaaatcaaatcagttaggacagtgctgaacattatattctacacaactcttccaaaggattcacagtgtactntagcatgtanaatgcctaannggatatttagtgatgaatccctattaaattaactaantacatgtnttcaagcactanattttgtcagatacacttattacagacatggnataatttaaaactgtctcagccttaattagactnctactgcttagctatgatctgatagtaagtggataacccaaaaaaaaaaaaaaaaaactgagggggccgtaccaatgccttagggcgatacaatatggcgggttaaactcgactgaaacctgcgtaccaatatgctgagacaccctttcaattggaaacaaagccccccaagcttcaattcgacgatcaaggcattacgcaattttaaacctaaatgtgaaaccttttaccagccagtgaacctttaacggcccacaaccacattttggggggaataaccccagacctttgtttagatgcgtggagaag

SEQ ID NO: 642038 - DNA, 414 bp, Homo sapiens
ggtgtacttatgacttgatgattctagtgcttaccatgcactagcttatttgtctttatgacagttctattttagttctgattgtgaagatgaaaaaacaaacacacatcaagtttaactgtacagatgaactggcggcatcaatcagcgggccagagccagaatcaaacctcagcagctaggttggcacactcagtgactgaataaccttgggcaacgttacttgacctttctgtgcctcagttttcttaccctgttaggtagggatgatattaataactacctcgtagagtttctgtgaagacgtaatcgagatatgtaacatgtttgaattagtgcctcgctaggcaggtaggtcctctgtgtattatagactaaagctgcctccatcttctaaagataagttgaaaaatg

SEQ ID NO: 642039 - DNA, 361 bp, Homo sapiens
  misc_feature (10)..(10): n is a, c, g, or t
  misc_feature (31)..(31): n is a, c, g, or t
  misc_feature (67)..(67): n is a, c, g, or t
  misc_feature (92)..(92): n is a, c, g, or t
  misc_feature (203)..(203): n is a, c, g, or t
  misc_feature (299)..(299): n is a, c, g, or t
gaagttcaangagctccttttttaaaaaatnttttgaagttcaatgagctcctttatttattcattncttattatactttaagttctagggnacatgtgcacaatgtgtggtctcggtacataggtatacatgtgccatgctggcccgctgcacccatcaactcggcatttacattagggattgtctcccagtgctatcccgnccccatccctcaccccatgacaggccccagtgtatgatgttccccacccggtctccaagtgttctcattggttcaatttccacctatgagtgaggnacatgcggtgtttggtttttctgtccctgtggatagtctacttaggagtgatggggaaccta

SEQ ID NO: 642040 - DNA, 129 bp, Homo sapiens
tcgagctcggtaccgggtgggagtacggaatattagtgtaggtcgcattgatatacaactttaaataacattctcataatgggtttaacacaatcaaccaggggctaaggtttaaaggtttacaaagag

SEQ ID NO: 642041 - DNA, 618 bp, Homo sapiens
cgcatagaggattctcagcactctgttcagcatgaggtctcagcttgaggtccggtacacacgttcttctccgagtgcaggtagtccagtgctgacacaatctcaggccatagaagcgggccggtcctcgggagaacaaacgttcccggggacaggtggaagaacagctcgcccccgttggcgtactccatgacaaagcagaggcggtcgtgggtctggaaagagtacttcagggctgtgaggaaggggtgcctggagttctgcaggacgcggttctcggtgagtgtgtgggccacctcgtccttggccacgatgacttacttcttgaggatcttcatggcgtagtagcggcctgtggccttctccttcaccaggatcaccttgccgaaagtagccttgcacagcagcttcaggtactcaaactcgttcatggtcacgcggtgcttgggcttgtgcaggggacactccatctcttcaggccctgagttgcactgggtgagccgaccggaagtcatctcctcctcctccgcttcttgatgcgtcagccacagtctggatggtggttgtccactctccgctctcaggagtctcccaaggtgtgcgtggtggtccgagtcg

SEQ ID NO: 642042 - DNA, 254 bp, Homo sapiens
cttcttctttctacaatattatgtactctactgatatctaaatatatgatattctgcccttcctgctaatgcacacactataggaggtattagtgctctggggcacgaagatgatttttggctcatatactttacacacacccacacatctgggagcatatactctattacacaatgacacattgtcacaaatattatatataagaggcgctcagcagttatgaggtgatgcatcagctcactagtaggagact

SEQ ID NO: 642043 - DNA, 336 bp, Homo sapiens
atgaatgccagggacagtgtgctcagtaaagtcttccatccaaaaggggcagggcacggtggctcacgcctgtaatcccagcactttgggaggccaaggtgggcggatcacctgatgtcaggggttcgagaccagcctggccaacatggtgaaaccctgttgctactaaaaatacaaaaattggctgggtgtggtgtcacatgccagtaaccccagctactagggaggctgaggcaggagaatcacttgaacccgggaggcagaggttgcagtgagctgagattgcaccactacactccagcctggatgacagagtgagacttcatctcaaaaaaa

SEQ ID NO: 642044 - DNA, 747 bp, Homo sapiens
cttctcgggcaaccagcctccacctcccgggttcaagcgattcttctgcttcagccttctcctgcgcagctgggattacaagtgcgcaccatcatgcctggctaattcttgtatttttaatagagacggggtttctccatgttggccaggctcgtctcaaactcctgacctcaggtgatctgcccacctcggcctcccgaatctctgggattacaggtgtgagccactgcacccagcctaaagagaatattttctcaattaaaaatactatagtcttcagaaaagaatcaattaaagtgatgagaaatttcaaatatattaactacaaactgcaactttgaaaaatattgcaggcaattttattaagttctacagagaaatgtcagtaacatggcattagaaataaatatagctgataaacagattaaaggttatgaatatataccaagaataattattctgcttatgcaatcgtaatttcggaaaaccattttgaaaagctcgctacatgaactggtgtttgtaaaagaatttcatatcggaaaatagcgggaatatataattgttaagtgttgtcaatgcaatgggagcaatggtgtgatcaatagatgtgtttgaaaaggacaacaaaaagaaagtggtcctcggtggcctcacctgaggaaccctgcggacgcttcacctataggaggggaaaatgatgacgctcgggcactgacagactgcgctccgaatagtccagtgagg

SEQ ID NO: 642045 - DNA, 88 bp, Homo sapiens
tctcccctcccccccttcaccatttcccctcggaggcgcttccccggggcggggagagccggtctcacccgggatctcacgggagacg

SEQ ID NO: 642046 - DNA, 251 bp, Homo sapiens
gtactctacagtgatcttataaggcgagtcgggtacttcacacggataacgagggcctcatacagcttcgaggaggagcgggcccagctgtccttcaacactgacacgctctgctgaccacccagagctgggccagtggaggacacgctccactgaccatccagagctgagccagggactcaacaatggggacagaagtcccctcagtgcctgccagggcccgtgcagtggatggttcgtgaccaaggggc

SEQ ID NO: 642047 - DNA, 422 bp, Homo sapiens
  misc_feature (1)..(1): n is a, c, g, or t
  misc_feature (13)..(13): n is a, c, g, or t
  misc_feature (120)..(120): n is a, c, g, or t
  misc_feature (150)..(150): n is a, c, g, or t
  misc_feature (206)..(206): n is a, c, g, or t
  misc_feature (295)..(295): n is a, c, g, or t
  misc_feature (333)..(333): n is a, c, g, or t
  misc_feature (337)..(337): n is a, c, g, or t
  misc_feature (420)..(420): n is a, c, g, or t
nagacgtcacagngggcgagcggcaggtgatgaaccgctgtttggtccggtactcaatatcaaggtatttgattaccaactggatattcctgatgttcaggcgcaaacccataccctggnaaccggtccggttaatgaccttgaactggncctgttcccggatgtacacggggatttgagtattgagatcctcgccaataaacagngttacgatgagccaacgttaatccagcatgctgaacgcctgaaaatgctgattggccagttcgccgcggatccggcgctgttgtgcggngatgtcgatattatgctgccaggtgagtattgcgcagntggngcaggtcaacgccactcaggttggagattccagaaaccacgcttagcgcgcttggtgggaagacaaagcgggaaaaacaaccngg

SEQ ID NO: 642048 - DNA, 235 bp, Homo sapiens
cgatgtgccaaagacccatctacatgcagaaggacaggagaccccgtagcctattacctgaaagctgcaagcagttcagcttatatgcaacctgggaggagaacaacgaagcagccagccacgacctgcgttacaccaatacagtgcgcactgagcgtgctagacaaagcagtgccacaccaatgagagccagcagcttgtatggacccaacaggggtacccgagctcgcaattc

SEQ ID NO: 642049 - DNA, 235 bp, Homo sapiens
gttttccccatttttttcccccccaggggtttggggggggtttttaattttgccccccccctttttccccctttttttggggcaaaaacccggggttttttttaaaacgggggtttgggggggggggcccccctttcccccccccccgggggggaagggggaggggggggcccggggaccccccggttttccccccctttttttttaaaccaataaaaaaccccttggttgggga

SEQ ID NO: 642050 - DNA, 921 bp, Homo sapiens
  misc_feature (106)..(106): n is a, c, g, or t
  misc_feature (155)..(156): n is a, c, g, or t
  misc_feature (167)..(167): n is a, c, g, or t
  misc_feature (200)..(200): n is a, c, g, or t
  misc_feature (209)..(209): n is a, c, g, or t
  misc_feature (327)..(327): n is a, c, g, or t
  misc_feature (351)..(351): n is a, c, g, or t
  misc_feature (378)..(378): n is a, c, g, or t
  misc_feature (392)..(392): n is a, c, g, or t
  misc_feature (418)..(418): n is a, c, g, or t
  misc_feature (420)..(420): n is a, c, g, or t
  misc_feature (497)..(497): n is a, c, g, or t
  misc_feature (527)..(527): n is a, c, g, or t
  misc_feature (587)..(587): n is a, c, g, or t
  misc_feature (652)..(652): n is a, c, g, or t
ggggggggaaaaaagaaaactacggctaggtacgaggcctgggtttgacgctcaagatggctgctccatagtgcgggcgggatgctcctggcgcggtaaaagatanctgctttcttcaggctatgtagacagccacaaatgggaagcaagagaannaagaacattantgtcttgctgatcttgcatctttaatggataanacatttganagaaagttgcctgttagttctttaacaatatcacggcttatagacaacatttcctctcgggaagagatagatcatgcagagtattacctttacaagtttcgacacagccccaactgcntggtacctgagaaactggactatnccacaccgtggattaggcaggtctaanaatatgatgcacanagacaaagccctatatacccgttgtnanataaggttcaatatggaatttttccagataactttacattcaatttactgatggattctttcataaagaaagaaaanttacaagagatgctttatctgtggtgtctngaggtcatgatgcaagaagcctttgaagtgccttccacccaacttctctccctctatgtnttatttcattgcctggcaaagaagacagacttcagttgggaagaggagaggaactttggtgcatnccctttgtgcttccaggcctaaaacaaaagaactcagtgggtttcagttcccagttgtatggctatgcacttcgttgggaaggtggagttgcaggaagggctacgggctgtgtgaacagaacatgctctgatatggaaaccaggtacttgaagagcccttcaagtgatggaggaaagtgtgtgctcaccagaagacataagctgtgtagagaagggctcgatgtgatgggtgcgaggtgaaggtgctgacttcagtgatggagctcaag

SEQ ID NO: 642051 - DNA, 952 bp, Homo sapiens
  misc_feature (137)..(137): n is a, c, g, or t
  misc_feature (186)..(187): n is a, c, g, or t
  misc_feature (198)..(198): n is a, c, g, or t
  misc_feature (231)..(231): n is a, c, g, or t
  misc_feature (240)..(240): n is a, c, g, or t
  misc_feature (358)..(358): n is a, c, g, or t
  misc_feature (382)..(382): n is a, c, g, or t
  misc_feature (409)..(409): n is a, c, g, or t
  misc_feature (423)..(423): n is a, c, g, or t
  misc_feature (449)..(449): n is a, c, g, or t
  misc_feature (451)..(451): n is a, c, g, or t
  misc_feature (528)..(528): n is a, c, g, or t
  misc_feature (558)..(558): n is a, c, g, or t
  misc_feature (618)..(618): n is a, c, g, or t
  misc_feature (683)..(683): n is a, c, g, or t
ggggggggaaaaaagaaaactacggctaggtacgaggcctgggtttgacgctcaagatggctgctccatagtgcgggcgggatgctcctggcgcggaagtggttcttcctcagctctctcctgcaggtaaaagatanctgctttcttcaggctatgtagacagccacaaatgggaagcaagagaannaagaacattantgtcttgctgatcttgcatctttaatggataanacatttganagaaagttgcctgttagttctttaacaatatcacggcttatagacaacatttcctctcgggaagagatagatcatgcagagtattacctttacaagtttcgacacagccccaactgcntggtacctgagaaactggactatnccacaccgtggattaggcaggtctaanaatatgatgcacanagacaaagccctatatacccgttgtnanataaggttcaatatggaatttttccagataactttacattcaatttactgatggattctttcataaagaaagaaaanttacaagagatgctttatctgtggtgtctngaggtcatgatgcaagaagcctttgaagtgccttccacccaacttctctccctctatgtnttatttcattgcctggcaaagaagacagacttcagttgggaagaggagaggaactttggtgcatnccctttgtgcttccaggcctaaaacaaaagaactcagtgggtttcagttcccagttgtatggctatgcacttcgttgggaaggtggagttgcaggaagggctacgggctgtgtgaacagaacatgctctgatatggaaaccaggtacttgaagagcccttcaagtgatggaggaaagtgtgtgctcaccagaagacataagctgtgtagagaagggctcgatgtgatgggtgcgaggtgaaggtgctgacttcagtgatggagctcaag

SEQ ID NO: 642052 - DNA, 566 bp, Homo sapiens
  misc_feature (11)..(11): n is a, c, g, or t
acgatccttantcatcccccttcgtcagagagcctctagtaggcagcgtgaggggaaatgtggggttaaaggccccacgcagagtccctactggggcactgcctagtggagctgtgagaagagggctactgttctccagaatggtagagccactggcagcttgtaccctgcacttggaaaagccacagacactcaacccagcctgtgacagcaggctgaactctgcaaagctataggagcagagctgcccaaggccttgggagcccaaccctcatatcagcgtgccacatggaaaccaaggagatcattgtggagtttcatgatttaatgactgccatgctgggttttgaacttgcatggggcctatagcccccttttttggcaggtttttccctaatgggaatatttccccaatccctgaaccctgattgtatgttggaagtaaataatttgttttttattttataggctcataggtggcagggatttgccttgtctcagatgagactttggattcctgagttaatgctggaatgagttaagactttgcggcactgttgggaagg

SEQ ID NO: 642053 - DNA, 1266 bp, Homo sapiens
tagtcacgggttagctttactacggcctgaaagtgcacacaactggtgggcgcctccatttcccgtgcgaagtttttccaaaggaacagtagcgcggcccgacggcgcatttcaatgtgacatgacaacctacgtccgaactgtcactttttgcgcggctaaccaggagatcttgttgctcaacaaagggagggtcacccccctttgctcccaaagaccttccgttttgaccaaagccacttgttggggcccgaggtctttctatccccattgtggggggcccctgggttcgcaaagacctgcgcttcgtggtctgaactgacattattgaaacgcacgggttctaaagaaacccgttcggaccggtagtttatcttacccccgggaggttacaaatgcgtgcgtacgtcttcgaaggaaggtgccatcgcgttaagcaaaacccccttgggaggagcacatgaccagtcttgggatcgaccacggaattgtcctttatgtagggcatcggacgaggctataaatgtcctgctgaaacaaattatggcacttgtccgtggaacccgagtctcgccactgtctgcggtgttcatttcatcatggcccatctcagtgtagagcgtcaacagaggagtcagcgtgagtgatctggcaatacaatctcgttgagggaatcggcggcgaaactggtgatctgtcaccaaggcgactcgacctgcgtccaagaagatcgtgacaacttaaatccctattcttttcagcgtcccggcccaaaggactgctcaatcagcactcatgatgtgtatgctctcgtgtgtgttgtgcgcgtatgtagtgcgctgtgtgtgttatagttaggtccatgtgtacaagcctgtggctctacctgcctgtcacggaggtgtagtacagctgtcctagcgtgctgcaccagttctcctgaccctgcttagagactgttcttaggcactgcaaagggcgtactgggcacacccccccgctacgcaaggataggacgaagaccccctccagagcaataggaggccccctcagccctagtggttacgagccgctgatgtatctaagaagcatgtcactttcatgttcctccctgaactccctgacctgagaagcctggggccttggggggcagttattgagcctcctctcccttctgtgggtcgctcacagagccatggcccatgggaaggacagagtggtgtgtgttcttggggcctggataaatccttgcggctcagctccctc

SEQ ID NO: 642054 - DNA, 281 bp, Homo sapiens
ctgccagactcgggtccctctctcggttgggagcccactcccttggtctcggtaccgagggagctacctcctggcctaattaaattatccactccttaaaactactccacataagtccaggtggttttatctaaaccagcatgaggacaaagaagccggagtgatcttccactccaggaggaatcaaatcaccatctacaggggaagctgaggcaggaggatcatccgagcccaggaggctgaggtcgcagagaaccaagatcatgccaccacactccagc

SEQ ID NO: 642055 - DNA, 423 bp, Homo sapiens
attcggcacgaggacaatcaaatacttaagttcttgaagagctgggtggtgggcgggggtcttcccaggtggtcagggagatgtgttagtgtagcacttggaagagagtggaacgaccaggcaaggatgtgccgtggaggtgggcagtgggagcagcccagtgtcagcatctgtattggttagaagaccaccgctaatgaggaggagcgtctctaccctgcagctgtctgtactcctgtgtcttccgtaatgtgccaagctctctgaatatatgcaaaactagtctgcaaaaagccatatgtctcagcatctggctttatttctaagtgttcaggtggaatttaagccgcgatcaaatttacaatgtcactgccagctctggacacttacttttggaataaagcaaagagtgaacactaaaaa

SEQ ID NO: 642056 - DNA, 854 bp, Homo sapiens
  misc_feature (460)..(460): n is a, c, g, or t
  misc_feature (560)..(560): n is a, c, g, or t
gctgcttgtaggagtacccgccaacaagcgggaccgagcaggaatccgtatctgggattcagaatgaagcggagactcagcaattcgagatgtttatgcgcacatgaaaagcaggatttcgtgtcagtacttctcccagatcgttatgggtgctgactgaggatgagatggggcagcccagagatacggagatgctattgcccgggtcaaggaggtcctggagtacaatgtcatttggacggcgagtataagccggggttgacggtggtagtagcattccgggagctggtggagccaacggaaacaaggatgctgagtagtgcgtccagcgggcctggagctgtgggctgtctgtgtggagagctgctgctaagcttgactgtccatggtggtacgatgacatcatggcattcactcctcttaaccggcgtggcgagcagatggtggctggctaatcagnaaggccggggcgtggggtgttggatgccattcaatggatgactaaggcgtcgcaggtaagctagggtagtctagggcggctcgctgaagactcgtactgncacgggcagctaggacctagttacacgtgtaatgcgtgaatcggaggctgtcgttctctgcaagacgttccctaataagacgtgcagatgtgggagcaagagcccctgaggaccgtctctcaacagttcccccgcagggacacaatcgtcggagtctatggtcatgcattgcacttgaagagcgagggtgcagaatcgtatgagtgccagtacaaggataagcttgtctaatccttttacccttcgtatagctgcagggaatggacagtggcatgaattcgatggcgagaaggg

SEQ ID NO: 642057 - DNA, 582 bp, Homo sapiens
  misc_feature (526)..(526): n is a, c, g, or t
  misc_feature (537)..(537): n is a, c, g, or t
tcctgcatctctttgactctctgaagcccccatcccaggttgagttgatcttctacatcttgtctttctgcaagagcgcaacagttccctttgcatctgtcagtcttatcccatactgcctagcccaggatcctgggacagacacacaagaagtctttgtaaggcatgcagagtctttggtatttaaagtcaaccgccatgcaaaggactaggaacaactaaagcctctgaaacccattgtgaggccagaggtgttgacatcggccctggtaagcctgtctttctttgctatcttaaccaaaaggtgaatttttacaaagcttacagggctgtttgaggaaagtgtgaatgctggaaactgagtcattctggatggttccctgaagattcgcttaccagcctcctgtcggatacagaagagcaagcccaggctagagatccaactgagaatgctcttgcggtgcagaatcttccggctgggaaaaaggaaagagcaccatgcatttgccaggaagagaagaagatnaggagaagganagtgtttatgtatcgagcaaaccagatgcaatctatgtctaccgg

SEQ ID NO: 642058 - DNA, 212 bp, Homo sapiens
tacaggtctacgtactaacgtgtagagccactggtgctgttctcactaagattccatattctgctgtgagtctccagacccgtgatgcgtcggagatcactaacagtgcttccaggcacagagtaaaacttcagattcatggccccgcaacacaagagctttattaggagggatttcaacatccccaatccacttccaatcatatcgagggg

SEQ ID NO: 642059 - DNA, 116 bp, Homo sapiens
ggccccgcatgcaccttttcttcaccttcatcctcatccctcttcgtcaatatcttctaatccttcctcctcttcatcatcatcatcatcttcttctccttctccttcttcatcat

SEQ ID NO: 642060 - DNA, 283 bp, Homo sapiens
gctcgacatttagcagagtggccacgtacccacctgaaactttaaaagtaagagtgggggccgggcgcggtggctcactcctgtaatcccagcactttgggaggccaaggcgggcagatcacctgaggttgggagtttgagaccagcctgaccaacatggagaaaccccatctctactaaaaatacaaaattagccgggtgtggtggtgcatgcctgtaatcccagctactcaggaggctgagtcaggagaatcacttgaacccaggaggcagatgttgtggt

SEQ ID NO: 642061 - DNA, 1050 bp, Homo sapiens
agcggcctgcgtcatggctcaaggattcaatgcatattttaaagaatttattattaaatcagttattgtgtacagatatgtgtctagcaaagccacacaaggagccctacaccttatacccacagtactctaccactgggagtatttttatatcataccactagaccaaagaactcctgaggtcactatatatgagactaccacgaagtccattgacgtctaaaatccccagtacagtatagtaatatacaagagacacaaccccatgagtcccaactaggactcttaacgcccacctatacagagagagacaaacatactaaaaaagagaaccttgcacaccatagagcacccccattgtcacagacaccttgattagccccacatatagcccttgacgtgagtccccaaagatgtgaacttaagtagactataagtggcccatggacccaaggacaattgacaaacaccccctatgtaatacattgtgggactgacagctaatggcatgacacagtggtgacgaccccaatccaatgaataggcacaatggaaacctattgatgacaccacaaaaagagtgcaaaaggtacaaaaaagtttatgggagcactgagtcattaaaatacagttagaagactaaaggagaaaaagtgtagccaccaccaatacattaataaccacatagggagacccatttcacccgaatgaactggaaatatgcagaaaaggaaatgcaaacgtagtccaactccaaattccatatccgaccacgaaaacaaaagctgagaacagtatccacacttttgcagggcaaaagacccccaaaagaaacgcacacaaaaacacccaacagaaaaaaaaacccaaataagaaaaaggaaaccaaattgtgacgacaacaaaagagcaaatcgagagggaggaagactacacaccgcgaagaagcaaacagcaacgagcaccaaaaacaaagggacaaaagatatcaccaccaacaccaaccagaagacagccacaaaaaaacaaacgaaacagagagagtagagg

SEQ ID NO: 642062 - DNA, 383 bp, Homo sapiens
  misc_feature (36)..(37): n is a, c, g, or t
tgttgcccaggccgagatcgcaccactacactccanngcctgtgcgaaggggagcaagactccctctcaaaaaaacaaaaaaacaaaaaacaaaaaaacacaacccaggcgcagtggctcactcctgtaatgccagtactttgggagctgacgcgagtgaactgcttgagcccaggagttcaagaccagcctgggcaacatactgagatctcatctctacaaaaaacacaacaattagctgggcatgatggcatgtgcctgtagtcccagctactgaggaggctaaggtgggaggatcgcttgagcccaggaggttgaggctgcagtgagctataatggcaccactgcacttccacctggacgacagagtgagacgctgtctc

SEQ ID NO: 642063 - DNA, 168 bp, Homo sapiens
ggtcaatgttcaaactgaggcgacgcagttctttgttttctatctccatactctttagtgtctggataatagataccctgacctgatgcgtcgtctgtttcgaacattgaccactgctgcgatccgtagacttgtttaatcattcttacatacttccttaagggtatc

SEQ ID NO: 642064 - DNA, 1257 bp, Homo sapiens
acttgccccatgggagactaggagactgtatcagaaacatgattacaggcacgtctccggctgactgtgcttgtccatgagttgtgctgctggtgttggtgaagtgttgaaggctggttatctccaataatgtcgcagacccgagagcagtgcccgtatcatggactgtaccacttcgtgggctgtgaaacaggcgtagttgtgtcgagtgttaatcgatcagtggatatccacatgagggcctcccatattcggaggcagacacgagaatatcgaggaagatagttgaaggaagtcggtcactgacatcaagaaaaatcgtcatacgaacacctcgacatccagatacgccagtattgtgcctaactattctgggtctggaattgcgtgactaagcgaatgcgtggacgcccaatgtgctgtaacactgccgtgggattcactggcgatggaaaagatcgcccctggtaaggattggccaaatgccaggtggaacctacgacgtgaggtatgacggctgtccgtggattctgtgcagcttcttagcacacccgaagtctcgatccaaaccatgacctacagctccatttggagcacatgccatcttgcccaggatgtgtctctatccaaaagattgggtgagaaataagcgtagcgtgataccctggttgggcgcgacctggatgagactggatgttgcgtcaaacatgccctggttcatgggtagcgctcagccatttagggcggcccaagttcatattgtttaacacactggaacacgttcaccaactcgtgatagataaactggtccccgactgcaaagctgtctatgaagttgaaagctcttgtccttgagagcaccaacatgctggggcttccaatggtcggagcaaactggtgggtctggccaaacggacaggctccgcacggtgagccacaacgtttgcttgggagacagctgacatgaatgaacccgcaccaaaatggaaacgcagccttggcgttccgcacgcctcagaccgcgaacttgctccatgatgcacattcccggggccacacttacagctgccggaaaaaggccccggtcctggaacacgcgagaacggaataccactcggggttgccaaggttgggatgatgccgggcagcgaaaagacctggaatggaccggaacctggcagagagactgggaagaaaggcgccgaaccattcacgtcaggctgatccaacctgatgaagcacatgctcgtgacagcc

SEQ ID NO: 642065 - DNA, 814 bp, Homo sapiens
gatcgtcgtaggtgccgtggtagtagacgtatagttccatcggagttgtttgcagtagcatcccttggtccacctgtgggaaggccccataacggagacaggcttcctctaggtgttatgagggaaccaatcagttatctgctactgcattagggttggatacactcacagctccacgtccggattcggtgttaacagagatattagtctgaatactgggttttaccggtgactatgcttgctcaattgcatttgtgcaacattctgttgatgtttggcacccatgcctgtatcggtgaaactattggggtgcaattgtatgtgtgctctatacttttggaaaacgtgctatagatactgtgttgcctgaagcgaagcgtttgtgatagtatacgtctgcttgtggagagaccggtgacgtcgctcgtgtctgttgaaatgcctagtgttgaggaataatgtgaactgtgacattgtgtttgaaatgacacaacttactgaaaaaacttgtgctgaataatttgctgtctgttaatcacattgcaatgatggttgaaaagaactacactaattgacattgcgtgggctttgtgtgctccctgttgtttaaaatgtcatttgttgagcaagagttgtatagtattgatctacttacttgaggctgtcaatttttcactacagtgttttgtaaatgtatccaccgagaccatgatgccctgttttgtgcatcaacttgtgattattagtattcataaaggacatttatgaactgaagtgtatatcttacaagcatttaacatctatggtctttaga

SEQ ID NO: 642066 - DNA, 413 bp, Homo sapiens
ccatttttaacacactggaggggacttggcaaggctcatgtgttcagattcttctttgtttttctgtgtcttcagtgatggtattttttttctccaggtatatggtgggtacctctggaataaaggttttatgacctacacaaggggaagagcagctaagtttcatagcctgcttcaggggagaagggatgaggggaagatgagagtgaccttcctgcttttactgttttctcaaatgtcaaggggtcatattttggggtagcatgtcctgaacccaaaggatctgacagactatagaagaatgggcattactgctgaatctggttcagatctttaaatttataactagggttttccaaaatagaaaagaaatttttttctattttttcttgttgttgactcgttgttgctcc

SEQ ID NO: 642067 - DNA, 212 bp, Homo sapiens
aacaggaattacgctacatcgaggcgttgtctgccattgttgaaaccgggcagaaaatgctggaagcgggcgaaagtgcgctggatgtggtgacggaagcggtgcgtctgctggaagagtgtccactgtttaacgccggaattggcgctgtctttacgcgtgatgaaacccatgaactggacgcctgtgtgatggatggtaacaccctgaaa

SEQ ID NO: 642068 - DNA, 553 bp, Homo sapiens
  misc_feature (369)..(369): n is a, c, g, or t
  misc_feature (420)..(420): n is a, c, g, or t
ggccacacaggcccgggaccatgggacctgttgtacgcccgcgggccaagaatgtgagtttcgtcccctggatcctagcggagctgctgggcgctgcgctgccagcgaatccgttcacacccggcgtgcatacctagacacgccctggggcctcggccaaacacttggacggcatgtgcctgcgcactaatttttccctggaacgggttgtgtagagatcatggaggccttactcggtgcctggcgctggacacagtgctgtgctcaagctatctgctcatgttacaagtatacccatttcacaggtgaggcaactgaggctcggcgagtcaggcgactagcttatggtcacagctccagacccgcggngagcgaggatcggaagagtagcttttagacacatgtagcgctcacattatnttgtcttaaccgaccctggtccgcagctcttttggcttaaccgaacggggacattttggactggacccctccggtttcggctaattcttggccaggtcacccccatagactttgtgctgtggagggtttgttt

SEQ ID NO: 642069 - DNA, 386 bp, Homo sapiens
  misc_feature (311)..(311): n is a, c, g, or t
  misc_feature (329)..(329): n is a, c, g, or t
tgtgaaagcacacaccgtggggttgcgccgttgtcctgtctaaaaaagttactgtaaaacttcgatcacgccgtcggcgctcatgttgacctggctggtgccggcttccacttcaggcgtcggtgctgaatcggccatggcggctttcatcatcatgccgccattgcgggcgtagggcatcgggtagccattagtgttgaagttcaggttgacgatcttgtaggccttgccaccgagtgcatcggtagccagttgcgcacgcgccttgaatgcagccacggcatctttgagcagcgcatcttcgctggccntgcgcgtggcatcggcgntggcgaagtacatgctgtccatcttcagagtgtggggtgtgctttcacggggtatcg

SEQ ID NO: 642070 - DNA, 157 bp, Homo sapiens
  misc_feature (147)..(148): n is a, c, g, or t
tcaccactctccacttcacatgtatagtataagaaaagcactacctccatgagaactataccaccgatggaattgaagtcgtttgtttaacgctgtgtgaatataaagagtagtttgcagctgtgtggtagtggtatgggtaccganngctcgaatt

SEQ ID NO: 642071 - DNA, 939 bp, Homo sapiens
tataaaactgaccctgtcttctggatgaacggtcccttacggtagtccttgactgggtgactaaatactgtctacataatgatagcatatacctacggaggatgctctctcttcatcgcacagctatgtatgcttagggtctgtgtaatctagtgaaatagagatatagagtgcctattatgacaatgaaggtaagatgagccatatgtgtctgtcgactctattgacctcaaggggaagctgaggcaggaacatgactctgtggggcgcgagggagggaaggagcccttaccgttcgtagagtaggaatgtagggattccgaaaaggatatttggaatccgttagtgtccataaagtgaaagtgctatagtttggttagacgtgaacactgttgataaagagggtcgcagtgttgtgattaatttggttagacgcaggaaagattgctgggttttaattgttcaggtgtaaaatatccgggcctaattcatatctactcgattctacctcaattgttatgtctgcataatgcttttgattatcgtactgaaatatccttgtctcattcatcagatgatacaacccaattgttcagtacaattgtagaaagatgtgcagtaaggaataaataggatatatacacatagtatattcgaggtacctcagtgacaacagatatgttgctggagtgagaagcgtaggtgtatcagaatacgatttgagaggaagacaccgtcttgttgaatgtcagaggcaggtgtttgaaataaggcttttgtaaagcttttcattgggaggtaccaagtatctacttggggaaggggggttccacgcagggaaataatatgcagggtggcggttgcaccggtatgtgtaaaactggattatcacagggggggaccagacaaaccgggcgggggggaaaggggcccgcaggg

SEQ ID NO: 642072 - DNA, 477 bp, Homo sapiens
  misc_feature (197)..(197): n is a, c, g, or t
  misc_feature (277)..(277): n is a, c, g, or t
tgaggatctcactcgatccgctgatccagcacgtatctcccatgcgcagtggagccccagccaagaagcccgccacaccagcagaggattgacgaggattaattgacatttgaccttgtttggcagtgacaattgaggaggaggacaaggaggcggcacagcttgcgggagtgagcggctacggcagttacgcggangaagaaggccaatgaagccttgcacgtggtgtgccaagtcctcctatccgtgctggatgttcaagccttgggggatgatngagaacggactattggcccagcttggatggccttggttgtgcgctctatccgagcttggacgtgggctggtcctgggggggcttccaaagctggttgccctgtgggcctacgcgtatccgagaagctacagtattcagtgtgtggtgacaggacgacaagtgtggggacatgccttgcttggatccagcggatcgcagtg

SEQ ID NO: 642073 - DNA, 124 bp, Homo sapiens
ctagaggatccccctttgaaaaaattaagaaagaaaggagattctgctgaatgtctaagtttctctggaagatggactgactaagagagaaactgaagcttgggctttgggaggttattggcat

SEQ ID NO: 642074 - DNA, 282 bp, Homo sapiens
  misc_feature (37)..(37): n is a, c, g, or t
tgtgagatcttttcagcaaattgcgtacgtctcctgncatgctcaggccaggcacccggaattgtgccctgctgtagtccgtagttattcttctcgtttcgctgttggtgcgacgtcacttatttctctatccatgctcgatcgccaattacactacgatgtactagatgattagactctcgaggtcagtacccacgtggccttcagctttgacctgatacatattcatcacaatttgcacggagtccctgtctcggttgaacgagacaggaccactgaggc

SEQ ID NO: 642075 - DNA, 137 bp, Homo sapiens
  misc_feature (8)..(8): n is a, c, g, or t
  misc_feature (61)..(61): n is a, c, g, or t
  misc_feature (78)..(78): n is a, c, g, or t
tcccccgncccggtgtgcgctcggggacggtacgtgaccgaccaaactaaccaactacacnggacctctttcgacggncctgtaacttggaactgacgtccacctttacacactcctttaaccgacggactccactt

SEQ ID NO: 642076 - DNA, 106 bp, Homo sapiens
gatcgacaggactgcagctaaattccaaataccagagactgaatttcagccttgctaagggaacatctcgatgttgaacctttgtgtgtttgtacagggcattctc

SEQ ID NO: 642077 - DNA, 146 bp, Homo sapiens
  misc_feature (73)..(73): n is a, c, g, or t
gtcttcgtagccaaagatagagagttgataaagcagcgggccatcacgagatgtaacttacatagagatctanctctctgtggactggtgagaactactaagactaaacttagaaactaagacatctggaggcaggaatgaagcac

SEQ ID NO: 642078 - DNA, 371 bp, Homo sapiens
  misc_feature (280)..(280): n is a, c, g, or t
  misc_feature (364)..(364): n is a, c, g, or t
  misc_feature (369)..(369): n is a, c, g, or t
gattccattgtaagacatttattctcccctaaattaattattaattttaaaatgtaatgcaatcttggctggatgcggtggctaacacttgtaatcccagcactttgggaggccaaggcgggctgatcacttgaggcccaggagttcgtgcccagcctggccaacatggtaaaaccccgtctctattaaaaatacaaaaattagctgggcgtgatggcgcacgcctgcagtcccagctactcgggaggctgaggcaggagaatcgcttgaaccggggaancggaagttgcagtgagctgagattgagccactgcactccagcctgggtgacagaacaagactccatctaaaaacaacaaaaaanaggtnaa

SEQ ID NO: 642079 - DNA, 223 bp, Homo sapiens
  misc_feature (22)..(22): n is a, c, g, or t
atgctaggattatccagcatcntgcttcgcgcgtctgtgtggctcagttgcaagtttatgggtatcactattgggtgcatcagaccccacaaagtgggccagttccactggcatcttgattcataccagcttggttggtgcactctgctgctgtctcctttggtgtttctgtcccggtggcacgggatcattcgttggcagcgtcccggaagcattttgctag

SEQ ID NO: 642080 - DNA, 247 bp, Homo sapiens
ccttgatgttatcataaacatgtacttacctaagtcctgtcctttggcaaattatggggtatgagacccagcatttttgcctttccctgaggggtcaatttcagcgatcctacccattccttttgaagcacttatgctctttttatatggtatgtaagctctcggtttggggagtaacagtgcaaaaatttacctgttttgttgccacatgtttttaaactttccaataaatccccttttactgcca

SEQ ID NO: 642081 - DNA, 611 bp, Homo sapiens
cccacctcccaatatctcatcaaccaccgacttatccccccccccccaatgactaatccaaactaacctccaacaccaatgataacccatacccccacccttaaggacgaacctgatctcttataactagtatcccttaatcatttttattgccccacactaacctcctcggactcctgcctcactcatgttacacccaccacccccactatctataaacctagccactggccatccccttatgagcgggcgccacgtgattataggctttcgcttctaagattaaaaaatgccctagcccacctttttaccacaccaagggaacaccttacaccccttatccccatactagttattatcgaaaccactcagcctactcattcaacccatagccctggccgtacgcctaaccgctaacattactgcaggccacctactcatgcacctaattggaagcgccaacccctagccatatcaacccttaaccttccctctacacttatcatcttcaccattctaattttactgactatcctagaaatcgctgtcgccttaatcccagcctacgttttcacacttttagtaagcctctacctgcacgaccacacata

SEQ ID NO: 642082 - DNA, 1869 bp, Homo sapiens
  misc_feature (1519)..(1519): n is a, c, g, or t
tgacatattatatataatagtattagaactcattccctgaactgatgtaaatcttcatagtgtcagacatactgaccaaaaccacaatctagactacaaagtatatggtacaagagtactcaaattgtattatttataactcttccgcagttggcaaaatcttaacaggaacggtatctcctatattttacacgaatttcattggtcccaccttttactaaacagtggcagcagacttttcacacgtctaaagcaactactggcacatatcagtcaccaatacagtacaacttctctttctggccactatcctccagtaaccaaatttagccacttatacactctctggtagggcccaaattctttactcatagggacgtttaaagctggattctatctcaaaaaactttaacgccacgaacgtggggtataaaaacaatttcctggttgtcttcgacttaacggtaaaccttgaaatagcaattattaaacgattaacaatcattaacaccacacaagtttggctcataaggtttggcactggttcaaccaagctgtgggacaaccaggttcgtacttcctcggcgcaacaactaacaggtcaattgcatcctggacaccctcattgacaacggcccaaatgggtctcttaagaacagccatctgttacttcacattacaacccacagcgcacaattcagccccaaatctatgggtaaggccaacttttctcgacacacgggtacaactcactcatgatgcatcaacacacaacgcgcacagcagtcacttttctgccacaataggtgcttcaactaaggcgcgaacaacagcgtgactccacataaggacagcagacctctttgtccaatcacaaggcctatagggacataatcgatagcggcaccatgctgctgtgccgctaggctaccatatgagttgggttgcggcgacatatagatcccctttaactcaccaacgttgtcggttccacacacacacggtcttcattacacatatcaacaaatcacacgtgtgggctggtggcacacaacacttcatttccccctcaacaccacactgtgcaggcggcgcacacccagaacaacaggcgggtcggcacaaccacaacttctcaaaacgggcgccaaacacgacgtgggatgacacacacagtagcacaaccagagatcaacaccgggcgtttaaaaacagcaccagcggagctcaagagtccaaagacaacctcctccagtggtccgcaaagagagatcgcataagcgaatgcgtcaacaacatataacctagacaccaccacactccaacagaccaccgtgcgctatacaccacaacgcggaacacgagcttagaactatactatggcagctcgttgcgaccgcacctaactagctagctcgctcgaccgcggcacactcaccactcccacttcggactacctgctaccgctcgcgtcactgctcttttgtcttctttgttgctcttatgtaataatttttgncacaagccacccacagcgcaagcagacagtaccgatcccgcaccccctcgggacgaagcaaacgagcagggaagagaaagagaagtaggcgacaggcgttaggagcaaggcagcacgccggcgcagacgcgaggaaagcaaagcacagagagcacgaacacacaacgagagaacagcgacaagagaagcaggaccaggagagaagaaggcagcgagaacgagaagagtaaagcggcagtcagagcagacacgagagaagcaaaacggagcaggaagaggcgccgcaacaacgacaccaccacaggacagcacccaagaccaaacacaccagcacagacgcaacgggaacc

SEQ ID NO: 642083 - DNA, 377 bp, Homo sapiens
ggccaatcagcaggatgtgggtggggtcagtcaacgggaataaaagcaggctgcctgcgttagtagtggcaattggctcaggttctcttccacgctcacgctatgggagttaagttgagtttgatctttgagataacttgctgctggtcattctttgggtacacacatgagtttatgagctgtaacactcttcgtgaagctctgcagcctcaatcctgagggcaccgagaccatgaacccagtggggaggaatgagtaactccagacgcgctgcctttagaggtgtaatactcactgtgacagtctgcagcttcactcctgaagccagtgagaccacaaatccaccagaaggaagaaactccaaaaaacgtcttgaa

SEQ ID NO: 642084 - DNA, 304 bp, Homo sapiens
agaacacgtgaaatggagaatttcagggctaacatttcttgttttgtttctgaaaacatcggcatgtcctaaaaagtgtcgcctgtgcccatcatctctcaggcttgggagcaggacaccgccggctcactttaaagccaagggaaagaatttggacaaccaactacgtctggagaagacaccaatgtcagcagagctccgctttcatctgtgggcgaaggattacctagatgccaagctacctaaaagggaagcgccccctgtcctatgatcacgtgacttgcttcaccttgtcaatcacttg

SEQ ID NO: 642085 - DNA, 721 bp, Homo sapiens
gccttagaaaattagatccaaaaaaaatagtagagtttggggaaaatgtcaccctctgtttaaatcttttgtccctgtagagcaaagctgaaaaaaggtattgcaataggaggcacaaatagaagaaccttgagtgtgatcttagaaaagaagacgatggatgaatataggtgaattagaattgaagctgatgccaattttctgattgtaagtccatctttttccattataggattaaaagcacaagatttgttaagacctgaaaacacatactaattgagtcctgaaactgagtgttagagtaataatgaaaggaaaatacttgcattatttcaaaataccccaaggtaccttggattgagtccgatcattcccagttaaacattaattccattgtttgcagagtgatacaagtaaaccaagatgccccagtgctctgttagaagatgtgattgacaaagctcctttctgcaaatgtttgcccattctgtgactaattcataaaagttggtttgtttaatttttaacacaagtggaaacaatgatacaaaaaggacatgtgataaaaaaattgttttgggtgggacaggggcctttgaaaaagcttttaaaaacacattgggtggggggcgggggccctgagggtagggggaactgtggctatcaggggggtccagggaaaagcggggtaagaaccagtggtgggtttcgccgattaaac

SEQ ID NO: 642086 - DNA, 167 bp, Homo sapiens
cttttctataataatgctacggaattgtgtactctaaaatggttatttgctgtacatggtggctcacgcctataatcccagcactttgggaagccaggatgggaagactgcttgagccctgaagtctgagagcagcctgggcaacatagagagaccctgtctcttaa

SEQ ID NO: 642087 - DNA, 340 bp, Homo sapiens
gcaatgtaccaataggttttcttgggtgaaagagaaagccaggcccggcacagtggctcatgcctgtaatcgcagcgctttgggaggctgaggcaggtggatcacctgaggtcaggagttcgagaccagcctggccaacatggtaaaacccagtctctactaaaaatacaaaaattagccaagtgtggtggcgtgcgcctgtaatcccagctactcgggaggctgaggtgggagaatcgcttgaacccgggaggcggaggttgcagtgagcctagatcacgccattgcacaccagcctgggccataagggcaagactctgtctcaaaaaaataaaaaatt

SEQ ID NO: 642088 - DNA, 755 bp, Homo sapiens
aagccatctttgcattgttcctcatccgcctccttgcccgccgcagtcgcctccgccgcgcccaagaataaaggtaaaggaggtaaaaaacagacgtcaggggtaagaagtgagaatgaatctgaaaaaagagaactggtattcaaggaggatggtcaggagtatgctcaggtaatcaaaagtgtgggaaatggacggctagaagcaatgtgtatcgatggtgtaaagaggttatgtcacgatcagaggaagaattgagaaaaaggggttggataaatacctcggacgttattatgggaggtctccgagattaccaggataacaaagctgatgtaatgttaaaatacaatgcgagacgaagctagaagtctgagaggcatacggcgagcttccagagcatgctagaatcaatgaaagtgatacatttggtcctggagatgatgatgaaatggcagtttttgagtgaccatgggagatgagtgatgaggatcttgagtgaccctctaacattgaactcagcattttttacattccatctttttctgaagatggtcctagcaggatttggattgtggagcatgacaaagaaggattctaaatctcatgatgcattgaatggcaatttgttaaacgcacgactgattcgtctccacgatatcttcggtaccccaaaccctgctctagtgctgacctatctcactgaaggtagcccctggtctctcaagtgggagcttgggtgaacccggcacccatcc

SEQ ID NO: 642089 - DNA, 240 bp, Homo sapiens
  misc_feature (122)..(122): n is a, c, g, or t
  misc_feature (144)..(144): n is a, c, g, or t
  misc_feature (203)..(203): n is a, c, g, or t
  misc_feature (216)..(216): n is a, c, g, or t
cacgagttcatacaggacagcatccccatgtggggtggggaggaaagggtcgattctatctcatctaatgtggttctagaaacctcatggattccaggcaagaagcttagcactgtactctngggaaggggaatacttgcaccnttgtttcttttgtttttcctacggagttagcagaacgcctttcagacaggacttcacanaaatccaccaagngaaaggcttctcttgactgcgggc

SEQ ID NO: 642090 - DNA, 430 bp, Homo sapiens
cctgtgctgcctgtgactccgctcctgaacacccaccaccgagatgtcctgccagcagagccagcagcagtgccagccccctcccaagtgcactcccaagtgcactcccaagtgccccgcccctaaatgtccccctaagtgccctccagtctcttcctgctgcagtgtcagctccggaggctgctgtggctccagctctgggggcggctgtggctccaactctgggggctgctgcagctctgggggtggtggctgctgcctgagccaccacaggcgccacaggtcccaccgtcgcagaccccagagctctgactgctgcagccagccctcggggggctccagctgctgcggtgggggcagcagccagcactctggaggctgctgctgaagtggaccttgacttcctcttccttctgattctgcctgaata

SEQ ID NO: 642091 - DNA, 1086 bp, Homo sapiens
  misc_feature (90)..(90): n is a, c, g, or t
  misc_feature (94)..(94): n is a, c, g, or t
  misc_feature (118)..(118): n is a, c, g, or t
  misc_feature (125)..(125): n is a, c, g, or t
  misc_feature (127)..(127): n is a, c, g, or t
  misc_feature (166)..(166): n is a, c, g, or t
  misc_feature (185)..(185): n is a, c, g, or t
  misc_feature (189)..(189): n is a, c, g, or t
  misc_feature (224)..(224): n is a, c, g, or t
  misc_feature (242)..(242): n is a, c, g, or t
  misc_feature (252)..(252): n is a, c, g, or t
  misc_feature (278)..(278): n is a, c, g, or t
  misc_feature (283)..(284): n is a, c, g, or t
  misc_feature (290)..(291): n is a, c, g, or t
  misc_feature (294)..(294): n is a, c, g, or t
agcggggtaatttttttaaatggaagcttctagcaagccccccaccccaatcaacctctatgctttcttcttaaaaaaaaaaaaaaaggnaaanaggaaaaaaaaaaaggaaaaccanaagcccngntgtctgtctgtgcccaagcccttccaccagaaaagctantctaggtgtgagagcccanatgntctgtagccatcaaaaataataataataacctggnacagtttacaatcgtggntttctttcanaaggcctttttgggaaagaagaaagngcagnncaccgnnttnccactgggcggtttgggtttggtggcaacaggcaggggaggagtgggggacgcgttggtgctaagctggatttcccatgggcaacagcaggggcacgctgggaccccagaaacccagaaccctcatcctgtgggccagaggggccggaccattggacccctttcagggattccaccaaaagcccaagaccggtcaccgtgaccaggtgggcaatgcactggttcccagggaaaccctcctcctctcctggggacctcccttccgtccgtggcctcccttggcgtctcaagcccctccttgtggcccaacccaagtcttcccagggaaaatccggccagctggggttggggtgcctggagcaaaggtggcaaaaggctgcccatgaacaaggagtggctatgaccggggacatgggacaacagggacctccggcgtcggggtcccaaaaatccctcgcatcagcagacaatcgtggtggcccgggattgaagggggctggaactcccggggacccatagggaaacaaccacataaatccagccttttccaaaacagggagaaccgatcagaatgcgccggaaatatgcctgggacctgggatggacacacagttgggaaccactagtcgggggggtgggcggaccaccgggaagcccaaacaagagcagtcgctgggctccagcacagataactccaaaaacacgaagccgaaagaggacccttccccaccggagagggtgaccctgggcccactaacacataaccacaggaactggggctcccggagaaccg

SEQ ID NO: 642092 - DNA, 282 bp, Homo sapiens
gtctttgcgtctcattgatattggttaaggctgttaaaaaaaaagccggaacttaaagtagcatacttgtactgcattctggacatttaactgactcattttttcacgtatattactgagagcactatatatcatgggagtatttgagtctgaattaattaatttcgttcaatgcttattcaggaatatttccagtgtttgctatatctgcaataaaccgtgttccttctcactaacttggaaggaacaactaagcagcaacattctgtatgttgtgctcct

SEQ ID NO: 642093 - DNA, 400 bp, Homo sapiens
  misc_feature (57)..(58): n is a, c, g, or t
  misc_feature (60)..(60): n is a, c, g, or t
  misc_feature (67)..(67): n is a, c, g, or t
  misc_feature (70)..(70): n is a, c, g, or t
  misc_feature (304)..(304): n is a, c, g, or t
  misc_feature (331)..(331): n is a, c, g, or t
  misc_feature (352)..(352): n is a, c, g, or t
  misc_feature (397)..(397): n is a, c, g, or t
ttcggcacaggacaggcttcattgggacagccctaacccagctgctgaatgccagannancgaagancgnttggtctcccgaaagcccgggcccggccgattcacgtgggatgagctcgctgcatcggggctgccgagctgcgatgccgccgtcaacctgggccggagagaacatcctcaaccctctccgaagatggaatgaaaccttccaaaaagaggttctcgggcagccgcctaggagaccacccaattgctgggtaaagcattcaccaaaggccccacaaccccccaagggctgggggtntttagttcacagggtgttaggctttanttaccaggcccagtttttganttgcgggagttattggattgaaggacaagcccaggggaggggganttt

SEQ ID NO: 642094 - DNA, 285 bp, Homo sapiens
cacagccacccgaactcctgcctcctaataaaaacctctgagggagaggaaactctctctctctcttctcttcctccgcggcacccctcagcgacgcgccaggagctcaatgggctgcgctgccgtactactgcgccacatctctgcgacccgtacccacactctgcaaccccatcgcataccagatcctgacgtccggatgcaccaaaacacgaaggaaccacagcacacaacgcaacacacataaactgcctcacatgcacagtcattacatacgggaataaa

SEQ ID NO: 642095 - DNA, 131 bp, Homo sapiens
  misc_feature (15)..(15): n is a, c, g, or t
ctagaggagtcttanagctgaggagagctgaggagtgggacagtgggggcagcaaagtgactggggaagtactggacattctaactcgccctgcagagagtgtggaaagactcacaggcgtgagcttctcc

SEQ ID NO: 642096 - DNA, 1446 bp, Homo sapiens
  misc_feature (191)..(191): n is a, c, g, or t
  misc_feature (255)..(255): n is a, c, g, or t
  misc_feature (307)..(307): n is a, c, g, or t
  misc_feature (310)..(310): n is a, c, g, or t
  misc_feature (312)..(312): n is a, c, g, or t
  misc_feature (423)..(423): n is a, c, g, or t
  misc_feature (426)..(426): n is a, c, g, or t
  misc_feature (486)..(486): n is a, c, g, or t
  misc_feature (532)..(532): n is a, c, g, or t
  misc_feature (568)..(568): n is a, c, g, or t
  misc_feature (580)..(580): n is a, c, g, or t
  misc_feature (617)..(617): n is a, c, g, or t
  misc_feature (743)..(743): n is a, c, g, or t
  misc_feature (868)..(868): n is a, c, g, or t
  misc_feature (871)..(871): n is a, c, g, or t
  misc_feature (877)..(877): n is a, c, g, or t
  misc_feature (911)..(911): n is a, c, g, or t
  misc_feature (975)..(975): n is a, c, g, or t
  misc_feature (984)..(984): n is a, c, g, or t
  misc_feature (1002)..(1002): n is a, c, g, or t
  misc_feature (1053)..(1053): n is a, c, g, or t
  misc_feature (1080)..(1080): n is a, c, g, or t
  misc_feature (1090)..(1090): n is a, c, g, or t
  misc_feature (1128)..(1128): n is a, c, g, or t
  misc_feature (1134)..(1134): n is a, c, g, or t
  misc_feature (1139)..(1139): n is a, c, g, or t
  misc_feature (1151)..(1152): n is a, c, g, or t
  misc_feature (1192)..(1192): n is a, c, g, or t
  misc_feature (1207)..(1207): n is a, c, g, or t
  misc_feature (1221)..(1221): n is a, c, g, or t
  misc_feature (1251)..(1251): n is a, c, g, or t
  misc_feature (1420)..(1420): n is a, c, g, or t
ttcatacggcagaagcgcagccatcttgggttagcgcacgtcctgggtatattacgggctcatctaatgagactcctgtgtggtctctctctctcgaacgctgcaccagagaaagcgatatggccaatacagcgcaaagagcagcaccgtgtacaatagatgtaggcgtcatacaacttgctaagtgagtncgcgaacacagccagatcatcaacactaagacacgttacagaacgcattcctatcgctctctcncttcgatatcacgtctactatacttgcagcgggcacacaaaaatatcaatanatncntacgaatagtaccgacgtgctcacatgctatcgctcgactcagctggcgcagttgcgtgcgcactgagtattcatccaccgtcgttggctgtacaagtcattagatatagnaangagatcaatattattgacgataaggatagtgatagcacaaacaggagccagagcgcgaanctcagacgctcgctctatactcataacattacttatatacacaacnacttcatcttagatctaatatcattgatgtgcatcnacaccatacaancgacaatatcatcactatgagccacttgacgcggtcntctacatcacacacagtctacactgtgcgtagagttagcagtacagtgtgaagcagcgaacgctcgtgagaaatgagtcggagtgtgattgatctctctatctctacgagagcttgtaccatatantagaatatactctacatacactatcatatacgtatacacaacatgagagatagacacacagcacgaaagagagcgagagaatatcggataacacatatcagtcgtccctctgcggtggacgacantanagtaantactatagtaataagttcgtcctcgtatcaagtntctcacacttctgcattatatagtatacagacaccgaacaacacgtcctcgctcactcgcctantccgcaacnttaacactcacatctcgntatacaatacagtgagatcctgtcgcgtcgcagcgagcacgcatgctcgcnctcgctcgcgctctcatcgtgcagtgntgagtttgantgcgtagatatacacgtcatcacacgatgattaaacanatatgntgatncgagtatgtacnntctcgtcgatgtctgtatatcgatgcgacacactcatgcnacacatacatgaatnatgtactagtgtantatagttatagaccgccgtagactctggtntgtctactagtgtgcatgttggtgtgcgtgacgtaatgaatatgtgtgcaagtcacgtagtgtgtcctatatcgtgattttgaatgagtagtgagctcagatcgtcagacggtcacatgtgatggtcgtcgtgttcatcgctgcagctgatatcgtgtgatgtctcatnatgctgcatagagtacgcactagccg

SEQ ID NO: 642097 - DNA, 345 bp, Homo sapiens
  misc_feature (16)..(17): n is a, c, g, or t
tctcatccagccggcnncagtcagcgatgcctcgggtctttgggctcaaagctccccaaccagccgccctcttacctcctggctgtagcgtggagaataaatgtccacctaggctttcacatcttctcctggagtggggccaggctctcctcaaacggtgcgccattccctgccagctgctgctgccgtttccaaatctggatcctcttcagcactagggctttggctgcctctagctctccagtggtctcctgcagtagcatggccagggcctcacttggcccagtcccattagcaggagtttctatcaagctgtgcagagacacttggccagcctcagccccc

SEQ ID NO: 642098 - DNA, 138 bp, Homo sapiens
cttctgtgactctatggatgactctgctaaatcgtgtgagacagatgagtgtgtatactgcttcacatgaccgacctccaggcaaagagatgccgtccttgtgtcacgaacgaggccatgctctgttgagagtcagag

SEQ ID NO: 642099 - DNA, 272 bp, Homo sapiens
ttttcccggttttttttttaaaaatttcccccccttttttgggcccttaggaggtttaaccaccttggcccccaaccccattgtttccccctttttggcccccccccaccccagagtaatttttccttttagggaccttttttaatccaaatgtgtttatttttgtttgtttgtgtttgtgtgtgtgtgtgtgtttttttttttttttttattttttaagggaattttccctttttttttttttaattaaaccccctctggctcccctttta

SEQ ID NO: 642100 - DNA, 716 bp, Homo sapiens
  misc_feature (268)..(268): n is a, c, g, or t
caggagacccggcgctttcttccttctgcagcatgaggctgtggcggggccgggggtggggtcggggccaggaggaataggtcgtcagagaataaaaggaggttgtccatagattgactttaacgcatgcaatcagtaaaacattgagctcttcagctccggctttctggctctgaaacattggaagaccaagaaggtttgatgtcttgtgtgacgccacctgaattagaaaccaagatgaacatatagccaaatggtggtctggtgnttgttttcacgcaacactcgaattcatcatgtatggagctatcaagagacataattgcagagcggctaggggtggagatgggcaaagtgcaggtttaccaggaacctaacagagaaacaagagtacaaattccagagtctgtgaggggaaaagatgttttgcatcatccaaactgtttcgaaggacgtgaacaccgaccatcatggagctcctgatcatggtgtatgcatgtaagagctcttgtgccaatgagcatcataggcgtgataccctactttccttacagcaagcagtgcacagatgagcaagaagaggctccattgtctctaaattgctgcttccatgatgtgcaaagctggtctagctcatcttattactatggattgacaccagaaggaaattcagggcttcttcaatattcctgtggacaattttaagagcatatccc

SEQ ID NO: 642101 - DNA, 481 bp, Homo sapiens
  misc_feature (2)..(2): n is a, c, g, or t
  misc_feature (28)..(28): n is a, c, g, or t
  misc_feature (106)..(106): n is a, c, g, or t
cngaccaccgatataaacacctgtactnccatcgggtcgtgattttacttccgcttcccaagaatcgacactggtgccatagtcattgatggttaggcctataccngttcggagttttcaatggtgaattgagtggctgttagtgttgagctatgcccaataatgatgccgtcatcgttactcttaatggtgctgcctgtgcctaagtcagcatgggtatagtcaccaattaagttaaatccgatggcagaggtttgaccaacaacatctactgtgagtcggttagctgtcagggagctgtttttgccctgaataatgattccttttgcatatccagaggcgtcgttgacattgacggtgacatcattacccaggttgatattgccaggcgtgtttcctgctggggtcattacaccatagaggtttcctgatggatcggcggtatctcctgtaattctgtcaccatcattaatagtaatat

SEQ ID NO: 642102 - DNA, 619 bp, Homo sapiens
accgcaggtctggagtgcagggcgcggtcatcggactcactgcagcctccaccatagcctggttcaagcaagttctccggcctcagcgtcctgaggtagctgagattacaggagccgggccaccacacccagctaatttgaatgtatttttaggtagagacagggtttcatcatgttggccagactggccgcgaattcctagacctcaggcaatccacccgcctcggcctcccaaagagctgggattacaggcgtgagccaccgcaccctgccgaaaaaaacttttatattatttggagacggaggctcgctcgtggtcccccagggcgtggagtgtgcaggtggcgagatctcagctcacggcaagctccgacttcccgggattcagcgcacatatcatccgtgcctcagacctcccgagatagctgggagccagggacgcccagcctaaaaaactttcacaagtcaatattactacgatttaacattagagtgtggacatgtgatttaatcgctatagctaaaatacgtcaaatatacgtggctcatggtgcttgaccctgatgctaaccctgacaggatgaaggaaacgtcatatacttccagggtagttcaggag

SEQ ID NO: 642103 - DNA, 973 bp, Homo sapiens
aaccaatacagacagcaataaccggcctgcgcacgggaggggtcgacctgtccagtgctctcggcagtcacgcgtgagaccgtgcccgtagtggacatcgcggttgaaaccgccgcggtgtggagccacggatgtcgccgatccacacgtgtgctgtccgcgtacgcgccgtgttgtccccacaaacaagggcccgcggggttcgcgaacaaataccttggccgcggcgcccgcaaaatttggtgcacacaggcgtgggaaattcttgccccccaaggcctgcccacatgaggttcgccccgcccctccgtttcaggggccaagcaacaacctccgtttcctggtgcccctggaggcgcccaccgcccgctttgctggggggtcccccccgcgcggggacgcggttggaaatgtccgagccgtgtgacaaaaaagcttgtaaccccaaaatgtgggcgcccacaacaccccacagcgtcggggcttgggttactccccaccgcacgatctccggggcttgtagaaaacactcacgaggggccgctggcaccaccgagttatacaccactctgggcggaaatctccccccgggcgcgagaaacacagggggaaaaatttgtgtccaaggcctccagtgggcgcaccctttctccccccggccacagggcggagatctttccccgggtatcaaccagtcgggtaacctggggtcctcttaaacgcctgagcgctttcccccccaatttgcagagtgggccccattccctcgcgtccctccctagtcaaaaccatattgtgcaccctgcttcgatgagcactggtctccacggaggtgtcatctcattccccgtgtcgccccttgtccctccccttgggctcccgtatgagcccccccccccggggaaaatcatttggggttttaagtttaaaaaaataaaaaacccctcacacaaaaaaaaccaaaacataaaaa

SEQ ID NO: 642104 - DNA, 124 bp, Homo sapiens
ctagcatgtctcgtgtcgaggtcgtcaccgcggaaagaggagagtgggcccactctcctctttccgtgtgtgccctcgatgaccggtgtacctgaggctcgatattctgtaaatcatgagtcag

SEQ ID NO: 642105 - DNA, 343 bp, Homo sapiens
acgggaatcgcaaggtataaaagtaactcctctaactttttgttttggcaggacaagggtatggacgacaaaattattcatacaacaattgcaaagcatcactgctgtatattttcctccagctcagtgtggaacatcctgcaaacttgcatctcctgctgcagtcttgggttccagctgcatcacgggtaacacagcatctcctggatgcaggaagctgcatgcatctggaatgcttattaatttaccccacaaataatttactaaaggccaatcttcccagtggaaattattccatcgatttttgtgactttctgatgggaatgctaaaaagaagagttgt

SEQ ID NO: 642106 - DNA, 276 bp, Homo sapiens
ttatggtcctgtggatggtacggaagcagctactcctatggacagtgctcttgggcggttggaagtggcgttcagattcctgccagtggacccagccatggggggtggcctcagctctgtcggaggcggccgtccaccatcatgctacgtcaccacctcctcctccagcaggaagagctattagcactaaagtgcgtctgctagctctcggtcccacagtcctcaggcccctctctggctgcagagccctctcctcatgttgcctttcggagaaga

SEQ ID NO: 642107 - DNA, 144 bp, Homo sapiens
gatccccctggggttctggaggaaacggatggcggacaggtgctggctgatatgaggggggtgtgactggtgcccctgcgctgcccccgccgtcgtccctatgtcattctcgagtgtgggggggatccgtgcatacttcacgct

SEQ ID NO: 642108 - DNA, 653 bp, Homo sapiens
  misc_feature (16)..(16): n is a, c, g, or t
ccttgtcggtaccccncgagtattgggatatcgtcgaccagcgctgctcgcccagattggtgtggccgtccgggtgcctggaggtgtgcagggagcctggaatcccaaccatctcccttgacagacccagagcctgtccagaatctagctgcctgagagagggcgagaagggccagaatgggtgactgactcgtccgctggcggctgacttccctgcctgcctggcagaacgtggaacctgactgccctgaggcctgagctgctcgcccagaccttgtcatgactccgaggccagtaagttgggggctcctgccgcagggggcgaagaggagtggggacatgcagcagagacagctggggaagaaaaaacataggagacgcccgtccaagaatgacgcggcacctggaaagcgtactacaatgctgacctgggaagagaagaaaaagttcgacgagcaaacggagccttcgagactttcaaggatccagagccgagatgttcgccaagggccagccggtcgcagcccatataacaccagggcagatcctcaatggaatgatcaacgaccaggaggagccggatctcaagaaaccggactgatactccaaggggggccggcggccaaaatccgacgagaccagacgattgacga

SEQ ID NO: 642109 - DNA, 948 bp, Homo sapiens
ggagagagagaactagtctcgagttttgtgggtgttttttttccacgctaaattcattaattttcctggtataaaaaccctatgtggtacccacgaagctggagccctgattcccgtgcacggaaactcgggggggggtcttggacgaggttggttcagtgaacttcctgtgatagggagacttgggcttgaatacagtctcctttcgcagaaggctcgggggttcaggtaccgtgataggctctatagaaatggaattcaaggggtggccttatgggaaagattgcccagggtgtggcagttgcacgcccccggtgctgagggtgaaagcagcttcatcgaataccagccaatcagtgagcagcatctctaaggccacagggtgacggaaacgactgccagctgcccctgggagatgacaagggaatgaggcgataccagacaaaaagagccgcaggggccgtgatcaccatggaaaggaaaagagagtggtgggggcgcatatgacacgtattacttgtgatcacccccaagagtataacgccgtcgtgaccaacaaggagggagaccaaagtgagaaaagctttgtggccaagagatgtaagtggcgcccacaggtgaaatttgcggagatgcgaccaacactctcacttttgagaacacactatcaaacaaaccacaaaaagcaggacgtttgaaccattttgttgagcgtccccgcagaataagcaaaacgcaaaagtgcactttaaaaccgtgtgttgaacactgagcgaggaaaaacggggctatggactctatagcaacggttggcacttaaactctatcaaaaacacctctatccttatgaaaaagaacgggccccatagagaaaaaaaagtctcaaggaatttctctgcatttacccttaaaattaagggccggggaaaaaaacaagattaagcctcc

SEQ ID NO: 642110 - DNA, 170 bp, Homo sapiens
gtagatggagctgcctacctgtcagttttccccattatttcatcatcagtcagtggggactttgacaggtcctttctttgtccagtgatcactctgcaggccactgccctcactactctggatcatgacttctgtgcgcgttttgccgatccagcccacgaggggatcct

SEQ ID NO: 642111 - DNA, 348 bp, Homo sapiens
ccccctcccccttttggggtttttttgggggggggggttttccccaaacccccaaatttttttttaaaaacccccccttttgccccggtttttaagggggggtttaattcccccgggtttggggggtttaaaaggccccccaaacccggggcccgggttttttaaaggggaaggggggggccgaatccgggttgggggtttttggggccattaagggggcctttaaaaggggcttttttttttttggggggggcgggcccaagccccgggggttaatggtttaaaggttcccccttttttttttccccaaaagggggggaaaaaagccccccccccctttaaacccca

SEQ ID NO: 642112 - DNA, 1194 bp, Homo sapiens
agagcatatctgccgacacaagtaagtgaggaagaaatgatgtgagacgatgaagaacgagaaaatgaaaaccacctcttggtatgttccagagtcacggttcgaccgcagattcacggggatgagtgaacgaagcagagtgaagaagtgggtgagggaacgccgcagatgcatgcgccctgacagagggcgacatctgtgccacgacatccaccatgacctgtcgacccatcgagactcaagcaggagctgcccaagatacctgccggcacctgccagggactgccggagcgatcgagcgagcttccagctgccctgaacaggcactcgacgcgaggcacaaccctactgtcgcagctggctcctacaagagcccacacacagaccaacgaacaacacagcattgcacaactccgtcggccctcctcaacgccggccttgactcgcattgtgcagcacgtgacgacagcgcatcgcgctctaccccgcattccaaccgcatcgactgaacggggcagcactctacaccagaccactaccctccacagtgaccccacacaattccacaaacctctcgctcaacaccgctccaaggcagcaagactcgcgtagcgtggcggcaagacaaaccattgggaaccaatagcatctaaacatacgtagacatcgacacctactgataggcgagcacccgaaccatacccacgaagcccctgccttcggccccacccactgcaaccaccgcaccccctctacgctcgcaccaactacactacgatcgttgagcacatcactcccccattgcaccttgacatacccagcgcatagctcataggctcatgccaagcaataggaaacacacacattgcacagccaacacactccgcaacacccatggaaaccagaaaaaaacacataaaagaaacaaatacaaaaacaatgcctggatggaaacccaacggaccaggaccaacccgcaaaaaacagcaaaacgggaaagaaacacacaacatgagcaaacagcgcaaactacaggaacaaacccccgccgcacaacgaccaaacaacccgcgaacaaacaagacccacagcaggcgaaccgcgcaaccacaacagccccgcacgcggcaaaggaccacggacaaccaaacaccggaacaaccgacaatactgcaacggcgagcaccaaccaaa

SEQ ID NO: 642113 - DNA, 646 bp, Homo sapiens
  misc_feature (628)..(628): n is a, c, g, or t
  misc_feature (634)..(634): n is a, c, g, or t
gagaaaagaaaagaaagaaagaaagtgagccagaacaatcagacaagagaaaggaataaagggcatccaaatcagtaaagaggaagtcaaactgtcactgttcactgatgatatgactgtatacttagaaaaccctaaagactcatccaaaaagctcctagatctgataaatgaattcagtaaagtttcaggatacaaaatcaatgtacacaaatcagtagtactgctatataccaagagtgaccaagctaagaatcaaatcaataactcagccccttttacaatagctgcaaaaaataaaatacttaggaatatacctaatcaaggaggtgaaagacctctccaaggaaaactacaaaatgctgctgaaagaaatcataggtgacacaaacaagtggaaacatatcccgtgctcatggatgagtagaatcaatattgtgaaaatgaccatactgccaaaagcaatctaaaaattcaatgcaattcccatcaaaataccatcatcagctgggcacggtggttcacacccgtaatctcagcacttcgggaggccaaggtggatggatcacttaattgccagagctccaggtcagcctggccaatatggtgaaaccccatctctactagnatacanttgcccgggtgt

SEQ ID NO: 642114 - DNA, 303 bp, Homo sapiens
  misc_feature (181)..(181): n is a, c, g, or t
  misc_feature (283)..(283): n is a, c, g, or t
caataaattgttggtcattgattccccaagtttttcgcaataaaatctacagccatcaaaaagttttaacagttcgttttctggacaagtcgatgaatcaactttcatttgtcaaaagacgtaaaaaaaccagttttttataatcaaacgcttgcgcaaagcacatgaaaaaacgcaggangcagcaccaaaaaaagcagttattttataaacgcaactgttacaatcattctatctcggatgaaagccgtctcttaaaaaacaagcctgatcaatgccaacnattattaggggtcctgctag

SEQ ID NO: 642115 - DNA, 160 bp, Homo sapiens
gcggccgcctactactactactacactgctcgaattcaagcttctaacgatgtacggggacatggttgtctttgggtgccccaactgaccacacccccattcccccactccagataaagcttcagttatatctcaaaaaaaaacacccagggcggccgct

SEQ ID NO: 642116 - DNA, 335 bp, Homo sapiens
cactcaaaaagcatttactggagcatcacggtgtactagggggtggctaaaggctaggggggtaaggcagagaaattaatcaatcccggtaagagttcacggtaaaacagaaatgacagccatatgtgtatgacttggtgtgtgtgtgtctctatatctatcagaccgtatgactacatatatataagtgaggtatgggggacgcgacggacgacggacctggacctttcgaatttggactagaagatacaggacgggcttcatggaggacggtacaccttgggcccaggcttaacgacgacagggctaggcttgggaccaagtggacgaccagg

SEQ ID NO: 642117 - DNA, 925 bp, Homo sapiens
  misc_feature (73)..(73): n is a, c, g, or t
agcggacttcaaaatccgggtcaaagggtgtcgcttcggtctcttctccccggctgatcccagcactctccgngacagcgcctcctgactcagcccaggaccggcttcttctcacgacctgctggagactggacgcccacacctgacccggaactcggaggcgtgcttcctccacccgccggctagcagccccgggccctgagctcccgccgacgccgctggggggcccgacaggcccctcggcgctgatgctgagtgggatcgagggcccggggcggcggcggagtacgggcctctggcgccttaggccagcgcaggtgtcggttcttaggctctccaggctcgctagctcccgccccggcttggatgggtctccctgcgccataaatgtggctgctgaggcggcggtggccgtggcccgtcgcgctgctgctgcggcgctccaagttcatctccgccccggggctctcctgccccacctcggggctgcgcacccgtccttatcccctggccctggccttgcagcgtggcgacaatggacaagatcctggagggccttgtgagttcctcgcatcccctgcccctcaagcgggtgattgtgcggaaggtggtggaatcggcggagcactggctagacgaggcgcagtgcgaggccatgtttgacctgacgacccggctcatcctggagggccaggaccctttccagcggcaggtggggcaccaggtgctggaggcctacgcacgataccaccggccagagttcgagtccttcttcaacaagaccttcgtgttgggcctccttcatcagggctaccactctctggacatggttgtctttgggtgccccaactgaccacacccccattcccccactccagataaagcttcagttatatctcaaaaaaaaacacccagggcggccgct

SEQ ID NO: 642118 - DNA, 591 bp, Homo sapiens
tctaaaataataatcctgtgtgagattgcttaatatacggaacacacatcacaacaagaagatgtaagtgtgctgaaggaaccagcatgcggagtctcagcatcctccagggcttgccaagcttccgggagctccagaaaccggaattgggagttgttgagctatgaccgccacctcccgcgcgaagactgccgggctgtgcgactttctgaactcctgaggaggaaatgctggataaaccctgccgattccgatgaagccagaaaggagccgcaggcaggtcccctggagaacccgaagaagtggcctgtgaagtgaaagcaggccctgttgtagaccacagcaagcagggcaggtcttgcttgagaccccccagttctgggtctgacttgggggaaagcccccccattaacaggaggggaatttctttatccccaacagtaactaaggaggtggtgtcctgaactgattgcccaatgacagcatttcctcaaacttactcccacaagctactcaaccaacactatggggtgaatgaggcaacacaagccttgtttcttatgaaatgaagtgtcctctaccacttagcct

SEQ ID NO: 642119 - DNA, 434 bp, Homo sapiens
gctggcttcagaggagaaggtccagaagtggatgtgaaccgtgtcgcaagggctgatcttgacgtctcaggaccaaggtggaggttgatgttgccacgatgtgaatattgaaggtccagatgcgagactgaagggcccgtaaattcaagatgccagagatgaacatcatgatgcccccaggatctccatgcctgactttgatttgcatctgaaaggccctagggtgaaatggagatgtggatgtttctctgcctaacgatggaaggtggatctaaaggcccctgaagttgacatcaagggccccaaagtggactttgatgccccagatgtggatgttcatggcccagactggcatctgaaaatgcccaaagtgacaatgcccaaattcagcatgccaggatttaaaggagagggcccagaagtggatgtgaatt

SEQ ID NO: 642120 - DNA, 122 bp, Homo sapiens
ttcctgtctccatatacatatgatgaatgcaacctattgttttctatttctctcttttttcctgcctgccttttgttttcttcccttattgtgtttcagtcagtagttgagttcaatgcttg

SEQ ID NO: 642121 - DNA, 435 bp, Homo sapiens
ggtcgcatgatggacattcagaggacgctgaacgtcaatatggtgtcgaactccgagattcccattaataatctgtctccttgacccaaaacacttggaactaatgaccatgggtttctacagaatttaatgaccatgaaaaagcaggaacgatgattgcatcttgcaaggacagggttcttgaagttaggaccttggaaaaagcgatgcgggtttccccaaccttaagtacattatcgggaaggaccattgggttgaagcactgccttaagaaggccgaatgccaagacgaagagaaccagaaacaatgccaggacctcggcgccttcaccggacatggttgtctttgggtgccccaactgaccacacccccattcccccactccagataaagcttcagttatatctcaaaaaaaaacacccagggcggccgct

SEQ ID NO: 642122 - DNA, 312 bp, Homo sapiens
tctcagttgtgcatcgtgctgcagctcgtctcactgagtagagaagaatgaagagatcagagtggacgaaggattacaagtccctttgcaatgtcctagtcgaggatattttctatacaggccacggaatggaagaaggtcagcagggtgtcatttaaaatggatgccagctaatttaccacagagcaatgctatggaatacaaaatgtactgacgatttggtttgcttctgaaaaacatccttgctaacatgtactcggttgaaaatccctgtgtttgtcacttgtgctcagtcgtaacagtggtagtaac

SEQ ID NO: 642123 - DNA, 249 bp, Homo sapiens
  misc_feature (50)..(50): n is a, c, g, or t
  misc_feature (81)..(81): n is a, c, g, or t
  misc_feature (156)..(156): n is a, c, g, or t
taaaggggcttagaaacccttccactccctcaaccttccccctacctctngagctcccctgtcacacaaactcgacctcangacgcccgtcggaaagagtaccttactgtacttagttgaaaaaagaaacaaagtagaaaattcacatgcacgaanggacaagcacgtacacaagtatttgagttgtgaaattagtaccaaagtactcgtaatttttcgtttccccttttcccacacattaccacatgt

SEQ ID NO: 642124 - DNA, 115 bp, Homo sapiens
ccgcttgtgatggtgccgcagccgttccatttcggctttgcgctgtccgcctcgtcggtgctggggttcgtgtagactggcttcgtctcgtcgatcggatccatcaaagatgttg

SEQ ID NO: 642125 - DNA, 109 bp, Homo sapiens
atcatcattgccctgcagcctggtagtcgtacagtgcgactggatgtgatccccagatctgttctcgtactcgtcgtatgtgcttgtcctctgctgtggatagtggccc

SEQ ID NO: 642126 - DNA, 697 bp, Homo sapiens
  misc_feature (499)..(499): n is a, c, g, or t
gggaacgacggcggccatggcggcctcggggcccgggtgtcgcatctgtgtgcttgtgtcccgaggtgccatccgccagccttcttcactgcgctgctctcgctgctggtttccgggcctcgtcctgtttcctgctgcagcatgtcccctggcgccctcgggcctcacgcttgaaagtccgaggcccttcgcagactggcataggtcttaccaggctggtaagccttacatctttgttcttagcgatgaatcccagtctccctgtccctgcggcgcttctcagtcatctgggcagctttggctgggtcgctttcctgagtagcaaccgtgggcacgcgtccgcctactgcttcttctaccgttggatcttacggccgcatcttgctactcgctgagtcattctatccctcgtccagttccgtatgcgctgtgttccctcgacttgctcaatacggctagtcgcggacaagtggacgtgagttgccaggaggtttctacnctcccacgttggtgctctttgcccattgcttgggtagtcaccaccagtccgttctcctggatgaaggcgggcccttggtgtccaggcatggattcgtgcggctcagtcctggttccgtggctcctgctgggttgcctcgtgggtcattccccagaactttttcctcagtaatgtctgcgggctgtccctccgggctgg

SEQ ID NO: 642127 - DNA, 795 bp, Homo sapiens
  misc_feature (668)..(668): n is a, c, g, or t
  misc_feature (701)..(701): n is a, c, g, or t
  misc_feature (736)..(736): n is a, c, g, or t
  misc_feature (754)..(754): n is a, c, g, or t
  misc_feature (785)..(785): n is a, c, g, or t
ctccactcttctggtgtgagatgggaccggagggcggagaggggacgcggaagctcctatctctccagccacaatcggcacccaggttcaggcgggttcctcttctggggttgggcatcctcagatgcctgggggccggggaggcgggggcttcatctctgcttctgggctgcagattcgagattgccctaagccctctgacccggcctgtcctagcctctggctgcccttctttctgcctcttgttctttctgccttctgtctgcttcctgtctctgggtatgtccatctctctcttccctattctggctgtgtctgtctgctctccctcttgctgccttccctacctggctttgtccctctgcatcggtttttctgtgtctctttgtgtctcgctccctccctccacatctctccatctcactgtgtctctctttactaatgcctctctttgtctctgtctttatctctgtctctccccaaccccactccccagctctattcctattctctgggttgctgcctctggggactgaagcagcccaacagggagcccggagacgcctcggggcactgccgggggtcctcatcctggtcacctccacatgcccgtcaactccgcgcagtttggatcttcccgctggcggctgtgggacgtggaggggcgnccggaaaaggaagacacagggcccagcatctgnttcgggagccccggggcccctggacccccctctgnccatttattaagggcgcngggtcccgagggaccgagatgatcatgattncatcagtcag

SEQ ID NO: 642128 - DNA, 754 bp, Homo sapiens
  misc_feature (37)..(38): n is a, c, g, or t
  misc_feature (260)..(260): n is a, c, g, or t
  misc_feature (285)..(285): n is a, c, g, or t
  misc_feature (287)..(287): n is a, c, g, or t
  misc_feature (293)..(293): n is a, c, g, or t
ggtggaaccgccgccaggtcgctgttggtccacgccnnccgtcgcgccgcccgcccgctcagcgtccgccgccgccatgggagtgcaggtggaaaccatctccccaggagacgggcgcaccttccccaagcgcggccagacctgcgtggtgcactacaccgggatgcttgaagatggaaagaaatttgattcctcccgggacagaaacaagccctttaagtttatgctacggcaagcaggaggtgactccgacggctggngaagaaggggttgccccagaattgnangtgtgnggtcagacgagccaaactgactatatctccacgattatgcctatggtgccactgggcacccaggcgtctttcccaccacatgttgcactctcgtcttcgatgtgtggagcgttctattaactgtgggatgtggacggggataggggctcctcctccctttagtcccccgtgtgtcgtgggacttgcgcccgtgggggggacttgtgggtggccctcacgagaactgttgtggcgcctgtgagatcccattattgggagagcgttttccgttgggtgtgtccactcccactttgctgatagacaactcttgcgcctgagctgagattgttgtgtctggtgtcacttcaagggctttggccttcccggacaacctcttggtttccttctctccccccttttcttccttcggtaatgttgttggtttaaccttaaaaactaattatgcgcaattaaaacctcaa

SEQ ID NO: 642129 - DNA, 367 bp, Homo sapiens
  misc_feature (23)..(23): n is a, c, g, or t
  misc_feature (35)..(35): n is a, c, g, or t
  misc_feature (78)..(78): n is a, c, g, or t
  misc_feature (141)..(141): n is a, c, g, or t
  misc_feature (147)..(147): n is a, c, g, or t
  misc_feature (152)..(152): n is a, c, g, or t
  misc_feature (164)..(164): n is a, c, g, or t
  misc_feature (196)..(196): n is a, c, g, or t
  misc_feature (201)..(201): n is a, c, g, or t
  misc_feature (224)..(224): n is a, c, g, or t
  misc_feature (226)..(226): n is a, c, g, or t
  misc_feature (291)..(291): n is a, c, g, or t
  misc_feature (317)..(318): n is a, c, g, or t
  misc_feature (325)..(325): n is a, c, g, or t
ggatagatggaattggaaggatnctaccgggaganttcttacatagtgctcaggagttctcgccgtaaaatgtttacngctgaaagatgagcaggaccagggcggtataggcagagccctagccgagaaacctgctggccnctgccngtttncatttcccgcgntggttgtgtggcattactttcagaattgcacnttccngcttgtcatgacgttttgacacncntgccatgacgtgtgtttctgtgaacatgaagttctgcggtagtgcctccgggggcagaggaaaanaagaagtgttactccgttttgtacgnnataaatncgggcatatgtttaataaaacggttctattgtagtaacttgt

SEQ ID NO: 642130 - DNA, 214 bp, Homo sapiens
tcctgggcgtatggtcattttgatgatactgattcctccaatcctgaacatgggatgttttccaactttgtgtcatctacaatttctttccatcagatgttttatagtctgtctgtcagagatccttgaactccttggtcaaatgtattactaggtatattattttattttcttgtaactgggattaagttcttgatttggttctcagcctgat

SEQ ID NO: 642131 - DNA, 443 bp, Homo sapiens
ttgtcaggggtatccggggagcttcgtaacctgaatgatgcgctctgcaatcagcaggcagcacggctgtgcaggcgccacatctgagacctggatcttggtcacatacggggttaggcggaatggctgtaccgatgtcctggatcccggtcaggacctcctctgatacggcagaaagacggacttctccttgggtaaagtcccttgagtgcttgaaccttgctgagtgcccctgtgccccccagtgtgggcagggcgaggatgggagcagttggaacgcataggaagacttcccacattcctgggggagccagtgagctccagagaaggcgggtaccccggaaacacgttccggcttgcaaacgcaagagggacggctggctgctccgaaattgtaacgaattcgggcccgtcaggacggagacagccactgacacgggcct

SEQ ID NO: 642132 - DNA, 843 bp, Homo sapiens
  misc_feature (37)..(38): n is a, c, g, or t
  misc_feature (349)..(349): n is a, c, g, or t
  misc_feature (374)..(374): n is a, c, g, or t
  misc_feature (376)..(376): n is a, c, g, or t
  misc_feature (382)..(382): n is a, c, g, or t
ggtggaaccgccgccaggtcgctgttggtccacgccnnccgtcgcgccgcccgcccgctcagcgtccgccgccgccatgggagtgcaggtggaaaccatctccccaggagacggtgagtagtggcgcgcggcgggtctggagtacctctgtccgctcgcgcgcaatcggcttcagcatgcccgtcttctgttctcctcagggtgcgcaccttccccaagcgcggccagacctgcgtggtgcactacaccgggatgcttgaagatggaaagaaatttgattcctcccgggacagaaacaagccctttaagtttatgctacggcaagcaggaggtgactccgacggctggngaagaaggggttgccccagaattgnangtgtgnggtcagacgagccaaactgactatatctccacgattatgcctatggtgccactgggcacccaggcgtctttcccaccacatgttgcactctcgtcttcgatgtgtggagcgttctattaactgtgggatgtggacggggataggggctcctcctccctttagtcccccgtgtgtcgtgggacttgcgcccgtgggggggacttgtgggtggccctcacgagaactgttgtggcgcctgtgagatcccattattgggagagcgttttccgttgggtgtgtccactcccactttgctgatagacaactcttgcgcctgagctgagattgttgtgtctggtgtcacttcaagggctttggccttcccggacaacctcttggtttccttctctccccccttttcttccttcggtaatgttgttggtttaaccttaaaaactaattatgcgcaattaaaacctcaa

SEQ ID NO: 642133 - DNA, 1715 bp, Homo sapiens
  misc_feature (188)..(188): n is a, c, g, or t
  misc_feature (536)..(536): n is a, c, g, or t
  misc_feature (900)..(900): n is a, c, g, or t
tccctataaatacttcttaatttattttaaaaaaatgtggtgcgtgtttaacccttttatcacggggacaacgaaggctattgttgaaagagttcacaaacacttttgtgctcaaagtggtacatcatgtgagaaggtgcttttgtgacgatagtctcacgtggtttatactccatcgtggaactcgnagtatattactctgggcgcaacggggacaagggtcctaagatatccccatggaacccaagtctggcaagaagattctacaaggtctaactataaggggcgagaaacagtatttgggagagacacaccaagaaagaaagggacaattttctttgctctatccacaagtgtgtttcacctcttttgcagagaactgtaaatagtgccacctctttctccttaactcaaagaggcccttctctttaaacacggtggtgttcaaacaataaaggagttttctcccagaaaacgagagccttattataaacacttctcctatttcacgcgccggagaagagagaggccacacnagagacagatgtgcgggtatcttcgcgtgggcgcgaaggaacataaagagtcaaccgaggccagagggtagcacaacaacactttattcttttatttcagcggtgggaagctctctccaagacgtgcggggtataagagcgccgcgtggatggtgttggtttctatgcccaaccgaaggattcttcctttcagacaaaagcgccggagaagttggggggcgcggacaaacatatacaatctcttcaaacacacatgtgcgtggttgtcctccccacaaacacaagtcgcttctccataagcacgacacgcgggtggctttctcaactccttacaacgcgtgcgttatcaccttagtggagacgncaagggggtgctacacagtgttttgtggggccccccaaattgcgggggactttccaggaacaacagtgggctccctattattttaccattgaaacgcaaggcatgtggtcctgggttcccacggcttaattacacacactacgagttgtgtctgggtgtttgagcacccccatatatttcccacaaaagggccccatgattaaaaaatcacgagaaacataaaacttgctgtcacaagggtttaaacaacccgagaagaaagatgttcaggttacttgaggctccccagaaattttctgcccgacatcgaagatttaattcccatttgggcttcagatgtgagaacattacctcgtcttcaaaaataattcgcgggggcgggggcccaaaacaaacagagggtgggtgggggccccccgacattaattctctcaaacagggtgtccccatccaaccttgaaaggcgcccggggcccacaacacgggggggtggaaaaccggtgggggagctccccaggcacacacacaagttgacataaacaccgtgtggtgtgcccagcgtaatagcccgcgcaaaagggggagaccacacaagacaaggggcagcagaagataacacagcgtggaagctacggaccaacaaccaaaagtagatgacagcaacaggggccgcacgacacaggagatgtagttacaaacacgcgtggaccgacgagcgtatatgaaaaagagtgagtgccaacgaagacagcatcggactacacacaactcaccgaattaaaaatcagaagaacgagtagcttattgagcgaaac

SEQ ID NO: 642134 - DNA, 238 bp, Homo sapiens
ctcgtagggactccaaaccccagtatccctctgcccaacactgtacctcagttcattgccagagagccatatagctcacagtgcctgcactttaccccagtagcccagaagtgtgggccccgtaccctgtgtacccagcggagttagcgcctgctctacctcctgctttcacctatccgcttcactgcatgcccagtgtttctctcctgaggcaaagcccaacacacctgtctttgtc

SEQ ID NO: 642135 - DNA, 1518 bp, Homo sapiens
agagagccctgagcagccccagcgccgccgccggcactagttaccatcacaccccgggaggagccgcagcatgccgcagccggccccagtcaccaatcaccgcaaccatgatgcatgctgatggccgagacccagcaagacgtgtaaagacgaccagaaaaaaggaagacaaaggaaaaagaagatagaagcggacacacatatagatgtaacaatatatgaacaattacgaaccatataatatagtgaacaaaataataggtgatatcataataaaaactaaataaaatataacataacgtaataacacatatagttaagcaaataagataataaagattattagagagacggaagcagaggagaaccacgagaaacaagaacacgagcaacgcttcagaaatcacaaaacgcacaacagacgcaaacgcaagcaacaaaatcgtaccacacgcaccaagaccgaccacaagacacaaacaaaacacaccaaaaagatacctccccagcgaggcaagtagcgacagtcaagaacccagacacgcacgagaggagaacgaaagtctcaaaaagaagccgaaagagaagacagacggcacgggggaagagcgcacgacatcaggcgcgcgagaggcgactaaagcagacagctgcacgccaccagcgagagaaacagaaacgacacaacacagagacaagcaagcccgaacaacacatcccaagaaacagagaagcgcgagacccatcaagaccaaaaccgagtgcacaggaccgaagcgaacaccagagcacagcgacagcgcagcactcagaagagagaagaagcacgaagacaagagaacggagataggagacgagagcacaaccggagagcagccaccagcgagaaagagaggcacagatcacaccgacacagcgacgactaccagccccagacgaacacgaagacagaaatacacatacgacgatgcaaagaaaaagcacagcgcgaagacacaagcgagaaacagaacagcagacaaaacagagagcgaggaaagacacggccacgagagcaagaacaacacaaacacaatgaaacacagatacaagacatagctgacatccaacgataaactgaccgacacaacgcaaagagacgaaagacagcggaagagaaagagagagctgcacgaacataacacaggagcagcagacaccaatcagagaggagagcgcgagcgacggtagcagctagagagaggcaggaggcgaagagagcgatacgagcagagcgagcaaaagagcaagcagagatcgaagacatagccgagagatcagagcgagcatagtacaaccagacacaggaccgaggtaagcagagcgaccgtacacgtcaagagcacagagagagacagctagtcccacagcagtgaccgagtcgtgcgcagcctgccggcagcacgagcgagagcacgggaacagtcgacgacggcccgaggcagggacagggcttcgctactgatccccttgtgcgac

SEQ ID NO: 642136 - DNA, 441 bp, Homo sapiens
ctcgtgcctactgtgatcagtatggcgctgacctgggttcttacagtcctgagcctcctacctctgctggaagcccagatccgattgtgtgccaacctaggaccactgcccatcaccaacgccaccctggaccggatcactggcaagtaggtatatatcgtataggcctttcgcgatggagtacatgaagtcgcttcaggagatccaagcaagcttagttgactcaactcacaacaagactgatgacacgatctctctgagagagtaccagacccgtcagaaccagtgctcatataactccagatacctgaatgtccaccgggagaatgggaccgtcttcagatactagggaggccgagaacatgttgctcacccgctgatccttacggacaccaagaccttgatgtcaggatactacctggacgatcagatctgtgcgct

SEQ ID NO: 642137 - DNA, 632 bp, Homo sapiens
  misc_feature (224)..(224): n is a, c, g, or t
  misc_feature (243)..(243): n is a, c, g, or t
  misc_feature (281)..(281): n is a, c, g, or t
  misc_feature (301)..(301): n is a, c, g, or t
  misc_feature (311)..(311): n is a, c, g, or t
  misc_feature (321)..(321): n is a, c, g, or t
  misc_feature (325)..(325): n is a, c, g, or t
  misc_feature (335)..(335): n is a, c, g, or t
  misc_feature (339)..(339): n is a, c, g, or t
  misc_feature (348)..(348): n is a, c, g, or t
  misc_feature (358)..(358): n is a, c, g, or t
  misc_feature (362)..(362): n is a, c, g, or t
  misc_feature (365)..(365): n is a, c, g, or t
  misc_feature (373)..(373): n is a, c, g, or t
  misc_feature (375)..(375): n is a, c, g, or t
  misc_feature (391)..(391): n is a, c, g, or t
  misc_feature (402)..(402): n is a, c, g, or t
  misc_feature (415)..(415): n is a, c, g, or t
  misc_feature (420)..(420): n is a, c, g, or t
  misc_feature (424)..(425): n is a, c, g, or t
  misc_feature (450)..(450): n is a, c, g, or t
  misc_feature (456)..(457): n is a, c, g, or t
  misc_feature (463)..(463): n is a, c, g, or t
  misc_feature (493)..(493): n is a, c, g, or t
  misc_feature (495)..(495): n is a, c, g, or t
  misc_feature (497)..(497): n is a, c, g, or t
  misc_feature (511)..(511): n is a, c, g, or t
  misc_feature (515)..(515): n is a, c, g, or t
  misc_feature (519)..(519): n is a, c, g, or t
  misc_feature (523)..(523): n is a, c, g, or t
  misc_feature (544)..(544): n is a, c, g, or t
  misc_feature (555)..(555): n is a, c, g, or t
  misc_feature (564)..(564): n is a, c, g, or t
  misc_feature (569)..(570): n is a, c, g, or t
  misc_feature (604)..(604): n is a, c, g, or t
taaaccaaagtttagaaagaggtttttgaaatgcctatggtttctttgaatggtaaacttgagcatcttttcactttccagtagtcagcaaagagcagtttgaattttcttgtcgcttcctatcaaaatattcagagactcgagcacacgcacccagacttcatgcgcccgtggaatgctcaccacatgttggtcgaagcggccgaccactgactttgtgactnaggcggctgtgttgcctantgtatgaagaacagcgcttcacccccatctcccgcgtncaggtgcgcacagggctttntttgagaatngggaaaaccntttnaaccccgggncatncgggacatnccaaacgcantgcnccntggagctnanagccttttttttggtnttatttttttntaacaaggggcgnggatncctnnaccaagaagaatttttttttttttnagtttnntggacngcgtggggactattggagaaaataaggggntntnctttttttttttanaatntttntctnagaatgttctagggcactctngggaacctatnaaggcaggnatttnnggccctcctcttcaggaatcttccttaagacatngcccagtcgaaggcccaggatggctttt

SEQ ID NO: 642138 - DNA, 963 bp, Homo sapiens
aaaaacgggggggtccccgcgcgggtgttccccgagctttgtgagagcacccaccgcgccgccgcaagacgttggggcaacaaagcaccctcgcacacactggtttgcggccgcgcggctccgcacaagaggaagggccgcctctggttgagacgctgcgcccgccaccacgaagaaacaacaagagggtcggtgggaggagagatacgcagcgacccttctctgccccccctgcgccgcgggcgcctttctttggaagaccaacaggggggcctccaccgcgcagaagatagagagggtctcccgcgtgtcttgggagaacacaccgttttcccagagggggggttcctctctcgtctcccccccccctctcatgaggcccgcctggttgcggcccctctgcttcttgctgttttgttggttgggggaggtggtggttgagacacacgccgggagcgaggggcattgtcttggtgtggacgcccgccacccgcgggcctcgctttgttttatattgttgttgggtggccgcctcgggaccccctctgggcacgtgttcttttcctccctctctctctcgggggggggaggattccccgccccgtgtagacgcctcaaccgcgggacagagaccccgcgccaccatcaccaagacatgtgggggcagcggcgcaccactctggccgatgtggcccaacccggagtaggggcacccaccacgacgtgctctttccatcgaaccccccccttccccaccgacgtatgtggggaagaagattgtgaagaagttttgcccgaaaacccccacagcaagacctgtgggaaacaacaaaaaacccacgggggggttttgggggggcccccccccccttttttaaaagacccccccttttttctcccctgtgggcccaaacccgcggtctttgtttgggggtaaaaaaaaacctttggggggacccccca

SEQ ID NO: 642139 - DNA, 537 bp, Homo sapiens
agacataatcactaatgacccaacgctacatctggcctggaaactctttcttttatatctcccttccctctcttctctctctctctctctctttctttatttgagacagggtttcactttgtcacccaggaggctggagtgcagtgatgctatcacagctcactgcagcctcaacctccaggctcaagcgatccccctgcctcagcctcccaagtagctgggaccacgggcacccgccaccatgcccggctaattttgtgcattttttgtagagacagggtttcgccatgttgcccaggctggtctcgaactcctgagctcaaatgatcctcctatcttggccttgccatatgcaaaggccaagaaccacgtgacgaaatttgcatatggcaaggccaaagggcatcaactccaagccaaaggtctgttcctttcttgtctaatatctcgaaatagttgattccatacatctccaggtcctgagcactcttcaggtattccaacatagcattatctttgagcatcccacggtgtccc

SEQ ID NO: 642140 - DNA, 635 bp, Homo sapiens
  misc_feature (578)..(578): n is a, c, g, or t
taatgtctgtgagactttcggtaaaatctaaagtacctgtatctgttcaactaaaaactctatatcagtccttgggaaacctctcatcgtcaaaactttatgttcactttgctgtgtagatagccagtcaaccagcagtattagtgctgtcttcaaagatttaagctctataaaattgggaacattatctaagatcattttccctaagcattgacacatagcttcatctgaggtgagcatatggcagctgtcgaatctgcatctgtgtctgtctacccaagagtgcaaaatacagtgtttacttgaactttcaactttgtaactgcaaagaattccagttcagccggacgagcatgagtatatcaaataagctcgtccgtaaggattttcatgtaccaccaaattgtttggattttttctttccatcttcacataccagggtcattaaacagtgtgtttccttaaacactcatattacagttccacaggtcaaatttcgtcaatgcgtatttatttattccagcccaggaactataaacgcacgtttcaccatatatgaccctcagaaggtggaaacntaccccaagatctaagtttggcgtcataacctccactatggcttattcctggggaaa

SEQ ID NO: 642141 - DNA, 935 bp, Homo sapiens
ggtagcgctcgacacacacgtatggttttcctcgtgtcgtaattggccggtccgtcttcgaccgtccatcgggacctccactgagtctctcagtgccatccctgtagtcgtctctgtaaccactcatatgtcatggacggatggttccacgactgtcactttccggtgtaggtttatggctcagtcagtttcaatctgttcaccggatccactgttgggacttccccccttcgttctctggttgccaaacctttcattggccggtccttgctgcgatcgatgtctgtatgatggttctcttgctatttgtcgtggcgttaactaaggagtctgggggcttccctacgtcgttggcgctgcctgtttcctcctctgatctctcaatggcccgtctctttggactataaggaggtgtcttgcgtcccgtccattttgggtgtctggcgatgttccgatcggacagttggtagtcatgggtggtgtccactacgaagcggctatgtgggccgatgcgtgttcctatctacgacaatctaatccaacgtcagtcctttgcgtcttgtcaggagatgccctcaatgctggctgtcatcatagaatgcgtggcttgccgagcggctggagcgcgcggctcattcaagcagtcatcattcaagtacagaggtcccagccagagtgaggcagctgcagctgcctggactcttctgcttgtcacttgtcaggaatgttgttttggtaccaccacagggaatactgcgttcaaatcaacgtatttatatggtatctgctgtgactgcggcacatacaccccagcgcgcacagatgcgtgtgacccagaggcgtagatcgcagctttgtcctgggagacgttcatacttggaatctatttaacgtgcttaaagaaccttttatatatatatatatatataaatata

SEQ ID NO: 642142 - DNA, 234 bp, Homo sapiens
ttgctaccccttctttgtggtatccctatgtgggataattatgagcgtgctccatctgcctgcgacaaacagacctaaaatcgctcattgcatacgctgcaatcggccacatggccctcgctagtaacaggcatgctgatccagagcccctggaggcttcaccggcgcaggcactttcagtatatcggccaggggtctacatcctcattcactattgtgcctcagagtagagca

SEQ ID NO: 642143 - DNA, 351 bp, Homo sapiens
agacagggtcttggggaaaaaaaaaatttaaatgtgagaagcggttaggcttgtcaggagctgttggcagacaatgaaagcttttcaaatgtctttaaaggtttagcatccctactctacaccctcatccaatggtgtaagatgactcgctgtcccccaaatactcttgtagacttttatgcctttgatcatggctgcttgaccttacatagtattcgtgtcacttgctaaagctttgcttatcccttatacccacctggaatgacatactcctggagagatttactcctttagccgcgagctcattgctttccactatgacggcatttgcagtaagtcttcccgggcaag

SEQ ID NO: 642144 - DNA, 335 bp, Homo sapiens
attatgggtactgagcagatgcagcgcagcctccaggacgggtgacctaatggccagaaaggagccctgaacggtgcaaggagccctaaacagccaggaggaagaagacgtcattgtcgcagagggtaagccggcccgtccaggaacggggaggcacacagcactagcaacaaacttgggactcagcagaaaatactctgtcatactgcctggtggtggattggtgttaacagcaaaaacaatcaattggttacaaaaggaagtatgtatctgaccatttggataccccctatacttagaccttgaagttatgtttcctttttcttatctggaac

SEQ ID NO: 642145 - DNA, 460 bp, Homo sapiens
  misc_feature (60)..(60): n is a, c, g, or t
  misc_feature (134)..(134): n is a, c, g, or t
  misc_feature (329)..(329): n is a, c, g, or t
  misc_feature (409)..(409): n is a, c, g, or t
cagaaattatgcaagccggaagacagtagggtgaaatttttaaagtgtttagcaaaaaanacaaaaaacaaaaaacaaaaaactactaacctagaattccgtaccctgtgaaattatccttcaaaaataaaggngaaataagacaaaaatcgatcatttaaggatgcagagaaaagagaactcttatacattgttggtgggaatgtaaactagtacatccactatggaaaatactacggggatttcacaaaacactaaaatagagtccatttggtcagccatcccactattgggtatctcctcaaaggaaaagaaatcaatatatcacnggggtggctgtacttacacatttattgcagcactattcctaatagcaaagatatcaacctgtgtgtctatcaactaatgnatggataagtgttacagatatacatatacatacagatgtacatgtatatat

SEQ ID NO: 642146 - DNA, 349 bp, Homo sapiens
tgctcgtaccattcattgcggtgagcatcttacaaaaaaaacaaaaaacaaaaacaaaaaaacattaaggcctggcacggtggaccacccgagtaatcctagcactctaggaggccgaggaaggtgggatcacctgaggtcaggagttcgagaccagcatggccaacatggcaaaaccccatctctactaaaaataaaaaattgaggccaggcacgatggctcacgcctgtaatcccagcactttgggaggccgaggtgggtggatcacgaggtcaggagttcaagaccagcatggccaacatggcaaaaccccatctctactaaaaataaaaaattggggccgggcac

SEQ ID NO: 642147 - DNA, 125 bp, Homo sapiens
atgagccccgttcattaggaaagatgccgcacattagtaaagattccgggattagtaaagatgccgcttattagtgaagatgccgttcgttagtaaagatgccgagcattagtaaagattccgct

SEQ ID NO: 642148 - DNA, 198 bp, Homo sapiens
aacgccaggatcttaaccaactgtagcaaggccagggatcgaacacgcaactcatagttcctagtcggacccgctaaccactgagtcatgacaggaactccgatctttttgaaatttaaacacattagaaagtagccagccggttggaattattgatgaaaagaaactgctctcctgaggcctgtgctccttaggaag

SEQ ID NO: 642149 - DNA, 147 bp, Homo sapiens
gtgctgggattacaggcatagtatgctcccagccagctttgacattctttgtatgtagctgtcacagctggcaaagactaacgtaaggcacatagtctcagcatgaagaaagtgtgtcatttggctgcgtttaatcctcgctgctcc

SEQ ID NO: 642150 - DNA, 201 bp, Homo sapiens
tgtcgtactgttgtgtaaccgtggtgatacgagtaatggggatagtggagctggtggtgacggtgacgtggtgacagtggtgacagtgacggtggtgacagtggtggtggtgacagtgacggtggtgacagtgacggtgacagttacgtaatgacagtgatggtgatggtgacgttagtgacgtttgcttgctgccactgt

SEQ ID NO: 642151 - DNA, 226 bp, Homo sapiens
ggaaaggccaggtttccggggggaaggcttaggcagtgacaccgagcccagcctcctcctccagccaggaaggagaacgaacacactgagagagatgagcgatgggtcacagaccgggatggaagaccggcgggcagagagtgccgggaaataggagggaagtacaggagacgaggacggaggaagaagcccaaaagagcaggtgcagatgggcacccggccacca

SEQ ID NO: 642152 - DNA, 210 bp, Homo sapiens
tcgagctcggtaccggaacaggtagctgccgcgctcgtcggggttgcgacagcgagtattgccgcgtgacgccggacggcgcggtgacgtcgatatgggcacccggttcgtacgcatcgaacggctggccgtcgacgcgcgaaacccgaaaacagcggatgtcctgcgccgcgtcgatcagcgcgtcgatccggacttggtggcggttcg

SEQ ID NO: 642153 - DNA, 729 bp, Homo sapiens
  misc_feature (511)..(511): n is a, c, g, or t
cggggtcgcggacgtggacggggccggggccgaggccgcggagctcgcggaggcaaggccgaggataaggagaggatgcccgtcagcaagatgagccgattggtcaaggacatgaagatcaggtccctggaggagatctatctcttctacctggccattaaggaatcagagatcattgatttatttctgtgggcctatctcaaggatgaggttttgaagattatgccagtgcgcagacccgagccgtccagcgcaccaggttcaaggcattaggtgctatcggggactacaaagtgcacgttggtctgaatgttaagtgctgcaaggaggtgttcaccgacatacgcggggccataatcctggacaagctctacatcgtccccgtgcgcagaggctactgagtgaacaagatcggtaagccccacactgacccttgctaggcgacaggccgctgcggctctgagctggtacgtctgatgcctgtacccagtggcactggcatcgtgtgcgnacctgagccttacaagctgatcatgatggctggcatcgatgactgatacactctaatccgaggctcgactgtcacccttggactgcgacatgggcacttttggatgccatatgtaagacctacagctacctgacacaggatctatgcaagcaggactggttaaccaagactcctatcaggagctcactgccacctcggtgagctcaccagtgtgcggg

SEQ ID NO: 642154 - DNA, 792 bp, Homo sapiens
gtggctcacgcctgtaatcccagcactttgggaggccgagacgggtggatcacctgaggtcaggagttcgagaccagcctgaccaacgtggtgaaaccctgtctctactaaatacaaaatattagccggacgtgggggcgcgtgcctgtaatcccagctacttgggaggctgaggcaggagaatcgcttgaacccgggatggcggaggttgcagtgagccgagattccgccagtgcactccagcctggacaacaagagctaaaactctgtctcagaaaaaaaaaaaaaagggtccctggaaaaagtcgcaaaacagcgagcttttcgccagttgccagggattccggttaaaacgagagagactaacgggagggagcgcgagcatagcgcgcgagagagagagcgagagcgcgcgcgccgatgacgttcacgctcggagtctcggccatcttagctgtaggatagaggcggcaacctcgcgaagtgcggagcgggtgggcctatataaaatgtcgcaggtgcggaggccgtgggctttgtgctggggcctggctgtagccgaagacagcggtaattgccacgcacgggcttatgggctggtggggtccccgcgctggcttcgccttttcatacccggatggagctgtctcgataccgggtggcccaggtggaccccggggccttgtactttggcgttgctcggccgtgtcctacggatgtgtcctccggccggaaggcatacgagcctgggctcccactataggcgcgttccggggcggagaccgcatccag

SEQ ID NO: 642155 - DNA, 529 bp, Homo sapiens
ggccggggcgcggtggctcacgcctgtaatcccagctctcagggaggctaagaggcgggaggatagcttgagcccaggagttcgagacctgcctgggcaatatagcgagaccggttctccagaaaaggaaaaaaaaaaccaaaagacaaaaaaaaaaaaaaaaaaaaaaaaaaaaattttggggggggcttgggactagaaaaagtgtttttaaaaacattcggtgtgggggggggggccccaatttttggtttatgtgcaaaatttgggcaaaagggggtgcccaagaggaagacccaggtccggcatgcaaccacgaggcgggtgggattttcccccaccccaaataaaaaaaaaggccggcgggggagcacacacgggagggtgttggtggaacaacaacccaccaagagggggaggtcccggggaggcccacgacgggtgatcacaaacaacaagagggggtcccaaggggaggaccacacaatcacaaattccccccgcggcgcggggagaaaaagaaaaaaga

SEQ ID NO: 642156 - DNA, 772 bp, Homo sapiens
tggcccatgccacgatcatccccaaggtcttcgcccatgctccggagaccccatctaccctgcaccgcatgactacgctcttctgcatcaatgtgctgtctgaggtctattgggcaggacatcaccaccatagcacatgctacccacgtgttctgcgcatgtgctggggacccggttgccaatgtccgcttcaatgctgccacaaagtctctgccagaagatagggcccatccttggactacagcaccttgcagagtgaagtcaagcccatcctagagaagctgacccaggaccaggatgtggacctcaaatacatttgcccaggaggctctgacatgttctgtctctcgcctcgatgactggacgaggagctaaactactggcctctgggtagtccaccctccgaaccctcctacaagtcccatctttggggagacactaggaggggcctttggctgtcactccctgtgcatggtctgaccgcaggcccctgtcccccagcaccggttcgccatccgtctccccagccttgggaagatcgtctcacatgtccacctcccaacgggctaggggagcatcggggttcggacaggacagtgaccttgggaggaaggggctactccgcccacgtcagggagagatgtgagcatcccgggtcactggatcctagcatgctgtaatgggaacccctcccaccatttacattctccacctcccgtcctccccatcagcggtttttttacgataccccctggcctcgtctttatatata

SEQ ID NO: 642157 - DNA, 398 bp, Homo sapiens
  misc_feature (49)..(49): n is a, c, g, or t
tgcacctgcgtttagaggatcccacgaacaccgccccgtcgatggttanagcaccctacatcctcatcttgcaccagtcacgtcagtgccccagacccagcatatttgcaatgcctctgtgccgtccaaggaacgttaaatatcaataataaaaacagtaacaatgaccagcaaggaccccagtttctccacttgctagttgtgtgatcttgaagaacctgaacttctccgagccttagttagctcatctattacacatgagggcagtacttctacttgcctttgtagagctcttgggacaggtcacgactgtaaagccatgagcaaggccttggtgcaattccacagaggaggcaacagtgttagttgacggaaagaaagaggagggatgggctcgt

SEQ ID NO: 642158 - DNA, 854 bp, Homo sapiens
  misc_feature (308)..(308): n is a, c, g, or t
gcaaaaggggaggaaattgaaactgagtggcccactatgggaagagggtgaaagcccagggctacatgcatggcctctgggtgacaggcagaggctaacatggaggttcggatgcgaccttggcctggttggccatgaccatctttgtagctgtctgtcagtcactatcatcagtctgcttcaccttgctcctgcttgctagcctttacaaggacgttgccgcgaccacgtccggttgtcaccgacacctagcatccaccacttgtggatgcagtgccccttatcctcagtcctccaagatgtgccgncccagtgctaaccctggaaccaagctaccagggctaccagcaccatgaccgcctcagccaggggatgccagcagtcagcctacccaactgcagtacccatgcaccttactcagtccagcccatgggcccaccgggctaccactgagaccctggctggattgagcatgctgcgccctagcccgccagccagcctccttacaacccggtactacatggatgccccgaaggcggcctctgagcattccctggccgtctctggctgccacttggttatgtcgtgtgtgtgcgtgagtggtgtgcaggcgcggttccttacgcgcccagtgtgtgctgtgtgtgtccaggtgcggttccttacgccccatgtgtgctgtgtgtgtcctagactgtatatgtggcttccctctggtgctgacaaggatggggaacaatccttggccagagtgggctgggaccagagtgcgctctcttcctcagctgaaggttctgcttcctaaatctcaagccacatcagagcatggggtggcgggggagcccctgtgaagg

SEQ ID NO: 642159 - DNA, 232 bp, Homo sapiens
ggttttggggggggggaaaaaaatttttttttggccccgcgcccaaaaaggggaaaaatgggggcccccccccttgttttttaaaaggggggggggggggtttttttaaattttttgggggggggttaaccagggtgtttttcaaaatcccccccgttccccctttggggtggccggggccctttctttttaaagtttttttttatttttttcccggctttcccccaaatta

SEQ ID NO: 642160 - DNA, 591 bp, Homo sapiens
agcggagagactgctgagcccgtccgtccgccgccaccacccactccggacacagaacatccatgctcatggataaaaatgagctggttcaagaaggccaaactgggccggagcaggctggagcgatgatcgatgagcatggcagcctcgcatgacagtctgtaactggagcaaggagctcgaattatccgaatgaggagacggaatcttcgtctcgagtggctggatagcaatattgttgtcaggatgccctgtagcgtcatctaggatgggtccgtctcaatgtacttgaacaagacgacggaaggtgcctgacgaaacacaacagcagatggcgtcgacgaatacatgagagaaaatctgagacggagctaagagatatctgccatggatgtactgtctctttgggcaaaagtgcttgatccccaatgcttcacaagccagagagcaaagtcttctatttgaaagagtgaaaggagattactaccgttacttggctgaggttgccgctggtgatgacaatgaaagggattgtcgatcagtcacagcaagcataccaagaagcttgtgaagatcagcgaaaaacggaca

SEQ ID NO: 642161 - DNA, 483 bp, Homo sapiens
aggaaaggttttctctctatctttaaatacaatttttttttaaattttatcctttctacaaaaaaatttttttatttacatacaattatattaattgatggaactgctaaaatttttttaaaggggatcacttcttgccctttgttcctggttttattccattatttttttttttctcttagagggctaagtggttttatttctcttaataatagatttgcataagtcttttcctttttgtaatgtttctaacctattttattcttaatcactttttagtaaataaatattaaatattgtcctattatcaataccacttcccttaatatatataactctttatactctttatatcacattattacttacaccttacactttaattcattctaatggttcaattttaacttaatgtaattattctttttaatcgatctatgccccttgtaatatccatacatttagggaatcacgttctttaaa

SEQ ID NO: 642162 - DNA, 131 bp, Homo sapiens
gcgaatccaggtgctaacggtctcagttgagaactgtggtccccctgagaccccagtgtcttcctggtctggctggtacagcatggtgaaccgttgattctgctgacttggtacctgatgctctgaattct

SEQ ID NO: 642163 - DNA, 117 bp, Homo sapiens
aaaatttggccccccccgggggggggttccccccgggggttttgaaaaaaaaggccccccccccccccccaaaaaacaagttttggggaaaaaaaaaagccggggttttttttttta

SEQ ID NO: 642164 - DNA, 476 bp, Homo sapiens
caaagattctcctttatgtctgtgcttgtcgggaatccccctgactcccaaagatggggtccctgctccgtctcacagggatctattagtatatgtggcttagccatcatacatttgccagtgttgtttcatcatctgcctaattatactgttatggaatattgacagttcgttatctaatcgttactacagattatgctggagtgagcaatctctgtgtacataggttctagtactcctattggaatattttctttatataggcgttttttatatattcacttttttttgggagacaagagtcttgctcctgttgcccaggctggattgcagtggcgcaattggagctcactgcaacctccatttcccgggttcaagtgattgtcccacctcagcctcctgaatagctgggattataggtgcatgctaccatgcctggctactttaggggttttaagcagagaacagggtttcac

SEQ ID NO: 642165 - DNA, 241 bp, Homo sapiens
  misc_feature (26)..(26): n is a, c, g, or t
  misc_feature (37)..(37): n is a, c, g, or t
  misc_feature (195)..(195): n is a, c, g, or t
aagcaatcctaagcaaaaagaacaantctgaaggtgncatcacattacctaacttcaaaatacactacagggctatagttaccaaaacagtatggtactggtaaaaaagtagttacatagaccgtggaacaaaatagagataaagccgaatacttacaaccaactgatctttggcaaagcatacaaaagcataanttggggaaaggacatcccattaaataaatggtgatggggaaaattg

SEQ ID NO: 642166 - DNA, 385 bp, Homo sapiens
  misc_feature (168)..(169): n is a, c, g, or t
  misc_feature (274)..(274): n is a, c, g, or t
  misc_feature (281)..(281): n is a, c, g, or t
  misc_feature (295)..(295): n is a, c, g, or t
  misc_feature (307)..(307): n is a, c, g, or t
  misc_feature (327)..(327): n is a, c, g, or t
  misc_feature (332)..(332): n is a, c, g, or t
  misc_feature (337)..(337): n is a, c, g, or t
  misc_feature (369)..(369): n is a, c, g, or t
aaaaccccacaacagcctgttcccaagcaaaaccagctccaactccagagcagggcaaccaccagggcaactgtggcagcaggcaagaaagaagaacattatgccctatgtcctttgaagagccttcctgcccgacctgtggccagtgtgtgcctcacctgtgtgagnntggcgatgggaggagactggtcagctctgcctccacccactgtgcccagcctccctggtgcttgggaagagagcagggttccttacattcagctgctgtcccttngtctttnccaagggtgccccnggttcatttagnaattttgcctcttgaaaggntgctnaaaancttgggttttggtaaaatttaattcggttcantggggctttttttggg

SEQ ID NO: 642167 - DNA, 453 bp, Homo sapiens
tacagattgtgagacaccgcacaatcaatttaaactcttcatgtctggactgatatatcctaggtataagcctaagaaaattgccttaagtaagactgaacagtgccttgactctcttgctctcagacaaatacccaactttccagagtgtatattattgaaaaccacaaaagttgaaaatgggagacagctaacttggaaactctccctcatccctctttctctgtcattgtcagagtcagtgataagaatgagaggtaagtgctcttgcccatgtatcgtacttttgcagtggatggggtccttgactctctgagagtcatggcccttaagaacatctggagcagccactgaggactttgtcagcaacttctcattccaggcaacaacccacagtggcagccagcagccctcagctccgcgggaagcggtaggggggaagtacgtggactt

SEQ ID NO: 642168 - DNA, 238 bp, Homo sapiens
tgagtatgtcggggcaggtgcttcggggcgggggattccacgaggtgaagtcgcgtgcaggtatagactgagggtgtatcggcccggaggaatgaggttgggggagtggtagacgtgggttggttcggggaatcggtgaatggggggagggagcgtgcgcgtatgtgaccctctggggagtatccccgaatttccgtggtgtggcgggatttgtgtgaggggagtcgaggggggacac

SEQ ID NO: 642169 - DNA, 636 bp, Homo sapiens
taaccacttctgctgtcatggtagtaggggaaggtaaattgggaaatggcattgacataaaatgaaaatgtttacggacacttttctttttggcttcttcactgtgtattgtgataaagatccacgttaaaagcttcatcgtggtttttctccgtggtttcttcgttgttttccccccaagaggtggtactgtcactgttttccactaaatggcgtgctctctataaagggcatgtgctgaatagcagcagtcacagagtgaacctttataagatgtgccacgaggtgacgttaaaacttacatcacttacaacaagagctaacttaacatatgtcactacacgtgggcaaaatattcgatttcctccattctaacaaatccatagtttcacaccgtggtaaagccagaatttcacacccctcagctaatatgagttcaaaacacacactgcggggctaaacagggggggattctacagtgcctcgggggaattagaatctccgcccattagtctacgacggtggcgacaatttataatttccctcccatcttacacgcgataacacttcaactggttaatttcccccttaaattgcgcattaacaactaccactgcgctcgtgtcaccctacaca

SEQ ID NO: 642170 - DNA, 493 bp, Homo sapiens
cgagtccaagctgattctcctgcctcagtctcacgagtagcccggattacaggtagtgcaccaacacacccggctcatttttgtatttgagtagagatggggttcaccatgttggccaggctggtctcgaattcctgactttaagttatctgcccaccttggcctcccacagtgctgggattacaggtgtgagccactgtgcccagcctacctggctacttttacatgtatttgtagagatgggatttcactatgttgcccaggctctcaaactcctggcctcaagcagtcctcttgccttggtctcccaaagtgctgggattacagatttgagccacagtgctggctggtgctcagatcttgaacagtcagaacaatatactgttgaagcaaatttaaaagaaatataaaaggacaacgttagcaacagttcttaccacgtagatggaacatttatcatttttccaacctccctgctggattttaccaaagc

SEQ ID NO: 642171 - DNA, 842 bp, Homo sapiens
ttttcgtttttttggaaacgaagtacactcttgtggccaaggctggagtgcaagggcacgatctgtggctcaccacaacctgccgcctcccgaggttcaagcgattctccgtgcctcagcctcccaagtagctgggattataggcatgcgccaccacgccgtggctaatttggtattttggttttagtagagacgggctttctcccgacgtgaggtgatcccagagtgctgggattacaggcatgagccattgcgccgtggcctagaaaagcagtttctaaaaccaggtgttcttatttcctttccagtttcttcgtgttcactttctacattcaacttcagtttaatttcaatgagacttagagactttccctaaaatgccccgagatggctgtggggggatatagtcaagtcaccagagttcaagccccagcaactacagggctttacaggaagtgttcgatgcaaattggtatattttagaccggaaacgtgctccttttttttttatgtttttttccgcattttgggaccggggtgtgtcctccctcgcggggttcgggactccaaaaggtgggacaaaagtttcaagttcaaaattagccaacagagtttttataatagctaaagtgggtggtgaactgggtgagtggcccctgggagagttttcatccgtgtcctcataaaattttccccaatactacagaatcccagagagaacccaaggttcccaattgcgggggtatccggacattggggtccatcataggggggccctcaaccctcttttaaaattgagcctttcttaaacgtgcaagaacgggaagagaaccagaagtggg

SEQ ID NO: 642172 - DNA, 421 bp, Homo sapiens
tgtcggccaaaacaaccccgcggttggcacacaggtttaaacacctgcctggggctcctccctaaaggaccctgcctgaaagcaaaaatggaggccttttgttcccggcggattttttgttttatatcctacaatgtgctttgcttgttgctggggggaaaatgttttccacaaatgaatttttcctccaaagggggatagggccttgggcccccctttttcaagggccggggggggggttttccattggatttgaaaggggggcccttttttagtccctgttactcaaatgtttacccccccgggggccccccccgtcccccaaaattttgggtgttttcaaatcacgggtcccttggggcggttttaaacccctgtttgccccgcctttttttttttttaaataaggttagcccctcca

SEQ ID NO: 642173 - DNA, 588 bp, Homo sapiens
  misc_feature (26)..(26): n is a, c, g, or t
  misc_feature (138)..(138): n is a, c, g, or t
  misc_feature (215)..(215): n is a, c, g, or t
  misc_feature (220)..(220): n is a, c, g, or t
  misc_feature (281)..(281): n is a, c, g, or t
  misc_feature (300)..(300): n is a, c, g, or t
  misc_feature (400)..(400): n is a, c, g, or t
  misc_feature (417)..(417): n is a, c, g, or t
  misc_feature (464)..(464): n is a, c, g, or t
  misc_feature (469)..(469): n is a, c, g, or t
  misc_feature (489)..(489): n is a, c, g, or t
  misc_feature (582)..(582): n is a, c, g, or t
  misc_feature (584)..(584): n is a, c, g, or t
  misc_feature (588)..(588): n is a, c, g, or t
attatgtttttttcaaatatattaanatcactaccatcttgtttgtttatcgtatatagatatttaaggagaaagatctttacttttcaaactgcatcttatatttctactttaaacagatcttatttcaaacatgcnacaacgccacttgtaataaagctttggaatgggtgctcattctattatttcactacaaacagcatagaaagcaaganaagtngggaatttattctaaaatagaatggaggttgttatctacagcagccctcctcactcctctnttgccatttttagcaagtnctccttgttgatcttgaacagtctccaaccctctccactggacagatcagaagcacctctccttttatagaagttgatggatggttcattccattctgcnaccaagaagtgcatgcngctgcagcgacacctcattgcaacctggcttagattcttcagaattnctgancctatgccaaagcctctctnatcactcatcacgaagaagtgctcaagagacaataacttgccaatgcacgggtcataggtgaaatagtacatggcaaaaccaacaatgctgtntncttn

SEQ ID NO: 642174 - DNA, 259 bp, Homo sapiens
acggtgacgggaagctgtggccccgtataccgatgatttgttagatattccatctatattgttatgcagttcacttggtcgttatgggacacttgtacaggtcccggtcatcctttaccctgttctgtcctaatgtaccatctcgccatgtccctgtgtaatattatagctgggatattgacatccacctctcctgtagacacactctccatgtcctctcttgtgtcacattcgtgtgtgcggcgctttgatgcattct

SEQ ID NO: 642175 - DNA, 399 bp, Homo sapiens
ttacagggtttcattccatggtgtcctgtcttgacttgggcatgtgttagagaacttgtgaagtcactgccttcatttaaaagatttggggaacaaaaaaatctgacttattaaaaaatctctctatagcccttattgtgaggcattttatcaagatgctatagaaatcagagtcccatttgctggctactagaagttaacaaatataaacatttccccaaaagaaaccatctaactagttgacgaccttacgccaagagggttctttctgctctatgaatgaatccgcctatgctggcggacaaatacaatccattgtaaatgtcatggtttcactagaggggggtgagacgccacccgtcagcggactcctcaggcacctagagaggaaggtcatgc

SEQ ID NO: 642176 - DNA, 166 bp, Homo sapiens
ccgaaatactttgacgcctggtggggatagcgatgatatggtagcggaggtgaaatatgctcgctgatgtctacgtctagttcctactgtagatatttggtgttgctcacactataaaccctagagtaagccaatttgtatatcatagcctgggtacccgtctata

SEQ ID NO: 642177 - DNA, 1887 bp, Homo sapiens
caccccagaagggtcagctctaagcagaaagtcattgttgacaggaagaggggtcagactttcccttttccggccagcttcctgggtaccaaaatagcaacgcggcacaacaaagagttggggcggtggaggcctcccaaatgggctggaggacacaccgaccccaccccatgctgcccacccgcctgtgggatccaccatgccacatgacagccagcctgacagcaccagtcgctggtgagtctggtagccctggaaaccctctcacagccagccgagatgtgagggacacagagagaggaggtgccatttcagacccctatgcctggcacgttggggtgagaaggacacaccagtcagagctggttctgaggctcgcatccggagggagatcctggaaccagggctgaggctcgcatcctgagggacatgctggaaccagggggcatccgagttggggacacagtctgggaaggtgtctaaaggaagtgagaattgaaggagggacagagcgctacccagaagggcataactagaggctgggaccaggtcaggaaacatgtccctcaggtgtagaagctgcaagtgagaaaccaacgtggtaggaacctcagcaggctggctccagctccagaagctgttggagttgaggatttgttctctgtagaggagcaacatcacctgtgtagtctggttcctaggctaggccatcctctagaattctgtgtgagccagaatgttcaactaataagagaaggctgcacattgtgggtggagagcgggaaagagagggggcttgcagcatctgcaggggccagaaactacatgcacagagaagctttctcaatcggaaaagagcttaggaaacattgaactggagaacaacggaagcaaacctgtgtccgggagtggctccagtgaaacccacctctttctctgtgtatggaattccaaacacccgttgtacaggaggaagcagctacagatcgtcctactcaccagctgggtggcaccaccggctttaagtaatgggtaaactggctcaagcaagcctgggactcagagacagatgtgcgaagcagagatgttgccatgcctaggctgagggctttcagccaatcggtgaggggaatggaggagaaaggagagaggggtgttgggttgagggccgggatgttaagaaaaggattgtatcctgggagatgggctaaggatcaagaggatgaggagaaacaccccctcccacagcctctgcagcacccagagttgcaagatccaaagagatgttcctttctgtcctctctttgctgtccccctcccctcctggccctcccagcattgcagacccttgcctctggtttgcagctgggctaagggcaaaagcagaagcaagagcctgagctgctttttcctgcctggatttctgttcttgcagttgccacagagctggctccttctcatcatgctagtcttggcttaaacgttacatcctccaagaggcctttgctggccaccgcagtgacgtattccaccctgacatcactatcacagtccctgctttagttttaagacagcacttaccacgaactggtattttctctcgtttccttgtttatttttgtctctgccatctagaatggaagctccccgagagcaggaaccttgtctgtgttgttcatggctatatccccagcactcagaacagggcctggcacagagtaggtgctcaaatatttagttgattcatgatgaataataattgctaacattggttgagtgttactacatgacaagtacttatttcacatattaactcatgggccagtgagctataggcctctgggcaaatccagctccctgcttgtttttataaatacattttattgg

SEQ ID NO: 642178 - DNA, 365 bp, Homo sapiens
ccccccaaaaaactctccagtagcttctttcagtgtcacaaacatgcatgcagcatttttctcatgatgaggtttcaccccattcattcagggtggtctttggtgtttcaaatctttttttaactcaataagatttacggggtgtattttatacagaaatgcattataaatgtttttaattgtgttctgttttttgcagtctttaagtgccatgccaattgttcttatattctcatagaagttcgctcaaaatactcaacaggggaataggcagcggacagtcagacatggttggaatttaggctttctaagaaaaactttattttgcataagcatgtggtcagatcatttcgtgcatatgcagc

SEQ ID NO: 642179 - DNA, 148 bp, Homo sapiens
ttgtgtctgttgctcgttccactggaggggcacacagcgctggagtgggcatcaattccgactccaggcattcccccattcgcatcttgggggactcacaccaagcatccaccactccttaaggagacagtacctatcgatctgctct

SEQ ID NO: 642180 - DNA, 259 bp, Homo sapiens
gagtagctcggattacagacattgccaccacgccaggctaattttgcgtttttagtagaaacggggtttctccatgttagtcaggctggtctcgaactcctgtacctcaggtgatctgtccgcctcggcctcccaaagtgctgggattacaggtgtgagctaacgcgcccggcccttggcctgatcattgtaaagattcaggtaactgagctctagggggtcaagagactgtggccacttaggcagctgcattgttcgt

SEQ ID NO: 642181 - DNA, 955 bp, Homo sapiens
gtttgatattgttccctgtcttccttatttccctcttagatctgagacttgttattagagaaataggatagtaaattaagtttcgagtactctattatgttacagatatttgcttgtccaatgagaaatccttaaaatatggccttttctgtatttatagattgtctttcattaacaataaggcacaaaggcatcgcagaaacgatgggaaaatgtgatgaagagcatcccaagagctgaaaatgcattggcaaaaaaaaaaaaaatcatttaaatcattataattatgtttaaacggttttcctttaacacaaaaggctgaatcttcactattgaagacttgtcaaaggtaccttgattaaagacagcagcttttccagtttggccattagaataaaaagacgtgaatggttcgtgaaaagcacttgaaagtacagaactctggaattggtggtgacgggacactggaaaaagaccagaacattgggatccatgttccctgacataattgtgtgacagaaataggaaggcagtctgagggaaaactgccataatttttccctaggactgggaaaggccgataaatttgtccctgttaacaaatgcctatgtgctgaataaagtttattcctactcattgggttaatgttaattcccatccctgtggacactttttgcctgcgtttcaagggtataagcaaaatctcctcctttggtcccttttacatttcggtggctgacattaaggtggacccgaagaggagggcaactattttactcatggaagttggtttcagaggaacccgtttcgttaggtcggcactactgtaacgcggtccatgagtaacaacgtcacgcgtcacgtcgagggatgactccgatagtacgagactttacggggtagagctacaatggcgagcaaaaacaggaatacacaagcggcacacctctcaga

SEQ ID NO: 642182 - DNA, 386 bp, Homo sapiens
  misc_feature (43)..(43): n is a, c, g, or t
  misc_feature (83)..(83): n is a, c, g, or t
tcgccagtgatattagagcagggtcatcctcagttccccttgntgtgcaattggaattccccacccaccccccaaatatcccngtggcctacactcaagaataaaattgcagctggacattgtggctcatgcctgtaatcccagcactttgggaggctgaggcaggtggatcacaaggtcaggagttcgagaccagcctggccaatatagtgaaaccccgtctctactaacaatacaaaaattagccaggtgcctgcagacctggctacttgtgcagccgaggcaggagaatcttgaacccaggaggcagaggttgcagtgagcggagatcgtgccactgcactccagcctgggtgacagagcaagactctctctcgaaaaaaaaa

SEQ ID NO: 642183 - DNA, 1139 bp, Homo sapiens
gtcctgctttctgtttgtctgttgtttgtctatctgtgctttgtttttatttaacaacagataagagaggggtaggggcaaacagcacggaagggcggcaagaaggaaggagagaacgcacgggtactctgtggttgcatccattgtccgggtcgtgttttatcacggcctgtgcttgttacccaaccgcgtctctcgtgttgtctacctagattgtccttgcttgtgttcttaacaactacaccttcgtggtgatactacttatacaaaaacaaaccaactggggtgaccgcggcaccaaagtttttccgtgtgcttgttaccacaatgacccgtccccccggggtttttgatgtattttcgtcggtcgcggcgcttggacctgtttctcttaacgcatgagtgcttcccacatccttggtttttttagccgccccgccggtgggtgttttccacagaaccctgggtaaccaaatagttgctggatcttcccaaaggtggggtgtccacacctgtctatctcgggtgcgctggtccttatattatctctccggtcgctcaatggatcacgctgtgcacagccacaagatgttaccgcggttggtttcactcacggcgctgcaccatatgaccccatagtgggtgttgcgcacgacgtgtagtatgcaaccagcactagtggctcattgatagtgctccgcccaatgaggaatatctttgtgggagattgtgttaaagagcgctttgtgtgggtcccaaaccccttgttagggagcccccccctcgaagatccctaaaatttagcgcacctgtgtagaggataaatatattctcgcgctgtctaatctctctgatacggttgcctgtgcggacatcaccccggtgagaagagtgggctcacactggaaggcgctataatctagttttcctattgtcctcgaaaaaattttctttgggggtgtcacacaaaaacacaggtgtctcccacaataggggcgcttggtcctcctccaacaaagggagagggggcacaaattgggagcgcttctttcttaccgcacttttcacacagggaatatcgtgcccgtttttgtcttaaagctgttctacttttgttccgagcacaaagatacaaagaa

SEQ ID NO: 642184 - DNA, 621 bp, Homo sapiens
tggcacaccattatacagaaccatgttgttttcgtgcccgcaattataattggtaaccccttttgcaccaggaacaccaaaaagtcttcacattgtataatgttaccactccctccggcgaacctccttgtaattgtccgagccgcccccctctcctcgcctcaggcaatttcttacctcccttcttgagcactctgctctatataaaaaaaaccttgggtgtatataatggatttctcttttaataacgcgcgccgctacaattaagtctaacggccagccatcaccctccagcgtcacttctttgaggtggaatagaaaagtaaaaattctgcagtctcccccgctgttcatagacaccgccaccccgctctcatttcttgctattactcactataaagcggcccccccactaagagcaccacgcatacgcttatacagagcccccgtctggttcgcaatacgtatacaaaacacactttgtctaatatcttttatatattcctccacccacttttaatatgtacgcttttctccgcacaaaaaaaataaaaatatttttttttaatacacctcgtacagaatagaataaatgaccaaaagggcccccccaacaaaaca

SEQ ID NO: 642185 - DNA, 481 bp, Homo sapiens
gtacggaagttaggtttgtaggttccagagaggatctgtctttgggaggagtgtggagagactgagatggagggaggggtcatatggaatagatgcgggcgctacttggcatatgtccattgtgaggcactgtccattgtgaggcaccaccgggatcatcagggattggtggagagggagtataatgccccaggattggtaagggagggcccagaccgaagaaggtggggcggatagcagaaccttttggtctcccgctggattgctcctaagcctcacgctcccttgccccgtggtgtcctgtagcttccctaatcttctccgtgacctgtagctaaaaccttccaacagcgcttgagaacttgattttgaacccggatcctcttcccaggacccccttacttctcctcctcctcctcctccatcatcctccaggtgcccaacagcccccttctcctcctttccattccgtactcccaca

SEQ ID NO: 642186 - DNA, 246 bp, Homo sapiens
ctgctccgcccctctctgagggccaaaaaacttcagctcagggccacatgatcacaggaggctctggggacagcacctggccaggacttggagacactgtaggatgtaatatctgcacatagctgctactatagcaagcgggcctggggtgaccgagacccagtcccaaagacctactaaccagacagcatggtctacttggtggcgagcggaacatggtagagagggagtacgtctgtgtgttaa

SEQ ID NO: 642187 - DNA, 287 bp, Homo sapiens
  misc_feature (191)..(191): n is a, c, g, or t
tgctctactacggctgccggcgctcggatgaggactatctgtaccgcgagagctggcgcgcttccacaaggacggcgccctcacgcagcttaatgtggccttttcccgtgagcaggcccacaaggtctatgttcagcacctgctcaagagggacaaagagcacctgtggaagctgatccacgaaggtggtngcccacatctatgtctgcggggatgctcgaaatatggccaaagatgtgcagaacacattctatgacatcgtggccgaagtttgggcccatggagca

SEQ ID NO: 642188 - DNA, 882 bp, Homo sapiens
gacttgagccgcggctatttctggcgcgggcgcggctccgagaaggcatccgcattggctaccagcggcggccgcgggggagccaggccggtcctcagcgcccagccaccgccgactcccgtgaaacccggaagcgcgcaccgacagtgccgggggagccgaagctcgcgcatcccagtccatcgagctgctttcctacgctgccatccgttgaggagaacgggagaggatcgaacgtgacgtccgaggtctccgcaatgctacctcaagcctaggcccttgggctccaacgctggaaacaaggacggcgctgagaagccggggccggggcaggccaagggcagaggcagccttccggtgagtctccggggaccatgcagcgtagggtaccaggaggtcagaaaggatgcctcgacgttgataggtgtcaggagcttaagagatctcggggccgaccacccgggaatgcaaaagatacaagggtgctagtccacatgaacctcggaagagagaccaccacagcatagctccagcgaaggaacatctatgaggttgacccaaactagactgggaactaaggcggaacgagtgatggtgctgtcctcgcatccgagttcctcggaagttcgcgaagcacttgacctaatgccgtgtcgccatgttcctcagtggaaggagcagtttccttctgggacttgcactcgtcgttggtctcgtcccagggcggttttagagaaacagacacaagtgtactccaagctgtccacgggtggaggctaacccgttgggcttatgagtgacctggagtgacaagtgagtcaccctggggtaagttctcaggagtggtcagggattggttgactgcagaaaatacccgaggtc

SEQ ID NO: 642189 - DNA, 378 bp, Homo sapiens
ggtagcctgtattaatctttaatagaataagcgtatgtggatttcactggtctccttaccactctatcacttcatcctgccttaccatctggctgcctgacattctagcaacacacaaagctcacatcatcatggcttatatttcctgctgcacaaccttcctatggtcctcaatccatgtcagggctggtcatttgtaaactccacaacacgcctgcagggactagcaacaggtgcagttcaaatggcatgcaagtgcaactaggcatgcacagcagcagctaggagagcaagggcagcacagtgcatagtggccaacactgtccccatctaacaaagggcacgccatgcactcttgctatcccacgatggacaatg

SEQ ID NO: 642190 - DNA, 744 bp, Homo sapiens
  misc_feature (3)..(3): n is a, c, g, or t
  misc_feature (78)..(78): n is a, c, g, or t
  misc_feature (84)..(84): n is a, c, g, or t
  misc_feature (281)..(281): n is a, c, g, or t
  misc_feature (299)..(299): n is a, c, g, or t
  misc_feature (311)..(311): n is a, c, g, or t
  misc_feature (335)..(335): n is a, c, g, or t
  misc_feature (350)..(350): n is a, c, g, or t
  misc_feature (357)..(357): n is a, c, g, or t
  misc_feature (654)..(654): n is a, c, g, or t
  misc_feature (656)..(656): n is a, c, g, or t
  misc_feature (659)..(661): n is a, c, g, or t
  misc_feature (673)..(673): n is a, c, g, or t
  misc_feature (683)..(683): n is a, c, g, or t
  misc_feature (700)..(700): n is a, c, g, or t
ccngctctcttgtaatgatatagccagaaaaacgtgttgccttgaaccacttccctcatctctcctccaagacactgnggactnggtcaccagctcctcccttgttctctaagttccactgggctccatgtgccccctctaccatttgcagagtcctgcacagttttctggctggagcctagaacaggcctcccaagttttaggacaaacagctcagttctagtctctctggggccacacagaaactctttttgggctcctttttctccctctggatcaangtaggcaggcccatgggnccaggtcttggngctgagcctctcccctgtactctnccgaaaaatcctctncctctgnggctggatcctagccttatcctctgatctccatggctccctcctcccccctgccgactcctgggttgggctgttgcctcagtccccccacagatgcttttctgtctctgcctccccccccctgagcccctcccttgctctgcccccccatatggtcatagcccagatccgcccctaccccttatcccccgctgcctcttctgtgggtgccccaggtccttgtttgctgttgatttctttccaggggggttgcacagggatcctggtttcaatgccggttggaaatagaaatttccananaannnagtattgggtanatattttttntgaatacaaagtgatgngtttaaatactgcaattaaagtgatactgaaacccaaaaaaaaa

SEQ ID NO: 642191 - DNA, 245 bp, Homo sapiens
tattttttcttgagacagggtcaactctatccatcaggctggagtagcggtagcacaatcagggctcactgcagcctcaatcacctaggcacaggtaatcctcccacctcaggccccaaagtgctgggataacaggcgtagagcaccgtgcccaggctagtaaccactgtttatctataaatttgtactcagggtgtaaatagagcacgctaattgattttttgaatatggaaccggatagcttg

SEQ ID NO: 642192 - DNA, 314 bp, Homo sapiens
agctgggcgtggtggtgcatgcctgtaatcccagcttcttgggaggctgaggcaggagcatcacttgaacctgggaggtggaggttgcagtgagcaaagatagcgccatttcactccagcctgggcaataagagcaaaactctgtctcaatttaaaaaaaaaaaaaagaaagaaaagaaaacaaccaaaacttcaggaaacattggacacacttatagaaatgcaaaatgctctggaaaatctcatcgatagaattaaataagtagaagaaagaaattcagcgcttgtcttcaaattaactcaatccaacaaag

SEQ ID NO: 642193 - DNA, 328 bp, Homo sapiens
agtccccctcagccatggcttgatgcaggccccaggccctccttttttgggggtcaaatgactgtgtcctggacatttgatgccccccctgccctgcctgttgcaaacgtgatgctcccgggtgcagtggagaaattaggagactgggccaagcaaaaggctgcaaccaacccagaagcccttcctcagaaggctggagaaatgattggggaatgcatgggccccggggccctgggctccctcccaaacccctttcagaaacaacgtgggatgaaaaagcaagccggttcatccggtttgatgccctttttataaagctcaaaaccca

SEQ ID NO: 642194 - DNA, 1005 bp, Homo sapiens
gttgactatactctacgaaccacgaagacatggaacagtatacctattattgcaggcgcatgagactggagtcctaggcacagctctaagtgctccttattcgagccgagcatgggccagccgaggcaagctgtctaggtaacagaccacagtctacagacgattatcgtcacgagcccatggcatgtgtaagtaatcgttgcgttcatagtaatacccatcataatcggaggcttcggcaactgactagttcccctaataatcggtgcccccgatatggcgtttccccgcataaacaacatagagcttctgactcttacctccctctctcctactccgtgctcgcatctgctatagtggaggccggagcaggaacaggttgaacagtctaccctcccttaggagggaactactcccaacctggagcctccgtagacctagaccatcgttctccctgtacgcctagtcaggtgtctcctctatcgttaggggccagtcaattgcgatcacaacaattcatcaaagtatagaaaccccctgcccatagacccgaatgaccgaaacgccccgtcttcgtctgatccgcctaatcacagcagttcctacttctcctatctctgcccagtcctagctgggtgggcatcaccatactaagtaaacagagcgcaactcgaacaaccaccttcttcgacgcgcgtgagggaggagaccgcatcctataccaagcgacctattctgaatttgcgggcacccggaagttctattccttatcctaccagggtttggaatagtctcacatatggtaattaatacgcgggcaccaaagaagccgtgaatccctaggcaaggccgaggatgaaataaaagagccagggttatgggtgagcacccaatatacggagaagatagacagagaattatccgtgagaaaaaggaccaccgcgaaataaagaccacacacagagaaaaataggcggggcacaaatacacgagagggcaaaaaca

SEQ ID NO: 642195 - DNA, 250 bp, Homo sapiens
gacgatcggcgatattgactcgtgaagatcggcgctattggccttccttaagtctggtgcctcggcgtgtgcaggtatgggcactcggcgtgtgcagtctggacgtctcggcgtgtcgagaagatcggcgattttgcatgggcattcggcgtgtgcacgtgaagatcggcgatttcggtttggagattcggcgtgtgcatgcacacgccgagtacccagactgagcagaccgtggtcgccgatcttcacg

SEQ ID NO: 642196 - DNA, 1658 bp, Homo sapiens
agtcagatggtaagcaaagatgcaaataaaaatatcagcttctgataagtgcagtggagaaaaataaacaagaaaaaaaatgctactgtgttcatttcttagtatgtgccaaaaaatgatctcattgaatccccaagataatcctaggaattatgtcctattcctatcatccccatttacagatgaagaaagtgaggcacagagaggctagggtggttgctgaaggtcacacagccaggaagttacagagtcagggctggaactcaggacagcctgaaaccacagccctcgttcatattcagtaaaacccggcagtgaacccccagcagtgttcacatccctggcacatactgggcacatatcaatttggaacccagtggaatgactgaattgtgtctctgcccacaatacgagtgccataattttcctcatgcgaaatggcaggtgtgttaacctcttgcaacatcatcagggctggaggaggacttcagactgagctgggacatggggagagcctctgtccccaggttgttttctgctgggcaactcccctccagagttcagttctgctggcacatgcctaagtgattagctggctctgagcctgagcatggcatagctcaccagggtgggctctcacagctcccaggaaccagcaaatagccggtggaggaaagcactgattccctattcgcctttttctgccattatcagcaccagtggctttccaaagatgagttgatataagcatcctgtcagaaaggatacagcctaataaatggaatgtcccttcccctctctaggcctcagtttgcctatctgtcaaatgaggagagtggattaaagtgcacttttcaaactgtctttcctggctctacagagctttcttaggggctgctgaagatgatggggagctgatgattagaagagagtggctgtggccaaatattggaaactcaatagtgtctctgaggatacttaggctttgaggggggatcccagtgcctaaagggacctggctgataatacgaaagaattcagcctctgggtagggactggagcaaactgagcccacgtttcatccaagggggcggccacttctcagctccagtcccctggggccacttgtggccagatcctctgagtttttggtaaaacttgaacatatggatttttatgttaaatgttccaattttaaaaagtcggtcatgaactcaaaatcttctaaaacagtgtgaggcagacaaagcatatctgtgggttacatttggccctaggccagcaatttggaactctgttctagaaggctggggatgaactttattctctccgtccttccaatttaatgagcattaggattgtggtgagatgattggaagaagtgttggtggctgggcgcagtggctcacgcactttcggaggccgaggtgggtggatcatttgaggccaggagttcgagaccagcctggacaatatagtgaaacaccatctgtactaaaaatacaaaaagtagctgggcgtgctggtgggtgcctgtaatcccagctactccagaagctgaggcatgagaatcgcttaagcccaggaggcggaggttgcagtgagctgagaccgtgccactgcactccagcctgggcgacagaatgagactccgtctc

SEQ ID NO: 642197 - DNA, 119 bp, Homo sapiens
gagctcgtaccggaaggcatcaaacgctgatggggaggctggaagacgcagccgccggactgggcagtatcctcaagcagacctacagcatagtttgacacaaactcgcacaaccatga

SEQ ID NO: 642198 - DNA, 265 bp, Homo sapiens
cgcttcacgattacctgtggccccactgattgctgtctctctcttatgtactttagccaacaagccttgaggagacaatcatccatgaaagccatctcaggcttcaggaagacgcgccttgaatcttcgaacagtatgactggccggatgtgtacacccatcacatcatctttctatgcatattcacatgcactcagcagtgagtctaatgagaacctgtccagatgtatttggaagcaaccctaaagcccatattgcagccaag

SEQ ID NO: 642199 - DNA, 592 bp, Homo sapiens
tctacctcaaatttattagcagtatgtactttaattattaattattaatctgtaaaacagttaatagtaatatccacctcatgtaaacccttagaacataccaagtaccatatatacgttttttaaaaatcaaattttttaaattaaggagtttgcagcagatttttattttgactgctctggacccattttttgcccctcaaatgcaagcagtatcagttgccaaaagccatcccatatatttctggcacttgactctggaaagaactgccttcactgtggtgcatgctttgaattggcattttatggtatttgtaacactacctcttgaaccatactcttgagtcttggacaactacggtagaaattcaatctgtggctactaaaatgaggcacagttgaatctcctgacgagcattctaggcagctcagctgcctgcagtctttagatcaggagaccataacacacatcttacctagggaaaataaaaagtagtagtatagttacttttattacttccaagcaatagttattgtttcaagccttcacagaaatattttaacttgtgaaagtattgcttctaaaaggagg

SEQ ID NO: 642200 - DNA, 364 bp, Homo sapiens
cacgtcccacgcctcgagaaatgcacgagacgaacgcccgcgcgaggttcggtggagcccgtaacgtgccccggagaatgctccgctagcacatcgcatcactcggtgcccaggaccaccgcatccactccacgatgaaacgtggccgaaggttgaacaaggtcaccacaggcacggtttatatggccacgtttaaaaacttaatgctattctgcggggccacattcgtaaggagatgggtgagtccagattagattcccttctccgattggcccaggccgatggcatcgtttccaagaacttttgactggagagaatcaccagatgtggaatatttgtccataaataaattaatggaaaccct

SEQ ID NO: 642201 - DNA, 399 bp, Homo sapiens
gttatcttaatcatctactatacttttgcataactgtacacactacctctttcactcttgtaattctctatctataggatccatgagctatctagatgatatgatcttctttattcctcttctgctttcagcattctatttggcctaatattaaggatacgatttccataagaagcttgtatagaataatttaacattaagtgcttcgtgacacgaaaggaattgcgaggattagtcattaacccagattgtctacgagtttctccgttgcatttccacctatgtcagctatgatttacgataaagtagaatctagagattactgccattgcaatatttaattgccttggcccgaaaggtgagggctctaggttcttaatcaaattcagactgatcctg

SEQ ID NO: 642202 - DNA, 850 bp, Homo sapiens
gaggggtttggtttaggagagttctgcataagaacagaactttattaaggattagagggaacgatacaacaggtattactgcgtgtaatgtgatgtctaatttcatgtggcttagcagcaattaataacctgatttaaggtctttattcagaatgttaatttgcattctctgccgtgtgtaatgttcttaagtaatgaagctaaaattaacccatttcatttagggaattatctatttaatttgactttggctagtgtggtagctttatagatagcttttgcttaggagggatcaggaagtccatacgaaatataaaaaatatctagaagtagtctaagagtgcttaattattctattttaccgttgatataggagataaaggtgaatcgtgtaggtgcttcctcctttgggaattatggtggatcttaaaacttaaaagttgcctgaaggtatgatatgaacggttcaggtatataagccttaattgtctaagataatttaacttttgtcatgggaaggggaagccagagtcagtgttgtcacacattcattgttattaatagaagatagacacttattccagtccaaaaatgcaacctaggagatggattgaacagtgtcgggcggcctcagccggaaaagcatcagaaacgccagctgggggcgcggccaagaagtgaggacacgccgcgcggtcctagaccccgcggatgtcggcggttcccaagaaagccgcgacaggtgctgaaaccagggtccgggagcgggaacagccagggataggccccgggagaacccgaaccggcgggaaatcacgcacggccggaagcgaccaccacccacacggtc

SEQ ID NO: 642203 - DNA, 187 bp, Homo sapiens
tatatttatagatcagtgtctcacttgccaatcccaattgtagatataatagctgcccattataaaagggcagttcaggtcatgccactcttggtagctatgggaatagccataagtactagtactagaattacagagataatgacttccatggcccaatatgaaaaattcacttccaagtcgacgc

SEQ ID NO: 642204 - DNA, 1115 bp, Homo sapiens
  misc_feature (185)..(185): n is a, c, g, or t
ggagagaactagtctcgagttttttatgtttttaaaagggcttcttttaatgaaacaaatccaaaaaatgtacagtcaggctcaatttgtgcagttcacaagctgtggaggaaacagacagaacgacagcgttcaggacagctcagagctaacccaagaacgaggcctggactttgccgccaggnggaattctctctcgtggagtggcactggggccggggccaccgggctgggcacaggcgcagcaggcacgggctactcttcacttctgccccaggttgcctgggcaaggtctgtgctccacatttttcatagaattatcacctttcttcccttcaaattctaaagaaggtcctccggagcttgccttcaagaggaaagtcccttctcgtgcagtccaagatgactccaaggtcttcccttgccaccattaagacttggcaccctgctggatttggcccaagaaaggcttagattttcttacaggggtggtcccacaaagattttaggagggccatttggtgtcttccctcacagggttggtcctgtgggtctcatcaaaaccctaattggaacaatttgggatccaccacctggaggcctgaaaactcgggagctatccctgcttgtgggggtcgactcccttgaaggtgggggtttgtggccatgggcccaaggagccgaggaaggctggcgccggagcagaagcggctcaaaggttcggacccgaggggctgctggggaaaactcccaacaccaaaagccgcttcgagagagcaggcctaccttggtacctacccgatatgtaggtagccgtttagccgcctggaattcattggccttgcaaatccccgagccgcttgggtcccccaataattaggtggagcggatatttggggagtctctcaccacaattggggggaactttggcacaccctgggcaagggggtaagtaaaaaagacgaatgtagattgtctccaacaacccctggaggttacattgttggcgaagagtaagaaaagcgaaattttatagaggagagtccatatgatgtggagaaggggagtattgtgtgttcacaataaggcctaattagaaacgggtggagtattag

SEQ ID NO: 642205 - DNA, 278 bp, Homo sapiens
tttctacgagtcatcactgtggtacattatcacagtccgtacacctacctagaacatattatcacccaaagtccatagtcgatattggggttcactcttggtaagtgtatatactgtaggtggtgacaaatatttaatggcatttatctaccatagtaacctgatacagaatcgtttcactgtcttgaaagtcctctgtacttagtcccttcatccttccctctaccctaatgcctggggaaccactggatcttttaactattctctgtaattttact

SEQ ID NO: 642206 - DNA, 107 bp, Homo sapiens
ggcacgaggagccaccgagagagcagagaactcggtgccgccaaacaggccagctcgcgcttcatcgttccggagccgtcgtgccactccttcgatggccacagatg

SEQ ID NO: 642207 - DNA, 218 bp, Homo sapiens
tgaaatccgaattcttgggtgaaaaatacatccgcagggtttcggatgagaccaggttgttgcttgtcgaggatctcaagcccagaaagatgaattaatccttggaaggaaatgacattgagctggtttcaaattcagcggctttgattcagcaagccacaacagttaaaaacaaggatatcaggaaatttttggatggtatctatgtctctgaaagg

SEQ ID NO: 642208 - DNA, 189 bp, Homo sapiens
ttttatttttttttttatttaaatgaccaaaggtcattccaaccgggctttttattgtatttgtttttggtctttgttaagttctattggaaaaacccctgtttgtgtttttttggcagttgtttgcattaacctgttcataccccccttttgtcccttttttgaaaaaataaaaaaaattaaaggcca

SEQ ID NO: 642209 - DNA, 251 bp, Homo sapiens
  misc_feature (18)..(19): n is a, c, g, or t
  misc_feature (98)..(99): n is a, c, g, or t
  misc_feature (199)..(199): n is a, c, g, or t
  misc_feature (206)..(206): n is a, c, g, or t
  misc_feature (231)..(231): n is a, c, g, or t
  misc_feature (247)..(247): n is a, c, g, or t
agatggggtttcaccatnntggctaggctggcttcaaactcctgacctcaggtgatccgcccacctcgccctcccaaagtgctggaattacaggcgtnncacacagcgtctggccatcagcagagtttttaatttaggagaatgacaagaggtggtacagttttttagatggtacctggtggctgttaagggctaattnactgacnaacacacccaactttggcggctgcngcccaaggaaggtggncact

SEQ ID NO: 642210 - DNA, 390 bp, Homo sapiens
ttctgttcttaaacttctaataaacatttacataaaataacttttagcctttaaaaattgcccatagtttatggttgaaagtttccaggaaccaactcagcaatacataaattgatttagaaattctagttaaggccgggtgtcatcgtcacgcctgtaatcccagcactttgaaagaagccagggcctcatttgaggtcaggagctcgagaccagcctgaccaacatggtgaaacgctgtctctactaaaaatacaaaaaattagccaggcatggtggtgcgcacctgtaaccccagctactcaggaggctgaggcatgagaatcatttgaacctgggaggtggaggttgcgctgacagggccactgcactctcaaaaactgcactctc

SEQ ID NO: 642211 - DNA, 762 bp, Homo sapiens
  misc_feature (392)..(392): n is a, c, g, or t
  misc_feature (422)..(422): n is a, c, g, or t
tttaaaaacgttctcttaaatttcacagattgcagagtctgcaaactacaaaccttaagggcaccataataaagctaccctcacgccaccacgctggggcaaaacaatgggtaggtctttccgtcaaatatcctaaactcacttcaagctaattgtataacggctttccataataagaagtagccctaagaagtgaaatatttgccagggtccagagctaatgatggatggaattttaactcaactctgcctactcccaaagtatcagttatctttctctacaaagctcactttttgaggcttcaataaaatacattatccctaaaagtgacattacttttactagaacttgaaaatatgagtctgtagcctactgagactgcttttgattnccgaaagcacagtagataaggtaatgaaanacatgtaaacgagctgaaaagtctccactgtctagggctttgattttcaaagtgtgcttctcagctgggcatagtaactcacgcctgtaatcccagcactttgagagagcaaggtgggtggatcacttgaggtcaggagttcaagaacagcttggccaacatggtgaaaccctgtctctactaaaaatacaaaaattagccaggcatggtggcaggcgcctgtaatcccagctacttaggaggctgaggcaggacaatcacttgaacccgggagtagtaggttgcggtgagccgagatcacaccacagcactccagcctgggtgacagagtgagactcca

SEQ ID NO: 642212 - DNA, 1040 bp, Homo sapiens
  misc_feature (537)..(537): n is a, c, g, or t
acaaaaagagcgcccgctagtgtgtcttgtttgtccccctttcaaccctgtgttgagggtggagtcatcagacgttggacaagctaatctccgtgcctcaacttcgatgtttcccctatctttggagtcacaggcgggagggaaataagcacgctctagcttcatctcgagtggcgtcagaattctccgaagcaactccgccgatcgaagctgaagctattctggggctagactgctattagtgactcgagaggacgatgagtgcgtgtgtgtaggaataagagagttggactgctcaaaaggggtcgtggtatctatactcgtgtattgttggtacatacaggagtgtgtgtaaatgaatgtgtgtagaattatcggagtgggcacttatacaagatgggtgatatataaaatatgaacgggagtcctttggcgtcacagtgagttacaaactttacataatgtgtgtctcacctgagagaggcgcgacactctcgctacagagagagagaagagacgcgctctgagccgcgaacnctcggcatcgctgcaccagcgtgaacgcactcaacatgagtgttgtgctctttggtttgtgagccgcaactaagatgcgtggagtagcggatctactatattaatgaaaccgctagaagaatgaggctgcaaacaccatcttttcgaaaactatacgttagatcctcagctctcagtatagagagcgcggctcaacagcggccacagtcccgccgcaaagtaatatctggcagtcgaggaagcattacatgtgccacacgaggaccctctgcgaagaactatgtagatgtcactgtcttaacacacggagtggtgattaggagaaagcacatgataatgttagactcgataatgtggtggtcgcgacgccaattctcacttacactcagataagcgacgcctgcgatctcacttactagtatagagcccgatctcattacgcagttgggttgcaagaaagaacattatctacgcacacgaattgtagactgtgggggattaaa

SEQ ID NO: 642213 - DNA, 4859 bp, Homo sapiens
  misc_feature (2939)..(2939): n is a, c, g, or t
  misc_feature (3077)..(3077): n is a, c, g, or t
gcggccgctcggcgctggctgctgtgcggaggccacggcgggccgcgagccgcctcgtcctcgccctcctgccctgggtgcggccccccgggtcccggcgcccactgccccggcgtcccgcgctccgcgcccgcccaggcacccaccagcggcgccgacctcagcgcgcacctatgggctcgctaccaggacatgcggagactggtgcacgacctcctgccccccgaggtctgcagtctcctgaacccagcagccatctacgccaacaacgagatcagcctgcgtgacgttgaggtctacggctttgactacgactacaccctggcccagtatgcagacgcactgcaccccgagatcttcagtaccgcccgtgacatcctgatcgagcactacaagtacccagaagggattcggaagtatgactacaaccccagctttgccatccgtggcctccactatgacattcagaagagccttctgatgaagattgacgccttccactacgtgcagctggggacagcctacaggggcctccagcctgtgccagacgaggaggtgattgagctgtatgggggtacccagcacatcccactataccagatgagtggcttctatggcaagggtccctccattaagcagttcatggacatcttctcgctaccggagatggctctgctgtcctgtgtggtggactactttctgggccacagcctggagtttgaccaagcacatctctacaaggacgtgacggacgccatccgagacgtgcatgtgaagggcctcatgtaccagtggatcgagcaggacatggagaagtacatcctgagaggggatgagacgtttgctgtcctgagccgcctggtggcccatgggaaacagctgttcctcatcaccaacagtcctttcagcttcgtagacaaggggatgcggcacatggtgggtcccgattggcgccagctcttcgatgtggtcattgtccaggcagacaagcccagcttcttcactgaccggcgcaagcctttcagaaaactcgatgagaagggctcacttcagtgggaccggatcacccgcttggaaaagggcaagatctatcggcagggaaacctgtttgacttcttacgcttgacggaatggcgtggcccccgcgtgctctacttcggggaccacctctatagtgatctggcggatctcatgctgcggcacggctggcgcacaggcgccatcatccccgagctggagcgtgagatccgcatcatcaacacggagcagtacatgcactcgctgacgtggcagcaggcgctcacggggctgctggagcgcatgcagacctatcaggacgcggagtcgaggcaggtgctggctgcctggatgaaagagcggcaggagctgaggtgcatcaccaaggccctgttcaatgcgcagttcggcagcatcttccgcaccttccacaaccccacctacttctcaaggcgcctcgtgcgcttctctgacctctacatggcctccctcagctgcctgctcaactaccgcgtggacttcaccttctacccacgccgtacgccgctgcagcacgaggcacccctctggatggaccagctctgcaccggctgcatgaagacccccttccttggtgacatggcccacatccgctgagggcacctttattgtctgggacaggccctcagcccctcctgccccatccacccagacaagcaataaaagtggtctcctccctgtgcatgcttctgctttcagccccagcctcgtcacttgactgtgaggatcctctgggtgtcagggaagtcctcctccagcagtgagtcctagaagagcagggttggtggtggagggtgtgaccagggcctgggcccatcccacatctgccacacttcttcacttccatgcttacatcgaagggttcacaaaaggtgtcgctgccaaagacagggttggggacagagaccagggtggggttggtcccttcttgccacggtgagaagtcgtcatcagcatcatcttccgcctggaaggcagagaagccaaagcccatgggcttgcctcgggcacggaggtagagagctccggccaccaagccaagcagtgctccagcggcaagcacagcccccacgcctgccgccacaggtggggcttcaggcgccagcactgcctggggctgtgggggtgccaggagggggctggccagagcatggatgatgccattgaaggccatgatgtcccacacaatgatacggctaaccacaactgtccctggggccacaggggcccaggaactgttgtcagggcctgcgtcactgatgatgaggctgaggcctgagtgggccggaagcaacttcccctggctggcgttggcacttaggagggtggcgttggaggcatgcagctccaagtctgggccactcagcgtcatgttgtccacaaagccttcattgacagggacgaagagtgtcttatacgtgagctcatcatccaggaagtccaggaagtcgagaccccgctgggtggcattggcatagcccaatagcatcccatagaaggtggagaagttggcagtggcagccagcacatccagcagcttcccattgcacgtgctgatcccgtcacccacgaagccatttcggcatcggcaggccacatcttgcacacggaagcagtaggcatcccagcgttctgagaggttcttgcgggcacccaggctgactatgcccacccgaccattgccacagtccgccacagggaaaaccacagggtgggcagtggagccattggccagccagcccatgaggcacaggtggaagcccagctgctgggcagcagagagctgagggaatgaagcaaggacggctccctgtgcttcgcatgccgcctcagcctccgaaaagttcagaccataagggccgctggtggcctggaggtggaanacgccagcccgtttctcctggaagtgcaggtcagtgcacatggcatctgagtgcaagggcggtggctggcccaagcagcggtccacaggtggttccgactcctccagacactgcagtccatcgcctacgtagcctgcntggcactcacagcgccgtgtgttcaggccggtgctcaagcagttggcgtgctcgctgcagcccccgcggtggccatctgtgcaggggttgcgggcccggcagctccagccatcaccctcgtagtcgggcaggcaggtacaagtgaccattgttcctacctggctacagttggcgtgctcactgcagccaccatgcccgtcctggcacaggtctgccactgtacacacgcggccatccccttcatagcccaggctgcactcacagctgttgcctgcacggcacacagcctcgggtgcacagggtggggtacacacaggctgcagctccagttgcacctcacagcgtggcccagtccagccttcatcacagaagcaggagccagagcccccaaggccctcatcacagcggccatgcacagtgcagcggcaggcttgacaatggggcccaaaggcaccaggagcacagagttcacaggctgtcccagcaaaacctgaacggcacagacactgcccactgccactcatgccgtccatgcacacgccacggtcactacaagggctgctgggccgccagggcaagcttgcactcactgccatagtgaccagggcagcagctgggcttccaggtggtggtgacacaattgcggtggcagcccctgcccaggccttggggcctaccccaaaggctggggtggacccagacgctgcgtaatcccaaagagtgcagcggaggggacgtccagaacttcgggtagaagcgccagcaggcctcagggctgccctgctcctgtgacccctcaggacagggtggctccagcccacagatgctgcaggtgttcagtcgcaggggccgggtctcaaagtggtcacagcgagcaccaaggccaggtggctccagcagctggtcgatgccataggccaggccaccctcaaagggcaagtgccgctgcacaatgcgagcatcatcctcacccaccatgagctcaccgggccgcgttcggctgcaggagaaagagatgggggtcccatgcatggttcgaagtgggcccaggttgggcaggtcagatgccaaggcctcgacattgcgaatcatgtggccccgcagaatggctgctagcttgtcacggtggtcctcatggtacagccaggcctggcgatccggaggcagagctcgaaaggcggcgtctgtgggccacagcattgtgaagggcctatgggatgcctctcgaagcaggggcaggaggccggccaccttcaggaggccgctgaagatcttgtaaccgaagccctgggcggcggcggtgacatttctcctcgggatgggagcatcatcaggctcccagtgcagcgcctcggggggcagcaggacacggtcaatgaagtgcaggatgccgttcacggcctcatggtcgctgctcaccacgcgcgcgaagtcattgaggtatatgctgccctccctctcgctgaagcgcagtgggtgccctgagagggccgtggcgtacccctgctccagcaggtcctcgctccgcagccgccgacagccaaccacgtggtagcgaaacaccagctggcgatgcgcacgaatccgggccagctcatcctgcgacaggttgctcattagatctgcgtgcggcacgaagatggtgaaaggcccatcgcccttgagctccttatattccaggaggcggaggctgaagaatgaggcatgcttatccctcaggagctccaggccgactcgggcacggcaggtgagccgtcccccacgtgtgggctggttacagtc

SEQ ID NO: 642214 - DNA, 113 bp, Homo sapiens
cattggactgagcacatggggaatgcaatggcaaaaaatctcatgcaaacatgactatccacttattatttatagatgtgttcctgatgcctgcaaagagtatcaagatagca

SEQ ID NO: 642215 - DNA, 4226 bp, Homo sapiens
  misc_feature (2306)..(2306): n is a, c, g, or t
  misc_feature (2444)..(2444): n is a, c, g, or t
ggcactccgccgccatggagcagcgtccgcgtcaccggacttcttcgcgcgccgacgtgcccttctatggcaagggtccctccattaagcagttcatggacatcttctcgctaccggagatggctctgctgtcctgtgtggtggactactttctgggccacagcctggagtttgaccaagcacatctctacaaggacgtgacggacgccatccgagacgtgcatgtgaagggcctcatgtaccagtggatcgagcaggacatggagaagtacatcctgagaggggatgagacgtttgctgtcctgagccgcctggtggcccatgggaaacagctgttcctcatcaccaacagtcctttcagcttcgtagacaaggggatgcggcacatggtgggtcccgattggcgccagctcttcgatgtggtcattgtccaggcagacaagcccagcttcttcactgaccggcgcaagcctttcagaaaactcgatgagaagggctcacttcagtgggaccggatcacccgcttggaaaagggcaagatctatcggcagggaaacctgtttgacttcttacgcttgacggaatggcgtggcccccgcgtgctctacttcggggaccacctctatagtgatctggcggatctcatgctgcggcacggctggcgcacaggcgccatcatccccgagctggagcgtgagatccgcatcatcaacacggagcagtacatgcactcgctgacgtggcagcaggcgctcacggggctgctggagcgcatgcagacctatcaggacgcggagtcgaggcaggtgctggctgcctggatgaaagagcggcaggagctgaggtgcatcaccaaggccctgttcaatgcgcagttcggcagcatcttccgcaccttccacaaccccacctacttctcaaggcgcctcgtgcgcttctctgacctctacatggcctccctcagctgcctgctcaactaccgcgtggacttcaccttctacccacgccgtacgccgctgcagcacgaggcacccctctggatggaccagctctgcaccggctgcatgaagacccccttccttggtgacatggcccacatccgctgagggcacctttattgtctgggacaggccctcagcccctcctgccccatccacccagacaagcaataaaagtggtctcctccctgtgcatgcttctgctttcagccccagcctcgtcacttgactgtgaggatcctctgggtgtcagggaagtcctcctccagcagtgagtcatcgaagggttcacaaaaggtgtcgctgccaaagacagggttggggacagagaccagggtggggttggtcccttcttgccacggtgagaagtcgtcatcagcatcatcttccgcctggaaggcagagaagccaaagcccatgggcttgcctcgggcacggaggtagagagctccggccaccaagccaagcagtgctccagcggcaagcacagcccccacgcctgccgccacaggtggggcttcaggcgccagcactgcctggggctgtgggggtgccaggagggggctggccagagcatggatgatgccattgaaggccatgatgtcccacacaatgatacggctaaccacaactgtccctggggccacaggggcccaggaactgttgtcagggcctgcgtcactgatgatgaggctgaggcctgagtgggccggaagcaacttcccctggctggcgttggcacttaggagggtggcgttggaggcatgcagctccaagtctgggccactcagcgtcatgttgtccacaaagccttcattgacagggacgaagagtgtcttatacgtgagctcatcatccaggaagtccaggaagtcgagaccccgctgggtggcattggcatagcccaatagcatcccatagaaggtggagaagttggcagtggcagccagcacatccagcagcttcccattgcacgtgctgatcccgtcacccacgaagccatttcggcatcggcaggccacatcttgcacacggaagcagtaggcatcccagcgttctgagaggttcttgcgggcacccaggctgactatgcccacccgaccattgccacagtccgccacagggaaaaccacagggtgggcagtggagccattggccagccagcccatgaggcacaggtggaagcccagctgctgggcagcagagagctgagggaatgaagcaaggacggctccctgtgcttcgcatgccgcctcagcctccgaaaagttcagaccataagggccgctggtggcctggaggtggaanacgccagcccgtttctcctggaagtgcaggtcagtgcacatggcatctgagtgcaagggcggtggctggcccaagcagcggtccacaggtggttccgactcctccagacactgcagtccatcgcctacgtagcctgcntggcactcacagcgccgtgtgttcaggccggtgctcaagcagttggcgtgctcgctgcagcccccgcggtggccatctgtgcaggggttgcgggcccggcagctccagccatcaccctcgtagtcgggcaggcaggtacaagtgaccattgttcctacctggctacagttggcgtgctcactgcagccaccatgcccgtcctggcacaggtctgccactgtacacacgcggccatccccttcatagcccaggctgcactcacagctgttgcctgcacggcacacagcctcgggtgcacagggtggggtacacacaggctgcagctccagttgcacctcacagcgtggcccagtccagccttcatcacagaagcaggagccagagcccccaaggccctcatcacagcggccatgcacagtgcagcggcaggcttgacaatggggcccaaaggcaccaggagcacagagttcacaggctgtcccagcaaaacctgaacggcacagacactgcccactgccactcatgccgtccatgcacacgccacggtcactacaagggctgctgggccgccagggcaagcttgcactcactgccatagtgaccagggcagcagctgggcttccaggtggtggtgacacaattgcggtggcagcccctgcccaggccttggggcctaccccaaaggctggggtggacccagacgctgcgtaatcccaaagagtgcagcggaggggacgtccagaacttcgggtagaagcgccagcaggcctcagggctgccctgctcctgtgacccctcaggacagggtggctccagcccacagatgctgcaggtgttcagtcgcaggggccgggtctcaaagtggtcacagcgagcaccaaggccaggtggctccagcagctggtcgatgccataggccaggccaccctcaaagggcaagtgccgctgcacaatgcgagcatcatcctcacccaccatgagctcaccgggccgcgttcggctgcaggagaaagagatgggggtcccatgcatggttcgaagtgggcccaggttgggcaggtcagatgccaaggcctcgacattgcgaatcatgtggccccgcagaatggctgctagcttgtcacggtggtcctcatggtacagccaggcctggcgatccggaggcagagctcgaaaggcggcgtctgtgggccacagcattgtgaagggcctatgggatgcctctcgaagcaggggcaggaggccggccaccttcaggaggccgctgaagatcttgtaaccgaagccctgggcggcggcggtgacatttctcctcgggatgggagcatcatcaggctcccagtgcagcgcctcggggggcagcaggacacggtcaatgaagtgcaggatgccgttcacggcctcatggtcgctgctcaccacgcgcgcgaagtcattgaggtatatgctgccctccctctcgctgaagcgcagtgggtgccctgagagggccgtggcgtacccctgctccagcaggtcctcgctccgcagccgccgacagccaaccacgtggtagcgaaacaccagctggcgatgcgcacgaatccgggccagctcatcctgcgacaggttgctcattagatctgcgtgcggcacgaagatggtgaaaggcccatcgcccttgagctccttatattccaggaggcggaggctgaagaatgaggcatgcttatccctcaggagctccaggccgactcgggcacggcaggtgagccgtcccccacgtgtgggctggttacagtc

SEQ ID NO: 642216 - DNA, 4827 bp, Homo sapiens
  misc_feature (2907)..(2907): n is a, c, g, or t
  misc_feature (3045)..(3045): n is a, c, g, or t
gcggccgctcggcgctggctgctgtgcggaggccacggcgggccgcgagccgcctcgtcctcgccctcctgccctgggtgcggccccccgggtcccggcgcccactgccccggcgtcccgcgctccgcgcccgcccaggcacccaccagcggcgccgacctcagcgcgcacctatgggctcgctaccaggacatgcggagactggtgcacgacctcctgccccccgaggtctgcagtctcctgaacccagcagccatctacgccaacaacgagatcagcctgcgtgacgttgaggtctacggctttgactacgactacaccctggcccagtatgcagacgcactgcaccccgagatcttcagtaccgcccgtgacatcctgatcgagcactacaagtacccagaagggattcggaagtatgactacaaccccagctttgccatccgtggcctccactatgacattcagaagagccttctgatgaagattgacgccttccactacgtgcagctggggacagcctacaggggcctccagcctgtgccagacgaggaggtgattgagctgtatgggggtacccagcacatcccactataccagatgagtggcttctatggcaagggtccctccattaagcagttcatggacatcttctcgctaccggagatggctctgctgtcctgtgtggtggactactttctgggccacagcctggagtttgaccaagcacatctctacaaggacgtgacggacgccatccgagacgtgcatgtgaagggcctcatgtaccagtggatcgagcaggacatggagaagtacatcctgagaggggatgagacgtttgctgtcctgagccgcctggtggcccatgggaaacagctgttcctcatcaccaacagtcctttcagcttcgtagacaaggggatgcggcacatggtgggtcccgattggcgccagctcttcgatgtggtcattgtccaggcagacaagcccagcttcttcactgaccggcgcaagcctttcagaaaactcgatgagaagggctcacttcagtgggaccggatcacccgcttggaaaagggcaagatctatcggcagggaaacctgtttgacttcttacgcttgacggaatggcgtggcccccgcgtgctctacttcggggaccacctctatagtgatctggcggatctcatgctgcggcacggctggcgcacaggcgccatcatccccgagctggagcgtgagatccgcatcatcaacacggagcagtacatgcactcgctgacgtggcagcaggcgctcacggggctgctggatgaaagagcggcaggagctgaggtgcatcaccaaggccctgttcaatgcgcagttcggcagcatcttccgcaccttccacaaccccacctacttctcaaggcgcctcgtgcgcttctctgacctctacatggcctccctcagctgcctgctcaactaccgcgtggacttcaccttctacccacgccgtacgccgctgcagcacgaggcacccctctggatggaccagctctgcaccggctgcatgaagacccccttccttggtgacatggcccacatccgctgagggcacctttattgtctgggacaggccctcagcccctcctgccccatccacccagacaagcaataaaagtggtctcctcccttggtgacatggcccacatccgctgagggcacctttattgtctgggacaggccctcagcccctcctgccccatccacccagacaagcaataaaagtggtctcctccctgtgcatgcttctgctttcagccccagcctcgtcacttgactgtgaggatcctctgggtgtcagggaagtcctcctccagcagtgagtcatcgaagggttcacaaaaggtgtcgctgccaaagacagggttggggacagagaccagggtggggttggtcccttcttgccacggtgagaagtcgtcatcagcatcatcttccgcctggaaggcagagaagccaaagcccatgggcttgcctcgggcacggaggtagagagctccggccaccaagccaagcagtgctccagcggcaagcacagcccccacgcctgccgccacaggtggggcttcaggcgccagcactgcctggggctgtgggggtgccaggagggggctggccagagcatggatgatgccattgaaggccatgatgtcccacacaatgatacggctaaccacaactgtccctggggccacaggggcccaggaactgttgtcagggcctgcgtcactgatgatgaggctgaggcctgagtgggccggaagcaacttcccctggctggcgttggcacttaggagggtggcgttggaggcatgcagctccaagtctgggccactcagcgtcatgttgtccacaaagccttcattgacagggacgaagagtgtcttatacgtgagctcatcatccaggaagtccaggaagtcgagaccccgctgggtggcattggcatagcccaatagcatcccatagaaggtggagaagttggcagtggcagccagcacatccagcagcttcccattgcacgtgctgatcccgtcacccacgaagccatttcggcatcggcaggccacatcttgcacacggaagcagtaggcatcccagcgttctgagaggttcttgcgggcacccaggctgactatgcccacccgaccattgccacagtccgccacagggaaaaccacagggtgggcagtggagccattggccagccagcccatgaggcacaggtggaagcccagctgctgggcagcagagagctgagggaatgaagcaaggacggctccctgtgcttcgcatgccgcctcagcctccgaaaagttcagaccataagggccgctggtggcctggaggtggaanacgccagcccgtttctcctggaagtgcaggtcagtgcacatggcatctgagtgcaagggcggtggctggcccaagcagcggtccacaggtggttccgactcctccagacactgcagtccatcgcctacgtagcctgcntggcactcacagcgccgtgtgttcaggccggtgctcaagcagttggcgtgctcgctgcagcccccgcggtggccatctgtgcaggggttgcgggcccggcagctccagccatcaccctcgtagtcgggcaggcaggtacaagtgaccattgttcctacctggctacagttggcgtgctcactgcagccaccatgcccgtcctggcacaggtctgccactgtacacacgcggccatccccttcatagcccaggctgcactcacagctgttgcctgcacggcacacagcctcgggtgcacagggtggggtacacacaggctgcagctccagttgcacctcacagcgtggcccagtccagccttcatcacagaagcaggagccagagcccccaaggccctcatcacagcggccatgcacagtgcagcggcaggcttgacaatggggcccaaaggcaccaggagcacagagttcacaggctgtcccagcaaaacctgaacggcacagacactgcccactgccactcatgccgtccatgcacacgccacggtcactacaagggctgctgggccgccagggcaagcttgcactcactgccatagtgaccagggcagcagctgggcttccaggtggtggtgacacaattgcggtggcagcccctgcccaggccttggggcctaccccaaaggctggggtggacccagacgctgcgtaatcccaaagagtgcagcggaggggacgtccagaacttcgggtagaagcgccagcaggcctcagggctgccctgctcctgtgacccctcaggacagggtggctccagcccacagatgctgcaggtgttcagtcgcaggggccgggtctcaaagtggtcacagcgagcaccaaggccaggtggctccagcagctggtcgatgccataggccaggccaccctcaaagggcaagtgccgctgcacaatgcgagcatcatcctcacccaccatgagctcaccgggccgcgttcggctgcaggagaaagagatgggggtcccatgcatggttcgaagtgggcccaggttgggcaggtcagatgccaaggcctcgacattgcgaatcatgtggccccgcagaatggctgctagcttgtcacggtggtcctcatggtacagccaggcctggcgatccggaggcagagctcgaaaggcggcgtctgtgggccacagcattgtgaagggcctatgggatgcctctcgaagcaggggcaggaggccggccaccttcaggaggccgctgaagatcttgtaaccgaagccctgggcggcggcggtgacatttctcctcgggatgggagcatcatcaggctcccagtgcagcgcctcggggggcagcaggacacggtcaatgaagtgcaggatgccgttcacggcctcatggtcgctgctcaccacgcgcgcgaagtcattgaggtatatgctgccctccctctcgctgaagcgcagtgggtgccctgagagggccgtggcgtacccctgctccagcaggtcctcgctccgcagccgccgacagccaaccacgtggtagcgaaacaccagctggcgatgcgcacgaatccgggccagctcatcctgcgacaggttgctcattagatctgcgtgcggcacgaagatggtgaaaggcccatcgcccttgagctccttatattccaggaggcggaggctgaagaatgaggcatgcttatccctcaggagctccaggccgactcgggcacggcaggtgagccgtcccccacgtgtgggctggttacagtc

SEQ ID NO: 642217 - DNA, 784 bp, Homo sapiens
cgggtgtttccttgttcggaatcgggttggctcctctttgattttttacttctggtgacccacgcaaaagcagtcccgacctggttgtattaataataaaggctgtaaggatcagccttttgaacggtccagccgagaactaaccacagagcgcgttttagtggagtggtacttatttttaaataagatactgagtttactacaaatggaaggtttgaggcaaccttgatggagcaagtgtatgggtgccatgtttttccaacatcatgtgctcactttgtgtctctgacatattgccagaacacaagactatatttactagcagctctgtgtccttgctcattggaaaatgatctttcctcaagacttgctgacacgtttctgtttaaggcatgacaatcctaaaggccaacaattgtggacaggggcaactcttcctttcattattactggtgtagtcaattatgcaaagtctggtcaaccaaagaccaccaggctcaagccatcagtattaaaatatggccacatgctccttgatggcctatgtgatatggctttagtaactcccttaggaccaagagaatataatggaactaatgctgtgtaacttccaaatgcagctgctttctgggtcttttgaaatggcccttcagaatccaggcaacatgctgtgagaagttcaagctacatggacaagtgtagatggttctggtgaacgattccaatctagtcttggctttaaaagtcatctcagtaccatgaattcagatgattatgtcgaagc

SEQ ID NO: 642218 - DNA, 501 bp, Homo sapiens
ttcacctgggcacaatgctattggtacctttcccctgcgtgaggtggggaatccctaactgaggtcactgtcaccagagctgctgatccccctccatgtggagattgaccccgagatccagcgagtgcgcactcaggagcgggagcagatacaagaccctcaagcaacaagttcgcctaccttcatcgactaaggtgcaggtatcctaggagcaagcagaataatggtgctggagaccaagtgttggcactgctgcatggagcagggccagaacttgggtgtacaccaggaacaacctggagcccctctttgaggactacctggtgtagcatgcggagtccaccggctggacgagaaccttcactgaggcgatgcggggtgtgaggctgggcattcaggacgctcagggacacgtgcagggaccttggtggacggaccttcaacgacccctgttactaggattgctaatcaaccataggaatcattgttgacaaagaaagt

SEQ ID NO: 642219 - DNA, 358 bp, Homo sapiens
tgggtatctagaggatcctgatatgttctctataaataaaatagtggatagtgtgatgctcatccagtattggatgtagggaggagaatttgttgtatccaggagggtggaggctgagtgagcaagatcacgcactgactcagctgggtggagagtgagactttccccccccaaaaaaaaggatacgttagatgagaagcgtaatgttttctgtgtacagtaggggtgatatgaactaataataatgttttttcaaggtagctagaagattttgaattgttatcaccacaaagaaatgatagatgtgactggtgtggtggcttatgcctgtaatcttaacactttgggaggccgaggc

SEQ ID NO: 642220 - DNA, 2047 bp, Homo sapiens
  misc_feature (1882)..(1882): n is a, c, g, or t
  misc_feature (2047)..(2047): n is a, c, g, or t
gcggccgctcggcgctggctgctgtgcggaggccacggcgggccgcgagccgcctcgtcctcgccctcctgccctgggtgcggccccccgggtcccggcgcccactgccccggcgtcccgcgctccgcgcccgcccaggcacccaccagcggcgccgacctcagcgcgcacctatgggctcgctaccaggacatgcggagactggtgcacgacctcctgccccccgaggtctgcagtctcctgaacccagcagccatctacgccaacaacgagatcagcctgcgtgacgttgaggtctacggctttgactacgactacaccctggcccagtatgcagacgcactgcaccccgagatcttcagtaccgcccgtgacatcctgatcgagcactacaagtacccagaagggattcggaagtatgactacaaccccagctttgccatccgtggcctccactatgacattcagaagagccttctgatgaagattgacgccttccactacgtgcagctggggacagcctacaggggcctccagcctgtgccagacgaggaggtgattgagctgtatgggggtacccagcacatcccactataccagatgagtggcttctatggcaagggtccctccattaagcagttcatggacatcttctcgctaccggagatggctctgctgtcctgtgtggtggactactttctgggccacagcctggagtttgaccaagcacatctctacaaggacgtgacggacgccatccgagacgtgcatgtgaagggcctcatgtaccagtggatcgagcaggacatggagaagtacatcctgagaggggatgagacgtttgctgtcctgagccgcctggtggcccatgggaaacagctgttcctcatcaccaacagtcctttcagcttcgtagacaaggggatgcggcacatggtgggtcccgattggcgccagctcttcgatgtggtcattgtccaggcagacaagcccagcttcttcactgaccggcgcaagcctttcagaaaactcgatgagaagggctcacttcagtgggaccggatcacccgcttggaaaagggcaagatctatcggcagggaaacctgtttgacttcttacgcttgacggaatggcgtggcccccgcgtgctctacttcggggaccacctctatagtgatctggcggatctcatgctgcggcacggctggcgcacaggcgccatcatccccgagctggagcgtgagatccgcatcatcaacacggagcagtacatgcactcgctgacgtggcagcaggcgctcacggggctgctggagcgcatgcagacctatcaggacgcggagtcgaggcaggtgctggctgcctggatgaaagagcggcaggagctgaggtgcatcaccaaggccctgttcaatgcgcagttcggcagcatcttccgcaccttccacaaccccacctacttctcaaggcgcctcgtgcgcttctctgacctctacatggcctccctcagctgcctgctcaactaccgcgtggacttcaccttctacccacgccgtacgccgctgcagcacgaggcacccctctggatggaccagctctgcaccggctgcatgaagacccccttccttggtgacatggcccacatccgctgagggcacctttattgtctgggacaggccctcagcccctcctgccccatccacccagacaagcaataaaagtggtctcctccctgaaaaaaaaacaggcttagagaacaaaatcatgtttgggagccttcagggcacagaagaaggtttttaaagcaccattcttgtgcgccgcgcggcgccagatattttagttgacactttgcacaacgtgtgtccgaagaagacctgnggcagagtaggtgttgcgtccaccattaaaaacgcgcggcgaacacgcgtcttgacaaccagaggggtctgcagcattacggctcaaagagtgcaagaagtgtaatacccacgttgggggaaacaaatagaacacgaagcctcatcgtagcgcagatcagacggn

SEQ ID NO: 642221 - DNA, 727 bp, Homo sapiens
cgggtgtttccttgttcggaatcgggttggctcctctttgattttttacttctggtgacccacgcaaaagcagtcccgacctggttgtattaataataaaggctgtaaggatcagccttttgaacggtccagccgagaactaaccacagagcgcgttttagtggagtggtacttatttttaaataagatactgagtttactacaaatggaaggtttgaggcaaccttgatggagcaagtgtatgggtgccatgtttttccaacatcatgtgctcactttgtgtctctgacatattgccagaacacaagactatatttactagcagctctgtgtccttgctcattggaaaatgatctttcctcaagacttgctgacacgtttctgtttaaggcatgacaatcctaaaggccaacaattgtggacaggggcaactcttcctttcattattactggtgtagtcaattatgcaaagtctggtcaaccaaagaccaccaggctcaagccatcagtcttaggaccaagagaatataatggaactaatgctgtgtaacttccaaatgcagctgctttctgggtcttttgaaatggcccttcagaatccaggcaacatgctgtgagaagttcaagctacatggacaagtgtagatggttctggtgaacgattccaatctagtcttggctttaaaagtcatctcagtaccatgaattcagatgattatgtcgaagc

SEQ ID NO: 642222 - DNA, 237 bp, Homo sapiens
  misc_feature (150)..(150): n is a, c, g, or t
  misc_feature (168)..(168): n is a, c, g, or t
  misc_feature (176)..(176): n is a, c, g, or t
  misc_feature (213)..(213): n is a, c, g, or t
  misc_feature (220)..(220): n is a, c, g, or t
tgtccccacctttgtagcaggagaagtggcaagacggcaggttgacatctatgtgagagaggagagatgctacccggagttccacatccagatacaagcctggcactggcagtttctccaatggatgcccaatggccccatgggccactntctcccagtggcctggcntgacatangcagtgcagcctgggggagtgctgccacactctcctngtacccntcttccccatgcccagt

SEQ ID NO: 642223 - DNA, 1028 bp, Homo sapiens
ggtgggaaacgagcttgttcgctgcgggtagctggtggagactcgagtgtggtgacagcgaaagaacgataacagcaatgccggagcgagatagtgagccgtactcgcaacccttgagctcgcccgatggtcaacgatgtgaaatgatcctcactccttccaccaagtcaaaactctaccaatgaatgtacttcaggcaactcattctcatgacccccagggctgcagctacctctgcgaccagcttctaagtcacgtcaccaatgagatgcccttgggggagttcacatgaggatgaagatccaggcatgcacgaaggcaggagaaaagacacccgttattatgcctaatgctacgccaacaagagcttgagatgagagtagagagcgtagctgcagacgtaccgggatcgtgccaggggatctcgacgatgatgggagtgacacctgattatgacagaaccgagctgatcgagtgatgcgacacgcttatacgtagtacgcgtgctgcaggccccatgtgcgttgccgcgcggcacaaattcaagcctgcgggcagcaagcagcaagaccacgttgatccatgagagctccaaaacccgtcggggtggtgactctggcacgacacccaacttgtggtgaagaggtcttggcacccatagtccggttccctagacggttgcgagcatggcagtattggcccacgccaagcacatagcagcacgaggaacgtcgatggtgcaagccgcagccaccgaaaggaagaaacggatgaagattctgagagtaacatcgaggtttacaccacgtatggcgcggcagttacccgactgcttctgatagtccaagcttctcagcgaatgagactgtctcggcggccgactcggcccgctggccaaccggatacgcattggtgccaacaaatccccaccatctgtaccacaggtgatgaccctggaagcccatactccacacgcatgctacactcacagaactcacctcgggcacgacaagtcaagatcggagaac

SEQ ID NO: 642224 - DNA, 623 bp, Homo sapiens
atataatgctagcatataccatctgcacttctaggaatagtagtatatcgctcacacctcatatcctccctactatgcctagaaggaataatactatcgctgttcattatagcgtactctcataaccctcgaacacccactccctcttagccagatatagtgcctagtgccatactagtctttgccgcctgcgaagcagcggtgggcctagccctactagtctcaattctccaagacatatggcctaggactacgtaggataacctagaacctagctccaatgctaaaactaatcgtcccaacagattatattactatccactgacatgactttccagaaaaacacagtaattttgaatcaacacaaccagccagcagcctaattattagcatcatccctctactattttttaaccaaatcaggcaagcaagctattgtagcgtgttcccggaagcttatcctccgagccccttaacaagccccctcctaatacgtaagtaccgtgagtccgtacccgtcgaggatcatgggaagccaaacggcgacttatccagtgaaccaatatcgacgaaaaaagaacttctaccttcgtctagtacgtaatctcgcgtacaaagtctcc

SEQ ID NO: 642225 - DNA, 2270 bp, Homo sapiens
  misc_feature (1751)..(1751): n is a, c, g, or t
  misc_feature (1756)..(1756): n is a, c, g, or t
gcggccgctcggcgctggctgctgtgcggaggccacggcgggccgcgagccgcctcgtcctcgccctcctgccctgggtgcggccccccgggtcccggcgcccactgccccggcgtcccgcgctccgcgcccgcccaggcacccaccagcggcgccgacctcagcgcgcacctatgggctcgctaccaggacatgcggagactggtgcacgacctcctgccccccgaggtctgcagtctcctgaacccagcagccatctacgccaacaacgagatcagcctgcgtgacgttgaggtctacggctttgactacgactacaccctggcccagtatgcagacgcactgcaccccgagatcttcagtaccgcccgtgacatcctgatcgagcactacaagtacccagaagggattcggaagtatgactacaaccccagctttgccatccgtggcctccactatgacattcagaagagccttctgatgaagattgacgccttccactacgtgcagctggggacagcctacaggggcctccagcctgtgccagacgaggaggtgattgagctgtatgggggtacccagcacatcccactataccagatgagtggcttctatggcaagggtccctccattaagcagttcatggacatcttctcgctaccggagatggctctgctgtcctgtgtggtggactactttctgggccacagcctggagtttgaccaagcacatctctacaaggacgtgacggacgccatccgagacgtgcatgtgaagggcctcatgtaccagtggatcgagcaggacatggagaagtacatcctgagaggggatgagacgtttgctgtcctgagccgcctggtggcccatgggaaacagctgttcctcatcaccaacagtcctttcagcttcgtagacaaggggatgcggcacatggtgggtcccgattggcgccagctcttcgatgtggtcattgtccaggcagacaagcccagcttcttcactgaccggcgcaagcctttcagaaaactcgatgagaagggctcacttcagtgggaccggatcacccgcttggaaaagggcaagatctatcggcagggaaacctgtttgacttcttacgcttgacggaatggcgtggcccccgcgtgctctacttcggggaccacctctatagtgatctggcggatctcatgctgcggcacggctggcgcacaggcgccatcatccccgagctggagcgtgagatccgcatcatcaacacggagcagtacatgcactcgctgacgtggcagcaggcgctcacggggctgctggagcgcatgcagacctatcaggacgcggagtcgaggcaggtgctggctgcctggatgaaagagcggcaggagctgaggtgcatcaccaaggccctgttcaatgcgcagttcggcagcatcttccgcaccttccacaaccccacctacttctcaaggcgcctcgtgcgcttctctgacctctacatggcctccctcagctgcctgctcaactaccgcgtggacttcaccttctacccacgccgtacgccgctgcagcacgaggcacccctctggatggaccagctctgcaccggctgcatgaagacccccttccttggtgacatggcccacatccgctgagggcacctttattgtctgggacaggccctcagcccctcctgccccatccacccagacaagcaataaaagtggtctcctccctgaaaaaaaaaaaaaanaaaanaaaaaacaaaaaaaacaaaaaaaaaaaaaaaaaaaaaaaaaaaaaaaacaaaaaaaaaaaaaagagagggggggcggcgggcaagaaaaaaattttctccggggggggagcacacaatacagaccgcacaccgaacttccttagaaacaacgggggacgcacacaacatagagcgagggctcaataacaacaggacgcaccaacacagacgcacagagaatacaaacaacaaccgcgcggcgaagagaggaatacaacacgcgacacgagagcgagaagacacaaccagaaggagcaggaacgaacacccacaaccatcccccacgacgcgaggcgaaccacacacagagccggagaacacaccaccccaccccgcaaggagaagaacaaccacgcagggagggagacacacaacaccgccaccgcagagcaaacacacgcggcagaacacccaacgacacacaatagccgacgagcaaaaagaaaaccacacgaacacagagcgagaatgcag

SEQ ID NO: 642226 - DNA, 128 bp, Homo sapiens
taagattcgtcttaagctcaagatctttcctggcttggactattctggtgttatgcttcaaaatgtattaggtaatttttgtagtaattttttcaattccagaagttccattgggttctttcttaaag

SEQ ID NO: 642227 - DNA, 4040 bp, Homo sapiens
  misc_feature (2120)..(2120): n is a, c, g, or t
  misc_feature (2258)..(2258): n is a, c, g, or t
ggactgaagcaggaggcaacctggcctttgcccactgcccaatgtgcttggggtgagaacaccccttgctggcatgggtccacttgagcaggtgggcctttacggaggagggatgggggttgcccggcccgtgccaggccacagactggaagtcatgccctttacctgcaccccaggcctttcagaaaactcgatgagaagggctcacttcagtgggaccggatcacccgcttggaaaagggcaagatctatcggcagggaaacctgtttgacttcttacgcttgacggaatggcgtggcccccgcgtgctctacttcggggaccacctctatagtgatctggcggatctcatgctgcggcacggctggcgcacaggcgccatcatccccgagctggagcgtgagatccgcatcatcaacacggagcagtacatgcactcgctgacgtggcagcaggcgctcacggggctgctggagcgcatgcagacctatcaggacgcggagtcgaggcaggtgctggctgcctggatgaaagagcggcaggagctgaggtgcatcaccaaggccctgttcaatgcgcagttcggcagcatcttccgcaccttccacaaccccacctacttctcaaggcgcctcgtgcgcttctctgacctctacatggcctccctcagctgcctgctcaactaccgcgtggacttcaccttctacccacgccgtacgccgctgcagcacgaggcacccctctggatggaccagctctgcaccggctgcatgaagacccccttccttggtgacatggcccacatccgctgagggcacctttattgtctgggacaggccctcagcccctcctgccccatccacccagacaagcaataaaagtggtctcctcccttggtgacatggcccacatccgctgagggcacctttattgtctgggacaggccctcagcccctcctgccccatccacccagacaagcaataaaagtggtctcctccctgtgcatgcttctgctttcagccccagcctcgtcacttgactgtgaggatcctctgggtgtcagggaagtcctcctccagcagtgagtcatcgaagggttcacaaaaggtgtcgctgccaaagacagggttggggacagagaccagggtggggttggtcccttcttgccacggtgagaagtcgtcatcagcatcatcttccgcctggaaggcagagaagccaaagcccatgggcttgcctcgggcacggaggtagagagctccggccaccaagccaagcagtgctccagcggcaagcacagcccccacgcctgccgccacaggtggggcttcaggcgccagcactgcctggggctgtgggggtgccaggagggggctggccagagcatggatgatgccattgaaggccatgatgtcccacacaatgatacggctaaccacaactgtccctggggccacaggggcccaggaactgttgtcagggcctgcgtcactgatgatgaggctgaggcctgagtgggccggaagcaacttcccctggctggcgttggcacttaggagggtggcgttggaggcatgcagctccaagtctgggccactcagcgtcatgttgtccacaaagccttcattgacagggacgaagagtgtcttatacgtgagctcatcatccaggaagtccaggaagtcgagaccccgctgggtggcattggcatagcccaatagcatcccatagaaggtggagaagttggcagtggcagccagcacatccagcagcttcccattgcacgtgctgatcccgtcacccacgaagccatttcggcatcggcaggccacatcttgcacacggaagcagtaggcatcccagcgttctgagaggttcttgcgggcacccaggctgactatgcccacccgaccattgccacagtccgccacagggaaaaccacagggtgggcagtggagccattggccagccagcccatgaggcacaggtggaagcccagctgctgggcagcagagagctgagggaatgaagcaaggacggctccctgtgcttcgcatgccgcctcagcctccgaaaagttcagaccataagggccgctggtggcctggaggtggaanacgccagcccgtttctcctggaagtgcaggtcagtgcacatggcatctgagtgcaagggcggtggctggcccaagcagcggtccacaggtggttccgactcctccagacactgcagtccatcgcctacgtagcctgcntggcactcacagcgccgtgtgttcaggccggtgctcaagcagttggcgtgctcgctgcagcccccgcggtggccatctgtgcaggggttgcgggcccggcagctccagccatcaccctcgtagtcgggcaggcaggtacaagtgaccattgttcctacctggctacagttggcgtgctcactgcagccaccatgcccgtcctggcacaggtctgccactgtacacacgcggccatccccttcatagcccaggctgcactcacagctgttgcctgcacggcacacagcctcgggtgcacagggtggggtacacacaggctgcagctccagttgcacctcacagcgtggcccagtccagccttcatcacagaagcaggagccagagcccccaaggccctcatcacagcggccatgcacagtgcagcggcaggcttgacaatggggcccaaaggcaccaggagcacagagttcacaggctgtcccagcaaaacctgaacggcacagacactgcccactgccactcatgccgtccatgcacacgccacggtcactacaagggctgctgggccgccagggcaagcttgcactcactgccatagtgaccagggcagcagctgggcttccaggtggtggtgacacaattgcggtggcagcccctgcccaggccttggggcctaccccaaaggctggggtggacccagacgctgcgtaatcccaaagagtgcagcggaggggacgtccagaacttcgggtagaagcgccagcaggcctcagggctgccctgctcctgtgacccctcaggacagggtggctccagcccacagatgctgcaggtgttcagtcgcaggggccgggtctcaaagtggtcacagcgagcaccaaggccaggtggctccagcagctggtcgatgccataggccaggccaccctcaaagggcaagtgccgctgcacaatgcgagcatcatcctcacccaccatgagctcaccgggccgcgttcggctgcaggagaaagagatgggggtcccatgcatggttcgaagtgggcccaggttgggcaggtcagatgccaaggcctcgacattgcgaatcatgtggccccgcagaatggctgctagcttgtcacggtggtcctcatggtacagccaggcctggcgatccggaggcagagctcgaaaggcggcgtctgtgggccacagcattgtgaagggcctatgggatgcctctcgaagcaggggcaggaggccggccaccttcaggaggccgctgaagatcttgtaaccgaagccctgggcggcggcggtgacatttctcctcgggatgggagcatcatcaggctcccagtgcagcgcctcggggggcagcaggacacggtcaatgaagtgcaggatgccgttcacggcctcatggtcgctgctcaccacgcgcgcgaagtcattgaggtatatgctgccctccctctcgctgaagcgcagtgggtgccctgagagggccgtggcgtacccctgctccagcaggtcctcgctccgcagccgccgacagccaaccacgtggtagcgaaacaccagctggcgatgcgcacgaatccgggccagctcatcctgcgacaggttgctcattagatctgcgtgcggcacgaagatggtgaaaggcccatcgcccttgagctccttatattccaggaggcggaggctgaagaatgaggcatgcttatccctcaggagctccaggccgactcgggcacggcaggtgagccgtcccccacgtgtgggctggttacagtc

SEQ ID NO: 642228 - DNA, 3941 bp, Homo sapiens
  misc_feature (2021)..(2021): n is a, c, g, or t
  misc_feature (2159)..(2159): n is a, c, g, or t
tcatgctcggtcccgctgtcccgtaagtgggaacagcagcgtgcggatgtgaggagagaaaggaggcggatccggaagagatatccggacttcgtgggcaggctgcccacgaagtgggaccggatcacccgcttggaaaagggcaagatctatcggcagggaaacctgtttgacttcttacgcttgacggaatggcgtggcccccgcgtgctctacttcggggaccacctctatagtgatctggcggatctcatgctgcggcacggctggcgcacaggcgccatcatccccgagctggagcgtgagatccgcatcatcaacacggagcagtacatgcactcgctgacgtggcagcaggcgctcacggggctgctggagcgcatgcagacctatcaggacgcggagtcgaggcaggtgctggctgcctggatgaaagagcggcaggagctgaggtgcatcaccaaggccctgttcaatgcgcagttcggcagcatcttccgcaccttccacaaccccacctacttctcaaggcgcctcgtgcgcttctctgacctctacatggcctccctcagctgcctgctcaactaccgcgtggacttcaccttctacccacgccgtacgccgctgcagcacgaggcacccctctggatggaccagctctgcaccggctgcatgaagacccccttccttggtgacatggcccacatccgctgagggcacctttattgtctgggacaggccctcagcccctcctgccccatccacccagacaagcaataaaagtggtctcctcccttggtgacatggcccacatccgctgagggcacctttattgtctgggacaggccctcagcccctcctgccccatccacccagacaagcaataaaagtggtctcctccctgtgcatgcttctgctttcagccccagcctcgtcacttgactgtgaggatcctctgggtgtcagggaagtcctcctccagcagtgagtcatcgaagggttcacaaaaggtgtcgctgccaaagacagggttggggacagagaccagggtggggttggtcccttcttgccacggtgagaagtcgtcatcagcatcatcttccgcctggaaggcagagaagccaaagcccatgggcttgcctcgggcacggaggtagagagctccggccaccaagccaagcagtgctccagcggcaagcacagcccccacgcctgccgccacaggtggggcttcaggcgccagcactgcctggggctgtgggggtgccaggagggggctggccagagcatggatgatgccattgaaggccatgatgtcccacacaatgatacggctaaccacaactgtccctggggccacaggggcccaggaactgttgtcagggcctgcgtcactgatgatgaggctgaggcctgagtgggccggaagcaacttcccctggctggcgttggcacttaggagggtggcgttggaggcatgcagctccaagtctgggccactcagcgtcatgttgtccacaaagccttcattgacagggacgaagagtgtcttatacgtgagctcatcatccaggaagtccaggaagtcgagaccccgctgggtggcattggcatagcccaatagcatcccatagaaggtggagaagttggcagtggcagccagcacatccagcagcttcccattgcacgtgctgatcccgtcacccacgaagccatttcggcatcggcaggccacatcttgcacacggaagcagtaggcatcccagcgttctgagaggttcttgcgggcacccaggctgactatgcccacccgaccattgccacagtccgccacagggaaaaccacagggtgggcagtggagccattggccagccagcccatgaggcacaggtggaagcccagctgctgggcagcagagagctgagggaatgaagcaaggacggctccctgtgcttcgcatgccgcctcagcctccgaaaagttcagaccataagggccgctggtggcctggaggtggaanacgccagcccgtttctcctggaagtgcaggtcagtgcacatggcatctgagtgcaagggcggtggctggcccaagcagcggtccacaggtggttccgactcctccagacactgcagtccatcgcctacgtagcctgcntggcactcacagcgccgtgtgttcaggccggtgctcaagcagttggcgtgctcgctgcagcccccgcggtggccatctgtgcaggggttgcgggcccggcagctccagccatcaccctcgtagtcgggcaggcaggtacaagtgaccattgttcctacctggctacagttggcgtgctcactgcagccaccatgcccgtcctggcacaggtctgccactgtacacacgcggccatccccttcatagcccaggctgcactcacagctgttgcctgcacggcacacagcctcgggtgcacagggtggggtacacacaggctgcagctccagttgcacctcacagcgtggcccagtccagccttcatcacagaagcaggagccagagcccccaaggccctcatcacagcggccatgcacagtgcagcggcaggcttgacaatggggcccaaaggcaccaggagcacagagttcacaggctgtcccagcaaaacctgaacggcacagacactgcccactgccactcatgccgtccatgcacacgccacggtcactacaagggctgctgggccgccagggcaagcttgcactcactgccatagtgaccagggcagcagctgggcttccaggtggtggtgacacaattgcggtggcagcccctgcccaggccttggggcctaccccaaaggctggggtggacccagacgctgcgtaatcccaaagagtgcagcggaggggacgtccagaacttcgggtagaagcgccagcaggcctcagggctgccctgctcctgtgacccctcaggacagggtggctccagcccacagatgctgcaggtgttcagtcgcaggggccgggtctcaaagtggtcacagcgagcaccaaggccaggtggctccagcagctggtcgatgccataggccaggccaccctcaaagggcaagtgccgctgcacaatgcgagcatcatcctcacccaccatgagctcaccgggccgcgttcggctgcaggagaaagagatgggggtcccatgcatggttcgaagtgggcccaggttgggcaggtcagatgccaaggcctcgacattgcgaatcatgtggccccgcagaatggctgctagcttgtcacggtggtcctcatggtacagccaggcctggcgatccggaggcagagctcgaaaggcggcgtctgtgggccacagcattgtgaagggcctatgggatgcctctcgaagcaggggcaggaggccggccaccttcaggaggccgctgaagatcttgtaaccgaagccctgggcggcggcggtgacatttctcctcgggatgggagcatcatcaggctcccagtgcagcgcctcggggggcagcaggacacggtcaatgaagtgcaggatgccgttcacggcctcatggtcgctgctcaccacgcgcgcgaagtcattgaggtatatgctgccctccctctcgctgaagcgcagtgggtgccctgagagggccgtggcgtacccctgctccagcaggtcctcgctccgcagccgccgacagccaaccacgtggtagcgaaacaccagctggcgatgcgcacgaatccgggccagctcatcctgcgacaggttgctcattagatctgcgtgcggcacgaagatggtgaaaggcccatcgcccttgagctccttatattccaggaggcggaggctgaagaatgaggcatgcttatccctcaggagctccaggccgactcgggcacggcaggtgagccgtcccccacgtgtgggctggttacagtc

SEQ ID NO: 642229 - DNA, 4076 bp, Homo sapiens
  misc_feature (27)..(27): n is a, c, g, or t
  misc_feature (61)..(61): n is a, c, g, or t
  misc_feature (87)..(87): n is a, c, g, or t
  misc_feature (237)..(237): n is a, c, g, or t
  misc_feature (2156)..(2156): n is a, c, g, or t
  misc_feature (2294)..(2294): n is a, c, g, or t
acaaacagggatctaatccctaacctngggtacgtgtgagaccacagggagaaggccctcngaggcatgggcaccatgccaggcctntagggcaccttcctgcagcaggcagaatccccttcccaagtaggaggggaaagtgacaagaaccagggcccagggagggagcagcaaggccatgggaaagggcagccagcatccggctggatttgggctgcctctggggattcgggaggnaggactggtggaggacaaggcacacttggctcagcagcattcccctcctctccctagggaaacctgtttgacttcttacgcttgacggaatggcgtggcccccgcgtgctctacttcggggaccacctctatagtgatctggcggatctcatgctgcggcacggctggcgcacaggcgccatcatccccgagctggagcgtgagatccgcatcatcaacacggagcagtacatgcactcgctgacgtggcagcaggcgctcacggggctgctggagcgcatgcagacctatcaggacgcggagtcgaggcaggtgctggctgcctggatgaaagagcggcaggagctgaggtgcatcaccaaggccctgttcaatgcgcagttcggcagcatcttccgcaccttccacaaccccacctacttctcaaggcgcctcgtgcgcttctctgacctctacatggcctccctcagctgcctgctcaactaccgcgtggacttcaccttctacccacgccgtacgccgctgcagcacgaggcacccctctggatggaccagctctgcaccggctgcatgaagacccccttccttggtgacatggcccacatccgctgagggcacctttattgtctgggacaggccctcagcccctcctgccccatccacccagacaagcaataaaagtggtctcctcccttggtgacatggcccacatccgctgagggcacctttattgtctgggacaggccctcagcccctcctgccccatccacccagacaagcaataaaagtggtctcctccctgtgcatgcttctgctttcagccccagcctcgtcacttgactgtgaggatcctctgggtgtcagggaagtcctcctccagcagtgagtcatcgaagggttcacaaaaggtgtcgctgccaaagacagggttggggacagagaccagggtggggttggtcccttcttgccacggtgagaagtcgtcatcagcatcatcttccgcctggaaggcagagaagccaaagcccatgggcttgcctcgggcacggaggtagagagctccggccaccaagccaagcagtgctccagcggcaagcacagcccccacgcctgccgccacaggtggggcttcaggcgccagcactgcctggggctgtgggggtgccaggagggggctggccagagcatggatgatgccattgaaggccatgatgtcccacacaatgatacggctaaccacaactgtccctggggccacaggggcccaggaactgttgtcagggcctgcgtcactgatgatgaggctgaggcctgagtgggccggaagcaacttcccctggctggcgttggcacttaggagggtggcgttggaggcatgcagctccaagtctgggccactcagcgtcatgttgtccacaaagccttcattgacagggacgaagagtgtcttatacgtgagctcatcatccaggaagtccaggaagtcgagaccccgctgggtggcattggcatagcccaatagcatcccatagaaggtggagaagttggcagtggcagccagcacatccagcagcttcccattgcacgtgctgatcccgtcacccacgaagccatttcggcatcggcaggccacatcttgcacacggaagcagtaggcatcccagcgttctgagaggttcttgcgggcacccaggctgactatgcccacccgaccattgccacagtccgccacagggaaaaccacagggtgggcagtggagccattggccagccagcccatgaggcacaggtggaagcccagctgctgggcagcagagagctgagggaatgaagcaaggacggctccctgtgcttcgcatgccgcctcagcctccgaaaagttcagaccataagggccgctggtggcctggaggtggaanacgccagcccgtttctcctggaagtgcaggtcagtgcacatggcatctgagtgcaagggcggtggctggcccaagcagcggtccacaggtggttccgactcctccagacactgcagtccatcgcctacgtagcctgcntggcactcacagcgccgtgtgttcaggccggtgctcaagcagttggcgtgctcgctgcagcccccgcggtggccatctgtgcaggggttgcgggcccggcagctccagccatcaccctcgtagtcgggcaggcaggtacaagtgaccattgttcctacctggctacagttggcgtgctcactgcagccaccatgcccgtcctggcacaggtctgccactgtacacacgcggccatccccttcatagcccaggctgcactcacagctgttgcctgcacggcacacagcctcgggtgcacagggtggggtacacacaggctgcagctccagttgcacctcacagcgtggcccagtccagccttcatcacagaagcaggagccagagcccccaaggccctcatcacagcggccatgcacagtgcagcggcaggcttgacaatggggcccaaaggcaccaggagcacagagttcacaggctgtcccagcaaaacctgaacggcacagacactgcccactgccactcatgccgtccatgcacacgccacggtcactacaagggctgctgggccgccagggcaagcttgcactcactgccatagtgaccagggcagcagctgggcttccaggtggtggtgacacaattgcggtggcagcccctgcccaggccttggggcctaccccaaaggctggggtggacccagacgctgcgtaatcccaaagagtgcagcggaggggacgtccagaacttcgggtagaagcgccagcaggcctcagggctgccctgctcctgtgacccctcaggacagggtggctccagcccacagatgctgcaggtgttcagtcgcaggggccgggtctcaaagtggtcacagcgagcaccaaggccaggtggctccagcagctggtcgatgccataggccaggccaccctcaaagggcaagtgccgctgcacaatgcgagcatcatcctcacccaccatgagctcaccgggccgcgttcggctgcaggagaaagagatgggggtcccatgcatggttcgaagtgggcccaggttgggcaggtcagatgccaaggcctcgacattgcgaatcatgtggccccgcagaatggctgctagcttgtcacggtggtcctcatggtacagccaggcctggcgatccggaggcagagctcgaaaggcggcgtctgtgggccacagcattgtgaagggcctatgggatgcctctcgaagcaggggcaggaggccggccaccttcaggaggccgctgaagatcttgtaaccgaagccctgggcggcggcggtgacatttctcctcgggatgggagcatcatcaggctcccagtgcagcgcctcggggggcagcaggacacggtcaatgaagtgcaggatgccgttcacggcctcatggtcgctgctcaccacgcgcgcgaagtcattgaggtatatgctgccctccctctcgctgaagcgcagtgggtgccctgagagggccgtggcgtacccctgctccagcaggtcctcgctccgcagccgccgacagccaaccacgtggtagcgaaacaccagctggcgatgcgcacgaatccgggccagctcatcctgcgacaggttgctcattagatctgcgtgcggcacgaagatggtgaaaggcccatcgcccttgagctccttatattccaggaggcggaggctgaagaatgaggcatgcttatccctcaggagctccaggccgactcgggcacggcaggtgagccgtcccccacgtgtgggctggttacagtc

SEQ ID NO: 642230 - DNA, 406 bp, Homo sapiens
  misc_feature (29)..(29): n is a, c, g, or t
  misc_feature (40)..(40): n is a, c, g, or t
  misc_feature (72)..(73): n is a, c, g, or t
  misc_feature (77)..(77): n is a, c, g, or t
  misc_feature (83)..(83): n is a, c, g, or t
  misc_feature (85)..(87): n is a, c, g, or t
  misc_feature (91)..(91): n is a, c, g, or t
  misc_feature (99)..(100): n is a, c, g, or t
  misc_feature (102)..(102): n is a, c, g, or t
  misc_feature (108)..(108): n is a, c, g, or t
  misc_feature (115)..(115): n is a, c, g, or t
  misc_feature (117)..(117): n is a, c, g, or t
  misc_feature (120)..(120): n is a, c, g, or t
  misc_feature (131)..(131): n is a, c, g, or t
  misc_feature (141)..(141): n is a, c, g, or t
  misc_feature (156)..(156): n is a, c, g, or t
  misc_feature (160)..(160): n is a, c, g, or t
  misc_feature (164)..(164): n is a, c, g, or t
  misc_feature (166)..(166): n is a, c, g, or t
  misc_feature (168)..(168): n is a, c, g, or t
  misc_feature (172)..(173): n is a, c, g, or t
  misc_feature (178)..(178): n is a, c, g, or t
  misc_feature (180)..(180): n is a, c, g, or t
  misc_feature (184)..(184): n is a, c, g, or t
  misc_feature (187)..(187): n is a, c, g, or t
  misc_feature (198)..(198): n is a, c, g, or t
  misc_feature (200)..(200): n is a, c, g, or t
  misc_feature (205)..(206): n is a, c, g, or t
  misc_feature (212)..(212): n is a, c, g, or t
  misc_feature (219)..(219): n is a, c, g, or t
  misc_feature (227)..(227): n is a, c, g, or t
  misc_feature (235)..(235): n is a, c, g, or t
  misc_feature (245)..(245): n is a, c, g, or t
  misc_feature (247)..(247): n is a, c, g, or t
  misc_feature (261)..(261): n is a, c, g, or t
  misc_feature (269)..(269): n is a, c, g, or t
  misc_feature (286)..(286): n is a, c, g, or t
  misc_feature (290)..(290): n is a, c, g, or t
  misc_feature (295)..(295): n is a, c, g, or t
  misc_feature (297)..(297): n is a, c, g, or t
  misc_feature (302)..(302): n is a, c, g, or t
  misc_feature (307)..(308): n is a, c, g, or t
  misc_feature (315)..(316): n is a, c, g, or t
  misc_feature (323)..(323): n is a, c, g, or t
ccgagaccacctctatggcagagcctacncagaggagagngtatcggtgagtctaccctggggatatatcgnnacanggctcngnnncacnctacaganntnacactngctcagnantgnatacacaaccngaagacctcntgagaggcctgtacntgantcangngntagnnactangntcantgncaagggaccananatagnnatggtncagggcntggagaangaacctgnagtgatcacnanggatgggacagatntcaaggangcagacaggactaagangaangagtnancactncaggnngcatagnncacgctnacggaactgagaacgcgctgagcgtataaccagtacacttgcgcaactggtacagctattcattgatcacagacgtatcaggt

SEQ ID NO: 642231 - DNA, 519 bp, Homo sapiens
  misc_feature (74)..(74): n is a, c, g, or t
  misc_feature (328)..(328): n is a, c, g, or t
  misc_feature (332)..(332): n is a, c, g, or t
  misc_feature (338)..(338): n is a, c, g, or t
  misc_feature (348)..(348): n is a, c, g, or t
  misc_feature (351)..(351): n is a, c, g, or t
  misc_feature (354)..(354): n is a, c, g, or t
  misc_feature (473)..(473): n is a, c, g, or t
gaaccagacagcgtggtcttctgcttcttggtcattgagatgaagaagtagtatgacatcgccttgcaattcancttcactctcatccagtccttctgctgtgacaacgacatcaacatcgtgcgggtgtcgggcatgcagcgcctggcgcagctcctgggaagacggccgagacccagggcaccaccgaggcccgagacctgcattgtcttttggtcacgacccttcatatggacgcttggaaaagcccacggcttggtggaggtggccagctactgcgaagaaagctgtggcaacaaccagtgggtcccctacatctctcttcagnaacncttagncccttcccancancanaatctgtttagttttttccacaaacaaaaaatacaataaatatttgaacccccttcccccccagcacaaccccccaaaacaacccaacccacgaggaccatcgggggcagagtcgttgnagactgaagaggaagaggaggaggagaaggggagtgagcggccgct

SEQ ID NO: 642232 - DNA, 869 bp, Homo sapiens
agcgggttgggctggtgggaaggggaggcatcccgatgtgttcagaaaagtgtgtccctgatttcgctgtgcaaattgaaagtggcattactttatgcagggccttagcgggagtgaaaagagctcctggcagcccttagctcagggcactccaggccccacccggacctacagcacagactgagtggatcaaagtagcgccatgtctagccctaagtccacacacgatcctctcagggcagcgtaggcgagaccatcccatggtagggagctcattaccaccaaattataaagtttccattctgcagacagaggaagcctggtcctagcctgcaaagagttagtactcccttgctagactggcagctccttgcaagaagcggagctgtactacacattcatctactcatgacttcgcgactcgtcacttatccccatcttgaggcttccataattgcagatccgatgaactaggagctaacgtgggtacacaggacccctctagactgtctaacacaccccatccaaatacacgaagaacgaaacttcctgcaaacccatgcaaaccaggaacgcctgaacgggcgacgtgttgcacaactggcacggccacttattatcccctagcacaattgcactgacaattgcgagaaaccatacacgagaattcctttgagccatgctgcaaacaggctgagacaattcattcggttcactctgggaaaacttggaccgtccttgcaaagaacgcctacagaggaaccccctcatgccaacacacaaacaacagggttaagccacacacacccgccaacttatggcgcacaacagcaccacaataaagacataaagaccaaagctctcagacc

SEQ ID NO: 642233 - DNA, 3454 bp, Homo sapiens
  misc_feature (1534)..(1534): n is a, c, g, or t
  misc_feature (1672)..(1672): n is a, c, g, or t
ggtcggtcctcacgccatgtcacaaccccacctacttctcaaggcgcctcgtgcgcttctctgacctctacatggcctccctcagctgcctgctcaactaccgcgtggacttcaccttctacccacgccgtacgccgctgcagcacgaggcacccctctggatggaccagctctgcaccggctgcatgaagacccccttccttggtgacatggcccacatccgctgagggcacctttattgtctgggacaggccctcagcccctcctgccccatccacccagacaagcaataaaagtggtctcctcccttggtgacatggcccacatccgctgagggcacctttattgtctgggacaggccctcagcccctcctgccccatccacccagacaagcaataaaagtggtctcctccctgtgcatgcttctgctttcagccccagcctcgtcacttgactgtgaggatcctctgggtgtcagggaagtcctcctccagcagtgagtcatcgaagggttcacaaaaggtgtcgctgccaaagacagggttggggacagagaccagggtggggttggtcccttcttgccacggtgagaagtcgtcatcagcatcatcttccgcctggaaggcagagaagccaaagcccatgggcttgcctcgggcacggaggtagagagctccggccaccaagccaagcagtgctccagcggcaagcacagcccccacgcctgccgccacaggtggggcttcaggcgccagcactgcctggggctgtgggggtgccaggagggggctggccagagcatggatgatgccattgaaggccatgatgtcccacacaatgatacggctaaccacaactgtccctggggccacaggggcccaggaactgttgtcagggcctgcgtcactgatgatgaggctgaggcctgagtgggccggaagcaacttcccctggctggcgttggcacttaggagggtggcgttggaggcatgcagctccaagtctgggccactcagcgtcatgttgtccacaaagccttcattgacagggacgaagagtgtcttatacgtgagctcatcatccaggaagtccaggaagtcgagaccccgctgggtggcattggcatagcccaatagcatcccatagaaggtggagaagttggcagtggcagccagcacatccagcagcttcccattgcacgtgctgatcccgtcacccacgaagccatttcggcatcggcaggccacatcttgcacacggaagcagtaggcatcccagcgttctgagaggttcttgcgggcacccaggctgactatgcccacccgaccattgccacagtccgccacagggaaaaccacagggtgggcagtggagccattggccagccagcccatgaggcacaggtggaagcccagctgctgggcagcagagagctgagggaatgaagcaaggacggctccctgtgcttcgcatgccgcctcagcctccgaaaagttcagaccataagggccgctggtggcctggaggtggaanacgccagcccgtttctcctggaagtgcaggtcagtgcacatggcatctgagtgcaagggcggtggctggcccaagcagcggtccacaggtggttccgactcctccagacactgcagtccatcgcctacgtagcctgcntggcactcacagcgccgtgtgttcaggccggtgctcaagcagttggcgtgctcgctgcagcccccgcggtggccatctgtgcaggggttgcgggcccggcagctccagccatcaccctcgtagtcgggcaggcaggtacaagtgaccattgttcctacctggctacagttggcgtgctcactgcagccaccatgcccgtcctggcacaggtctgccactgtacacacgcggccatccccttcatagcccaggctgcactcacagctgttgcctgcacggcacacagcctcgggtgcacagggtggggtacacacaggctgcagctccagttgcacctcacagcgtggcccagtccagccttcatcacagaagcaggagccagagcccccaaggccctcatcacagcggccatgcacagtgcagcggcaggcttgacaatggggcccaaaggcaccaggagcacagagttcacaggctgtcccagcaaaacctgaacggcacagacactgcccactgccactcatgccgtccatgcacacgccacggtcactacaagggctgctgggccgccagggcaagcttgcactcactgccatagtgaccagggcagcagctgggcttccaggtggtggtgacacaattgcggtggcagcccctgcccaggccttggggcctaccccaaaggctggggtggacccagacgctgcgtaatcccaaagagtgcagcggaggggacgtccagaacttcgggtagaagcgccagcaggcctcagggctgccctgctcctgtgacccctcaggacagggtggctccagcccacagatgctgcaggtgttcagtcgcaggggccgggtctcaaagtggtcacagcgagcaccaaggccaggtggctccagcagctggtcgatgccataggccaggccaccctcaaagggcaagtgccgctgcacaatgcgagcatcatcctcacccaccatgagctcaccgggccgcgttcggctgcaggagaaagagatgggggtcccatgcatggttcgaagtgggcccaggttgggcaggtcagatgccaaggcctcgacattgcgaatcatgtggccccgcagaatggctgctagcttgtcacggtggtcctcatggtacagccaggcctggcgatccggaggcagagctcgaaaggcggcgtctgtgggccacagcattgtgaagggcctatgggatgcctctcgaagcaggggcaggaggccggccaccttcaggaggccgctgaagatcttgtaaccgaagccctgggcggcggcggtgacatttctcctcgggatgggagcatcatcaggctcccagtgcagcgcctcggggggcagcaggacacggtcaatgaagtgcaggatgccgttcacggcctcatggtcgctgctcaccacgcgcgcgaagtcattgaggtatatgctgccctccctctcgctgaagcgcagtgggtgccctgagagggccgtggcgtacccctgctccagcaggtcctcgctccgcagccgccgacagccaaccacgtggtagcgaaacaccagctggcgatgcgcacgaatccgggccagctcatcctgcgacaggttgctcattagatctgcgtgcggcacgaagatggtgaaaggcccatcgcccttgagctccttatattccaggaggcggaggctgaagaatgaggcatgcttatccctcaggagctccaggccgactcgggcacggcaggtgagccgtcccccacgtgtgggctggttacagtc

SEQ ID NO: 642234 - DNA, 3451 bp, Homo sapiens
  misc_feature (1531)..(1531): n is a, c, g, or t
  misc_feature (1669)..(1669): n is a, c, g, or t
ggtagttgagcaggcagctgaagggaggccatgtagaggtcagagaagcgcacgaggcccttgagaagtaggtggggttgtggaaggtgcggaagatgctgccgaactgcgcattgaacagggccttggtgatgcacctcagctcctgccgctctttcatccaggcagccagcaccggctgcatgaagacccccttccttggtgacatggcccacatccgctgagggcacctttattgtctgggacaggccctcagcccctcctgccccatccacccagacaagcaataaaagtggtctcctcccttggtgacatggcccacatccgctgagggcacctttattgtctgggacaggccctcagcccctcctgccccatccacccagacaagcaataaaagtggtctcctccctgtgcatgcttctgctttcagccccagcctcgtcacttgactgtgaggatcctctgggtgtcagggaagtcctcctccagcagtgagtcatcgaagggttcacaaaaggtgtcgctgccaaagacagggttggggacagagaccagggtggggttggtcccttcttgccacggtgagaagtcgtcatcagcatcatcttccgcctggaaggcagagaagccaaagcccatgggcttgcctcgggcacggaggtagagagctccggccaccaagccaagcagtgctccagcggcaagcacagcccccacgcctgccgccacaggtggggcttcaggcgccagcactgcctggggctgtgggggtgccaggagggggctggccagagcatggatgatgccattgaaggccatgatgtcccacacaatgatacggctaaccacaactgtccctggggccacaggggcccaggaactgttgtcagggcctgcgtcactgatgatgaggctgaggcctgagtgggccggaagcaacttcccctggctggcgttggcacttaggagggtggcgttggaggcatgcagctccaagtctgggccactcagcgtcatgttgtccacaaagccttcattgacagggacgaagagtgtcttatacgtgagctcatcatccaggaagtccaggaagtcgagaccccgctgggtggcattggcatagcccaatagcatcccatagaaggtggagaagttggcagtggcagccagcacatccagcagcttcccattgcacgtgctgatcccgtcacccacgaagccatttcggcatcggcaggccacatcttgcacacggaagcagtaggcatcccagcgttctgagaggttcttgcgggcacccaggctgactatgcccacccgaccattgccacagtccgccacagggaaaaccacagggtgggcagtggagccattggccagccagcccatgaggcacaggtggaagcccagctgctgggcagcagagagctgagggaatgaagcaaggacggctccctgtgcttcgcatgccgcctcagcctccgaaaagttcagaccataagggccgctggtggcctggaggtggaanacgccagcccgtttctcctggaagtgcaggtcagtgcacatggcatctgagtgcaagggcggtggctggcccaagcagcggtccacaggtggttccgactcctccagacactgcagtccatcgcctacgtagcctgcntggcactcacagcgccgtgtgttcaggccggtgctcaagcagttggcgtgctcgctgcagcccccgcggtggccatctgtgcaggggttgcgggcccggcagctccagccatcaccctcgtagtcgggcaggcaggtacaagtgaccattgttcctacctggctacagttggcgtgctcactgcagccaccatgcccgtcctggcacaggtctgccactgtacacacgcggccatccccttcatagcccaggctgcactcacagctgttgcctgcacggcacacagcctcgggtgcacagggtggggtacacacaggctgcagctccagttgcacctcacagcgtggcccagtccagccttcatcacagaagcaggagccagagcccccaaggccctcatcacagcggccatgcacagtgcagcggcaggcttgacaatggggcccaaaggcaccaggagcacagagttcacaggctgtcccagcaaaacctgaacggcacagacactgcccactgccactcatgccgtccatgcacacgccacggtcactacaagggctgctgggccgccagggcaagcttgcactcactgccatagtgaccagggcagcagctgggcttccaggtggtggtgacacaattgcggtggcagcccctgcccaggccttggggcctaccccaaaggctggggtggacccagacgctgcgtaatcccaaagagtgcagcggaggggacgtccagaacttcgggtagaagcgccagcaggcctcagggctgccctgctcctgtgacccctcaggacagggtggctccagcccacagatgctgcaggtgttcagtcgcaggggccgggtctcaaagtggtcacagcgagcaccaaggccaggtggctccagcagctggtcgatgccataggccaggccaccctcaaagggcaagtgccgctgcacaatgcgagcatcatcctcacccaccatgagctcaccgggccgcgttcggctgcaggagaaagagatgggggtcccatgcatggttcgaagtgggcccaggttgggcaggtcagatgccaaggcctcgacattgcgaatcatgtggccccgcagaatggctgctagcttgtcacggtggtcctcatggtacagccaggcctggcgatccggaggcagagctcgaaaggcggcgtctgtgggccacagcattgtgaagggcctatgggatgcctctcgaagcaggggcaggaggccggccaccttcaggaggccgctgaagatcttgtaaccgaagccctgggcggcggcggtgacatttctcctcgggatgggagcatcatcaggctcccagtgcagcgcctcggggggcagcaggacacggtcaatgaagtgcaggatgccgttcacggcctcatggtcgctgctcaccacgcgcgcgaagtcattgaggtatatgctgccctccctctcgctgaagcgcagtgggtgccctgagagggccgtggcgtacccctgctccagcaggtcctcgctccgcagccgccgacagccaaccacgtggtagcgaaacaccagctggcgatgcgcacgaatccgggccagctcatcctgcgacaggttgctcattagatctgcgtgcggcacgaagatggtgaaaggcccatcgcccttgagctccttatattccaggaggcggaggctgaagaatgaggcatgcttatccctcaggagctccaggccgactcgggcacggcaggtgagccgtcccccacgtgtgggctggttacagtc

SEQ ID NO: 642235 - DNA, 675 bp, Homo sapiens
cggccaagaaatcccccaacacaaaccggtcgaagttaagaggggatctactttatccattggcaagttgacaagcggctgtagagcatacttaggtatcaggggtggcattgatgtgcctaaatacttgggctcttattctactttcactctaggaaatgtcggtggatacaatggaagggtgctaaaacttggagacgtactattcttaccaagcaatgaagaaaataaatcagttgagtgccttccacagaatattcctcaatcattaattcctcaaatttccgaaactaaggaatggagaattggtgtaacatgtggtccccatgggtctccagatttttttaaacctgagtccatcgaagaatttttcagtgagaagtggaaggttcattacaactccaatagatttggtgtccgtttgattggacctaaacctaagtgggcaagaagtaatggtggtgaaggtggtatgcatccttcaaacactcacgattacgtttattctctgggtgcaattaatttcacgggtgatgagccagttattattacttgcgatggtccttccttaggtggttttgtgtgtcaagctgttgtcccagaagcagaactgggaaggtggacaggttaaacccgggactccattcagtttggccactttcttacgaaagctcg

SEQ ID NO: 642236 - DNA, 903 bp, Homo sapiens
ctctcgtggtgcggctccttgcctcggtatccgtgtggtctcgcccgcgttgggttccccatcgttaggcccctttggtggcgtccacgggccctagtgtgctttggccctgggcccggaaaccaaaggtttgggagtcccttctttcccgttggccggccaacacttgtagtgctcccccaatttgggtgcccccgacgccccacagtgccgttcgtctccccgcctgtcgtgggcccccccgcgctatttgcaccatggccgtggggcgccagctcgaggacattagttttgggggagacctggcccgacgtctccccccccccttggggcccgagccccttcaaccggtgggggccgccccccaaccagagattaaaaatgtctgccgccccgcgcgtggcgaacacaaaaatgggggccccctggaccacctctggagtgtcataagggccccccactgaagcgccgtgagataggggggggcggcaaccccgcggagacgccccgaacatcttgggaggcgcccccaccgggccaaaggaaccgcgctaaccacccacacggagagatttcatcaagccgcccgccgctggccacaatataggcagaacctcgctttgtcccccggcatgcttgaatgattactcgggcacctggcatagacttcctcatagtgcccgtttctgctcccgcggtgtaggtcgggcggggtcccctttaggcccccggcaatgtctgccccgcgtctctccggtcttgggggcccgttgtcgctgtcttccccgattgtcatcatatccgctgcgcgagatcgttgcacgccccgggcggcttctgttcctcccccccttttgcttgccccgggcccccaaagggagtcctctttccccaacaaaaaca

SEQ ID NO: 642237 - DNA, 868 bp, Homo sapiens
cagcttggttccactggagacagtgttggacatgctccgggatgccatggtggccaaagtcaatacttccaaaggcttcctgattgatggctacccgcgggagtgtgcatgcaatggagaagagttttgagcgactggatttgtgacatgcccacacttgctgctgtatgttggactgcaggcccttgagaccatgaaccagctggctcttgaaactgttgatgaggaccaagctggtgctgtgttgacgacacatgaggagaccatcaaaaagcggctggatgacctattacaagggcacagaaaccgtcatctgccttctatgagaaactggtgggcgtttgttgcgcacaggtcaacgctgagggctccgtggacagttggcttcttcccagggtcttgtaccacactggaatgccctaaagtaagcaactgctggatgccgcgtttccccagggtacagagcgcccgggccacacccgtagctgattaagaagggttcctccattgggtcccacgaaagctgcaggagaacgttaccaaaccctatagcctgtcgttgttcacctgactacatagtagacgccgagtatactggttttttcaagtgagatgcttagcactaataaggacgttctacagagggcgttttggtttacaaaggttaatctccttggtaccacgatgagagtaagatcaatgttgatattggctaccttgccgcgaagtacgcaaacccaccaaacctcctagtaatcataagaccaccttttgaagcaaccgtctatatcactgttgtgatggccgggaccatacactaaacaggaaatctgctagaaactggagcagatgaggcatacagggggcg

SEQ ID NO: 642238 - DNA, 233 bp, Homo sapiens
gagtagctgtcatcactaatgccttgggaattgtggtcacagaccaaatttccgcaagcttcgctttttatgcattaccgctgtcaggtcagaacccctcgtgcacatgatacagcgggtgtaatgaatgtttgtttgatccagactgcggggactgtgacaagatgaacaaatcaactgtcattgaatcgtcttgtgtgtcagtgaattaagggttctgcaattgaggatga

SEQ ID NO: 642239 - DNA, 942 bp, Homo sapiens
  misc_feature (1)..(1): n is a, c, g, or t
  misc_feature (66)..(66): n is a, c, g, or t
  misc_feature (340)..(341): n is a, c, g, or t
  misc_feature (344)..(346): n is a, c, g, or t
  misc_feature (354)..(354): n is a, c, g, or t
  misc_feature (358)..(358): n is a, c, g, or t
  misc_feature (382)..(382): n is a, c, g, or t
  misc_feature (386)..(386): n is a, c, g, or t
  misc_feature (397)..(397): n is a, c, g, or t
  misc_feature (400)..(400): n is a, c, g, or t
  misc_feature (409)..(409): n is a, c, g, or t
  misc_feature (411)..(412): n is a, c, g, or t
  misc_feature (416)..(416): n is a, c, g, or t
  misc_feature (434)..(434): n is a, c, g, or t
  misc_feature (437)..(437): n is a, c, g, or t
  misc_feature (439)..(439): n is a, c, g, or t
  misc_feature (444)..(446): n is a, c, g, or t
  misc_feature (451)..(451): n is a, c, g, or t
  misc_feature (453)..(453): n is a, c, g, or t
  misc_feature (456)..(457): n is a, c, g, or t
  misc_feature (462)..(462): n is a, c, g, or t
  misc_feature (469)..(469): n is a, c, g, or t
  misc_feature (471)..(471): n is a, c, g, or t
  misc_feature (474)..(474): n is a, c, g, or t
  misc_feature (479)..(479): n is a, c, g, or t
  misc_feature (481)..(481): n is a, c, g, or t
  misc_feature (492)..(492): n is a, c, g, or t
  misc_feature (503)..(503): n is a, c, g, or t
  misc_feature (506)..(506): n is a, c, g, or t
  misc_feature (511)..(511): n is a, c, g, or t
  misc_feature (529)..(529): n is a, c, g, or t
  misc_feature (545)..(545): n is a, c, g, or t
  misc_feature (555)..(555): n is a, c, g, or t
  misc_feature (579)..(579): n is a, c, g, or t
  misc_feature (594)..(594): n is a, c, g, or t
  misc_feature (601)..(601): n is a, c, g, or t
  misc_feature (610)..(610): n is a, c, g, or t
  misc_feature (614)..(614): n is a, c, g, or t
  misc_feature (621)..(621): n is a, c, g, or t
  misc_feature (649)..(649): n is a, c, g, or t
  misc_feature (788)..(788): n is a, c, g, or t
  misc_feature (842)..(842): n is a, c, g, or t
natttaaataaagcaactttctaccttattaaaagattcttcacctcctaaatagaaactgaaggngaagcaatgctattaaggatcatacataagctaatagaggcagcagaattatctattaacattttcctaacactattctagtgaccttaacattttaatcacagagctgcagctgtttgcatgtgttctaaagctagcataatctttaagacagtcaggaaaaaaaaccttcaaaacaaattacataatattctatctagaaaaatttccaggaaagcacattcttgggtgaaagaaaaccacccctttgtcattgtgatgcactaaaaaaaannatnnnagcctganagtntggctccgggctctcccacttgtntggntcgggctcggntcnctgtgaacngnnattntcctcccttttcgcaggnttntnttggnnntttgntnggnnttggnggggggngnctngcagntngttaaacctgntttagatatcnctnatttntttttttcctagatgccnactgatacatcatatntttttttttnttggttgtgcttttgtgttttttntcaaaggcaatttanatttttncttcgggtnagcnatgcacntttttattaatcatatttattctacttncattgcttggttgttgtttattaatacttaaatcacagtagacacacaaaaagagatgtttctcaacttatcatagggttacatcccaataaacctactatcagttgaaaatattgtaaattgaaaatgctagcctgtnttaaatatgctcagaacacttacagtagcctactgtttagcaaaattatctaanacgaagcccgttttataataaagtgttgaatttctgatgtaatttattgatgttctactgaatatgtatggcattggcactatggaaaagtcctaattgg

SEQ ID NO: 642240 - DNA, 464 bp, Homo sapiens
gtcctttgcaaccaatagttgacgtgatcatgatgagcctgcgcttggaggtataattaagctgtggataagagtataacgtattcggcctaccacgtgcgtgtgaggcctgctatgggtataactgggtaattcagtggggcggggcctattgattataaaaatatcggtaggcggagcgtagggcagattggatggcatgataccggcgattgctaaactgctagtgcttattgccgtgattatgcatacgatacggcaagctgtcaacgttgcggtaaatactttcaactacgctgctgtaattggccgtctaattatacaccccgttactacacatattacaacactttcgtctgccgggtacaacgggcatatctactatttggctggacccataacttcggtgctaactgacagtaatataggtactatatattatacaatagttatgctgccgcatg

SEQ ID NO: 642241 - DNA, 207 bp, Homo sapiens
atgtgtgacgtgattagaggatcccggtgtgtcatgcaggtgagcaccaattcattccggtgtcgttccagagaatctgttaacaaatagaatggttgtggtgttgcatgtgtctgtgtcaatatgtgccgggtgtgttcatgtgtgtagtgtgcaggtatgtgtagtgtgcgtgtgtgggtgtctgcatatgtgtgtatgcatgtg

SEQ ID NO: 642242 - DNA, 119 bp, Homo sapiens
tttctaatgaggaagaagaaaagaaggatggtgacaagaagaagaagaagaagattaaggatacgtacatcgatcaagacgagctcaacaaaacaaagcccatctggaccagaaatccc

SEQ ID NO: 642243 - DNA, 82 bp, Homo sapiens
ctgcccccattgcgtctgcacacccctgcgtgtaactgcattccaaccactaataaagtgcctattgtacaggtcaaaaata

SEQ ID NO: 642244 - DNA, 391 bp, Homo sapiens
tgtggtggctcatgcctgtaatcctagcactttgagacgccgaggtgggcagatcacgaggtcagaagatcaagaccatcctggctaaagtggtgaaaccccatctccactaaaaatacaaaaaaattagctgggcgtggtggcgggcacctatagtcccagctactcgagaggctgaggcaggagaattgcttgaacccgggaggcagacgttgcagtgagccaagatcgcaccattgcactccagcctgggcgagacagtgagactccgtctcaaaaaaaaaaaaatacatctaccaacagatgaatggagaaaacgcactgctatatctatacgacagaatattaactacaggtgcagacagcaacatggataagtcttactgccgcg

SEQ ID NO: 642245 - DNA, 421 bp, Homo sapiens
aagtgatcgagctcggtaccgcatcgaagcatcttgcaaatttcttaatgtgtagctgaatgtttaatatttgaaatacaaaaaaaaaaaaaaagggaaaaatttgtcagggggcccaatgattttttcccctggaacaattttggtagggtcgccgggattaatcagaaggtggcccaggggacttggattcgattgatggattcagctgagtgcccctcagttgggagtaacccttgccatagcagatggacttttggcgcagggatttgccatttattgttattgggtgctaagtacattttttatgggatgataaatatctctctgagaagttttgggctgggttccatggctagtgccatagctcttaactatgctacagtgatatattttggagtggtgtgaggtactttaagct

SEQ ID NO: 642246 - DNA, 1641 bp, Homo sapiens
  misc_feature (288)..(288): n is a, c, g, or t
  misc_feature (716)..(716): n is a, c, g, or t
  misc_feature (837)..(837): n is a, c, g, or t
  misc_feature (1428)..(1428): n is a, c, g, or t
ctaattatgtggttgtcttgtcactcgtgtgcctcccgcaatcttgttgacactcggttggtgtctatcacacaaccacgacgcgggatatggggggggcatacaaccagtgtggaggccccagccagttcataccacacgttgttatcaccccggggtaagtgttaataattctacggtgctctagaatagtgtcccccccattggaagtcactttttttggagagtgaaaaggcgtttcttcttccctctgggggggacccaaatatgttggtgggccttctacanacattgagttacaacacggacaaattgttggttcccttggttctcaaaagcgagaaattgttcttctctcgtatcctgtgagtggcgcacagagacacacgatgaggtctcgtcgggggtggaacccaagcgccccacaaaaagaaggtggagcacccctccccgcccccgcagtggggtgataggaacaaagacgcttgggcgctattagacaaaccactgggctctaaccaaagagggtggagtataaaaatgtccccgtggagacgccgcatatgctccacgggcccccaagaattataacggtcgcccccggcgccttaaataggcccccccccccgtctgatttttggggaatttttggcccgaaaaacaaccgggggctttcaaaccacatgtggggcaacaagagccacaagatgtttttngctcgttcggaagaccttgtgtataaggcggagaaaaaaggagattgttggtattttcccccccgcctgttgtcgcgggggtgtaaaaaaaaaagagcttgggggaaaagaagatgtgggnggcccgcctctagaaaattagtgtctcgttggagaaattttctctggcgtgaagtattaacgcctgcgggccgcactactacgtggtgggataatataggggttgtttcccctccggggcaaaaagcggcacactaacggtgggtgtgtttcggaggaaagccttttcttctcacagagactttattatcccacacctcctctgtggggtgccgcctcttttgggactctgtgttccgtgagaaatataggtagaggacacacagagcacacgctttgccgcggtgggggtgtcgtgtcaatctcacaaaaagcgcacagtgggggacacacacagagaggggcctgcgctgcgggagagctcgcgcgcaaaagggtgtcacacacacacgtgtctcggcccacgagaaagggtctcacaagaagggctatatatgagatatttaatcctctaaataaccctcgccacaccccacacttcttaaatccacgtgtggtggggagaagaaccgcgttctctcacgagaactcgtttggtgtttcacacttgggccactcttaaagtgttatagtgaagtaaaaagagactggnttaaatgagtaaccacaatgcactcgtgtaaaccctctcacgaaggagaaaggaggaaatgttttgtggagccacactcttggttttcttttttgcgctgtggcacgttttaaggttaattagctttttaaaatcagtactttttaatgggaacaacttgacccaaaatttgtcacagaattttgagacccccttataaaaagttaaatgaga

SEQ ID NO: 642247 - DNA, 952 bp, Homo sapiens
gtcctcattgtaaccattctaatcgcaatgtacttgcctaatgcttatccgaactgaagataattctaggctatatacaactacgcaaaggccccaacgttgtaggcccctaccgggctactacaacccttcggctgatcgccaataaaatctccttcatcaaagagcccctaaaagccgccacatctaccatcaccctctagatcaccggcccgagtcgttagctcttgcgacctatccgctcgttctcctcatagatacccccctcgtccccaatctcggcatacccccccttggtggatgtcttcagatgttatgtgtctcccttacttctcatgctcatcgtagttcgtaggctgatccgtttaacgtgcgtgtcctctgcactctatgggcttgcatgctatctcttgcaagctagatccgtgttgtggtgctattgtggtctatttgcctttgtcttccatcctttgtgtacatgtcaactcataggctaatgcaaatcattacatagtacatactgtctcagctaattaaatatcggacatccttataaacctacgtgcgcgagcgcgcttgatccacaaaacataatgaaacagccgtgcgtgacttacgtcctggccatcactgaacccttggtccgatacataatggagtttactcctcccagcagctagcagatgaccaaagcgaagcccctccgtcgaccttgccgaaagggggagtccgaagcttaatcttcgggcttcaggcaatacgaatacgcacgggaagcccccatttcgccgctaattcgttccattagccgggataaaacaaaacctttattattaattaaaagcctcaaggaataaaatataatccttaggaaggaattaatgggggacacctcccctggaatttgaggcagatataaagttcggagaccgattttacttcccgtttttga

SEQ ID NO: 642248 - DNA, 154 bp, Homo sapiens
cagcggtctgtaggacaggaaggcaaacagattttctcttgaatgtgaagtccaatcacttggtggtgtctgcaaggattgctgttttgatagaagtgtttgatggaaaattcaggatgggcaggaatgagtattgtgatggtttaatcatgtc

SEQ ID NO: 642249 - DNA, 3318 bp, Homo sapiens
  misc_feature (1398)..(1398): n is a, c, g, or t
  misc_feature (1536)..(1536): n is a, c, g, or t
gcggccgcctactactactactactgctcgaattcaagcttctaacgatgtacggggacatggccctggtgacatggcccacatccgctgagggcacctttattgtctgggacaggccctcagcccctcctgccccatccacccagacaagcaataaaagtggtctcctcccttggtgacatggcccacatccgctgagggcacctttattgtctgggacaggccctcagcccctcctgccccatccacccagacaagcaataaaagtggtctcctccctgtgcatgcttctgctttcagccccagcctcgtcacttgactgtgaggatcctctgggtgtcagggaagtcctcctccagcagtgagtcatcgaagggttcacaaaaggtgtcgctgccaaagacagggttggggacagagaccagggtggggttggtcccttcttgccacggtgagaagtcgtcatcagcatcatcttccgcctggaaggcagagaagccaaagcccatgggcttgcctcgggcacggaggtagagagctccggccaccaagccaagcagtgctccagcggcaagcacagcccccacgcctgccgccacaggtggggcttcaggcgccagcactgcctggggctgtgggggtgccaggagggggctggccagagcatggatgatgccattgaaggccatgatgtcccacacaatgatacggctaaccacaactgtccctggggccacaggggcccaggaactgttgtcagggcctgcgtcactgatgatgaggctgaggcctgagtgggccggaagcaacttcccctggctggcgttggcacttaggagggtggcgttggaggcatgcagctccaagtctgggccactcagcgtcatgttgtccacaaagccttcattgacagggacgaagagtgtcttatacgtgagctcatcatccaggaagtccaggaagtcgagaccccgctgggtggcattggcatagcccaatagcatcccatagaaggtggagaagttggcagtggcagccagcacatccagcagcttcccattgcacgtgctgatcccgtcacccacgaagccatttcggcatcggcaggccacatcttgcacacggaagcagtaggcatcccagcgttctgagaggttcttgcgggcacccaggctgactatgcccacccgaccattgccacagtccgccacagggaaaaccacagggtgggcagtggagccattggccagccagcccatgaggcacaggtggaagcccagctgctgggcagcagagagctgagggaatgaagcaaggacggctccctgtgcttcgcatgccgcctcagcctccgaaaagttcagaccataagggccgctggtggcctggaggtggaanacgccagcccgtttctcctggaagtgcaggtcagtgcacatggcatctgagtgcaagggcggtggctggcccaagcagcggtccacaggtggttccgactcctccagacactgcagtccatcgcctacgtagcctgcntggcactcacagcgccgtgtgttcaggccggtgctcaagcagttggcgtgctcgctgcagcccccgcggtggccatctgtgcaggggttgcgggcccggcagctccagccatcaccctcgtagtcgggcaggcaggtacaagtgaccattgttcctacctggctacagttggcgtgctcactgcagccaccatgcccgtcctggcacaggtctgccactgtacacacgcggccatccccttcatagcccaggctgcactcacagctgttgcctgcacggcacacagcctcgggtgcacagggtggggtacacacaggctgcagctccagttgcacctcacagcgtggcccagtccagccttcatcacagaagcaggagccagagcccccaaggccctcatcacagcggccatgcacagtgcagcggcaggcttgacaatggggcccaaaggcaccaggagcacagagttcacaggctgtcccagcaaaacctgaacggcacagacactgcccactgccactcatgccgtccatgcacacgccacggtcactacaagggctgctgggccgccagggcaagcttgcactcactgccatagtgaccagggcagcagctgggcttccaggtggtggtgacacaattgcggtggcagcccctgcccaggccttggggcctaccccaaaggctggggtggacccagacgctgcgtaatcccaaagagtgcagcggaggggacgtccagaacttcgggtagaagcgccagcaggcctcagggctgccctgctcctgtgacccctcaggacagggtggctccagcccacagatgctgcaggtgttcagtcgcaggggccgggtctcaaagtggtcacagcgagcaccaaggccaggtggctccagcagctggtcgatgccataggccaggccaccctcaaagggcaagtgccgctgcacaatgcgagcatcatcctcacccaccatgagctcaccgggccgcgttcggctgcaggagaaagagatgggggtcccatgcatggttcgaagtgggcccaggttgggcaggtcagatgccaaggcctcgacattgcgaatcatgtggccccgcagaatggctgctagcttgtcacggtggtcctcatggtacagccaggcctggcgatccggaggcagagctcgaaaggcggcgtctgtgggccacagcattgtgaagggcctatgggatgcctctcgaagcaggggcaggaggccggccaccttcaggaggccgctgaagatcttgtaaccgaagccctgggcggcggcggtgacatttctcctcgggatgggagcatcatcaggctcccagtgcagcgcctcggggggcagcaggacacggtcaatgaagtgcaggatgccgttcacggcctcatggtcgctgctcaccacgcgcgcgaagtcattgaggtatatgctgccctccctctcgctgaagcgcagtgggtgccctgagagggccgtggcgtacccctgctccagcaggtcctcgctccgcagccgccgacagccaaccacgtggtagcgaaacaccagctggcgatgcgcacgaatccgggccagctcatcctgcgacaggttgctcattagatctgcgtgcggcacgaagatggtgaaaggcccatcgcccttgagctccttatattccaggaggcggaggctgaagaatgaggcatgcttatccctcaggagctccaggccgactcgggcacggcaggtgagccgtcccccacgtgtgggctggttacagtc

SEQ ID NO: 642250 - DNA, 805 bp, Homo sapiens
  misc_feature (2)..(2): n is a, c, g, or t
  misc_feature (62)..(62): n is a, c, g, or t
  misc_feature (129)..(129): n is a, c, g, or t
  misc_feature (166)..(166): n is a, c, g, or t
  misc_feature (284)..(284): n is a, c, g, or t
  misc_feature (319)..(319): n is a, c, g, or t
  misc_feature (324)..(324): n is a, c, g, or t
  misc_feature (336)..(336): n is a, c, g, or t
  misc_feature (417)..(417): n is a, c, g, or t
  misc_feature (419)..(419): n is a, c, g, or t
  misc_feature (443)..(443): n is a, c, g, or t
  misc_feature (534)..(534): n is a, c, g, or t
  misc_feature (556)..(556): n is a, c, g, or t
  misc_feature (726)..(726): n is a, c, g, or t
  misc_feature (743)..(743): n is a, c, g, or t
  misc_feature (804)..(804): n is a, c, g, or t
gntgtttttgtctgtaaagtgcagttgcttatttcgtctttgtctcttttcctctttgtaantatatgtcttcataccttaattatagctgtttacaaaccttttttttgttttttttctaattctatnagcgaggactgggaggtgaaagaagcgtagggatttncatgttaatagtaaaaaaaaattattttgtaacaaaaaaaatggttttgtttgttgttctcacatcttattgcttaaaaaaaccacattttttcataaaattaataataacttatttnagaagacttggaagaagcatataggcacaaaagtnaaaanaaaatgccattntaatcccaacaaccagaatagttgatgttagtacggtggaggaggcttttccagtctttttcttttttcaacatatatatntngaaatatggggtgcaaagaaaaanacctacatttacacacgtgtgctgtgagcactgaaggtccttctgccttttaaggatacgatcatctcaaggaagactttttttttttctnagacattcctaacaggctcatnaagttgaataatgatcactaatcacccctataccaggacatgctaggaagaagagagcctcaaaatatcctaattcatcttcacagagcaagtcggatattgagaatttgctggctgctcaagggattgtgtgtggggctcggaagatggctcagtggctaagagcacanactgctctccctgaggntctcaattcccagcacctacaccagacagctgataatggccagtaaccccggctccaaaang

SEQ ID NO: 642251 - DNA, 940 bp, Homo sapiens
gagtgcgaagggacgcggtgcgcatgcgcgtgagggctgccgggccaggcccagacatgtccgtccttgtaagtcaaaagcttccatgggagccttccttcctaatcaagatgcaaataatagtggcatccgaaacgagacattaaaaacaggttctcatcttcaaagaccccagtgctgtggtttcacagttatgagaccatcagattgcttggggggaacaccggtaaatgcaatggaaacgcctttccagccagccaagtgattctcttgtggaccccataaccctggatattctccatcagattgggatcacctcccacctttggagggctccccaaagatttggaacacggttctccgggggactcctttaccaggaaaaggaacacccttctccaaaaacaacggcaggcattttatattattaccaggtccactggggctctcatagggaaaccaccaggaattactccggtgaacgcactattcttaaacggtgggttcacgggagatacggaaaaagccataattccaatggctggagagttaaaactcctaagaaccagtccctgtttctggtacacaaggattgttcctttagacgccagtggggacaccacagccacaactacacattcattgcgggcaacttcgtggaggtcttgaaaagaagcacctgaagatgcctctgggtggtggattacatgtttgatcttaccaagacagtgggatttgttttgggaaggcttgaagatgggggggatatcagttgcaggcttgacggatataaacgagccataaggaagggaggctcagaaatttggtgcatacttggaaataatattcaaaacgtgctacatgcctaataaagtgtgcattggtgcggggggagtaaggcacgaagggccacatttaggggataaagggttcccctgag

SEQ ID NO: 642252 - DNA, 3257 bp, Homo sapiens
  misc_feature (1337)..(1337): n is a, c, g, or t
  misc_feature (1475)..(1475): n is a, c, g, or t
gcggccgcctactactactactactgctcgaattcaagcttctaacgatgtacggggacatggccctggctgccagatgcccacagcaccctggcatgaagacccccttccttggtgacatggcccacatccgctgagggcacctttattgtctgggacaggccctcagcccctcctgccccatccacccagacaagcaataaaagtggtctcctccctgtgcatgcttctgctttcagccccagcctcgtcacttgactgtgaggatcctctgggtgtcagggaagtcctcctccagcagtgagtcatcgaagggttcacaaaaggtgtcgctgccaaagacagggttggggacagagaccagggtggggttggtcccttcttgccacggtgagaagtcgtcatcagcatcatcttccgcctggaaggcagagaagccaaagcccatgggcttgcctcgggcacggaggtagagagctccggccaccaagccaagcagtgctccagcggcaagcacagcccccacgcctgccgccacaggtggggcttcaggcgccagcactgcctggggctgtgggggtgccaggagggggctggccagagcatggatgatgccattgaaggccatgatgtcccacacaatgatacggctaaccacaactgtccctggggccacaggggcccaggaactgttgtcagggcctgcgtcactgatgatgaggctgaggcctgagtgggccggaagcaacttcccctggctggcgttggcacttaggagggtggcgttggaggcatgcagctccaagtctgggccactcagcgtcatgttgtccacaaagccttcattgacagggacgaagagtgtcttatacgtgagctcatcatccaggaagtccaggaagtcgagaccccgctgggtggcattggcatagcccaatagcatcccatagaaggtggagaagttggcagtggcagccagcacatccagcagcttcccattgcacgtgctgatcccgtcacccacgaagccatttcggcatcggcaggccacatcttgcacacggaagcagtaggcatcccagcgttctgagaggttcttgcgggcacccaggctgactatgcccacccgaccattgccacagtccgccacagggaaaaccacagggtgggcagtggagccattggccagccagcccatgaggcacaggtggaagcccagctgctgggcagcagagagctgagggaatgaagcaaggacggctccctgtgcttcgcatgccgcctcagcctccgaaaagttcagaccataagggccgctggtggcctggaggtggaanacgccagcccgtttctcctggaagtgcaggtcagtgcacatggcatctgagtgcaagggcggtggctggcccaagcagcggtccacaggtggttccgactcctccagacactgcagtccatcgcctacgtagcctgcntggcactcacagcgccgtgtgttcaggccggtgctcaagcagttggcgtgctcgctgcagcccccgcggtggccatctgtgcaggggttgcgggcccggcagctccagccatcaccctcgtagtcgggcaggcaggtacaagtgaccattgttcctacctggctacagttggcgtgctcactgcagccaccatgcccgtcctggcacaggtctgccactgtacacacgcggccatccccttcatagcccaggctgcactcacagctgttgcctgcacggcacacagcctcgggtgcacagggtggggtacacacaggctgcagctccagttgcacctcacagcgtggcccagtccagccttcatcacagaagcaggagccagagcccccaaggccctcatcacagcggccatgcacagtgcagcggcaggcttgacaatggggcccaaaggcaccaggagcacagagttcacaggctgtcccagcaaaacctgaacggcacagacactgcccactgccactcatgccgtccatgcacacgccacggtcactacaagggctgctgggccgccagggcaagcttgcactcactgccatagtgaccagggcagcagctgggcttccaggtggtggtgacacaattgcggtggcagcccctgcccaggccttggggcctaccccaaaggctggggtggacccagacgctgcgtaatcccaaagagtgcagcggaggggacgtccagaacttcgggtagaagcgccagcaggcctcagggctgccctgctcctgtgacccctcaggacagggtggctccagcccacagatgctgcaggtgttcagtcgcaggggccgggtctcaaagtggtcacagcgagcaccaaggccaggtggctccagcagctggtcgatgccataggccaggccaccctcaaagggcaagtgccgctgcacaatgcgagcatcatcctcacccaccatgagctcaccgggccgcgttcggctgcaggagaaagagatgggggtcccatgcatggttcgaagtgggcccaggttgggcaggtcagatgccaaggcctcgacattgcgaatcatgtggccccgcagaatggctgctagcttgtcacggtggtcctcatggtacagccaggcctggcgatccggaggcagagctcgaaaggcggcgtctgtgggccacagcattgtgaagggcctatgggatgcctctcgaagcaggggcaggaggccggccaccttcaggaggccgctgaagatcttgtaaccgaagccctgggcggcggcggtgacatttctcctcgggatgggagcatcatcaggctcccagtgcagcgcctcggggggcagcaggacacggtcaatgaagtgcaggatgccgttcacggcctcatggtcgctgctcaccacgcgcgcgaagtcattgaggtatatgctgccctccctctcgctgaagcgcagtgggtgccctgagagggccgtggcgtacccctgctccagcaggtcctcgctccgcagccgccgacagccaaccacgtggtagcgaaacaccagctggcgatgcgcacgaatccgggccagctcatcctgcgacaggttgctcattagatctgcgtgcggcacgaagatggtgaaaggcccatcgcccttgagctccttatattccaggaggcggaggctgaagaatgaggcatgcttatccctcaggagctccaggccgactcgggcacggcaggtgagccgtcccccacgtgtgggctggttacagtc

SEQ ID NO: 642253 - DNA, 1616 bp, Homo sapiens
gcggccgctcggcgctggctgctgtgcggaggccacggcgggccgcgagccgcctcgtcctcgccctcctgccctgggtgcggccccccgggtcccggcgcccactgccccggcgtcccgcgctccgcgcccgcccaggcacccaccagcggcgccgacctcagcgcgcacctatgggctcgctaccaggacatgcggagactggtgcacgacctcctgccccccgaggtctgcagtctcctgaacccagcagccatctacgccaacaacgagatcagcctgcgtgacgttgaggtctacggctttgactacgactacaccctggcccagtatgcagacgcactgcaccccgagatcttcagtaccgcccgtgacatcctgatcgagcactacaagtacccagaagggattcggaagtatgactacaaccccagctttgccatccgtggcctccactatgacattcagaagagccttctgatgaagattgacgccttccactacgtgcagctggggacagcctacaggggcctccagcctgtgccagacgaggaggtgattgagctgtatgggggtacccagcacatcccactataccagatgagtggcttctatggcaagggtccctccattaagcagttcatggacatcttctcgctaccggagatggctctgctgtcctgtgtggtggactactttctgggccacagcctggagtttgaccaagcacatctctacaaggacgtgacggacgccatccgagacgtgcatgtgaagggcctcatgtaccagtggatcgagcaggacatggagaagtacatcctgagaggggatgagacgtttgctgtcctgagccgcctggtggcccatgggaaacagctgttcctcatcaccaacagtcctttcagcttcgtagacaaggggatgcggcacatggtgggtcccgattggcgccagctcttcgatgtggtcattgtccaggcagacaagcccagcttcttcactgaccggcgcaagcctttcagaaaactcgatgagaagggctcacttcagtgggaccggatcacccgcttggaaaagggcaagatctatcggcagggaaacctgtttgacttcttacgcttgacggaatggcgtggcccccgcgtgctctacttcggggaccacctctatagtgatctggcggatctcatgctgcggcacggctggcgcacaggcgccatcatccccgagctggagcgtgagatccgcatcatcaacacggagcagtacatgcactcgctgacgtggcagcaggcgctcacggggctgctggagcgcatgcagacctatcaggacgcggagtcgaggcaggtgctggctgcctggatgaaagagcggcaggagctgagctgcctgctcaactaccgcgtggacttcaccttctacccacgccgtacgccgctgcagcacgaggcacccctctggatggaccagctctgcaccggctgcatgaagacccccttccttggtgacatggcccacatccgctgagggcacctttattgtctgggacaggccctcagcccctcctgccccatccacccagacaagcaataaaagtggtctcctccctg

SEQ ID NO: 642254 - DNA, 1488 bp, Homo sapiens
gcggccgctcggcgctggctgctgtgcggaggccacggcgggccgcgagccgcctcgtcctcgccctcctgccctgggtgcggccccccgggtcccggcgcccactgccccggcgtcccgcgctccgcgcccgcccaggcacccaccagcggcgccgacctcagcgcgcacctatgggctcgctaccaggacatgcggagactggtgcacgacctcctgccccccgaggtctgcagtctcctgaacccagcagccatctacgccaacaacgagatcagcctgcgtgacgttgaggtctacggctttgactacgactacaccctggcccagtatgcagacgcactgcaccccgagatcttcagtaccgcccgtgacatcctgatcgagcactacaagtacccagaagggattcggaagtatgactacaaccccagctttgccatccgtggcctccactatgacattcagaagagccttctgatgaagattgacgccttccactacgtgcagctggggacagcctacaggggcctccagcctgtgccagacgaggaggtgattgagctgtatgggggtacccagcacatcccactataccagatgagtggcttctatggcaagggtccctccattaagcagttcatggacatcttctcgctaccggagatggctctgctgtcctgtgtggtggactactttctgggccacagcctggagtttgaccaagcacatctctacaaggacgtgacggacgccatccgagacgtgcatgtgaagggcctcatgtaccagtggatcgagcaggacatggagaagtacatcctgagaggggatgagacgtttgctgtcctgagccgcctggtggcccatgggaaacagctgttcctcatcaccaacagtcctttcagcttcgtagacaaggggatgcggcacatggtgggtcccgattggcgccagctcttcgatgtggtcattgtccaggcagacaagcccagcttcttcactgaccggcgcaagcctttcagaaaactcgatgagaagggctcacttcagtgggaccggatcacccgcttggaaaagggcaagatctatcggcagggaaacctgtttgacttcttacgcttgacggaatggcgtggcccccgcgtgctctacttcggggaccacctctatagtgatctggcggatctcatgctgcggcacggctggcgcacaggcgccatcatccccgagctggagcgtgagatccgcatcatcaacacggagcagtacatgcactcgctgacgtggcagcaggcgctcacggggctgctggagcgcatgcagacctatcaggacgcggagtcgaggcaggtgctggctgcctggatgaaagagcggcaggagctgaggtgcatcaccaaggccctgttcaatgcgcagttcggcagcatcttccgcaccttcccccatccacccagacaagcaataaaagtggtctcctccctg

SEQ ID NO: 642255 - DNA, 528 bp, Homo sapiens
tcgatctagagatcccgatcacgtgcattgtgctcagcctgagtgagaagtgagacccaacaaaaaaataacaaaaaacatttgtgattcatgggaggaggtcaaatatccacattaaataacaggagtatggtgaaggcattgaatcccgacctcataggatgagtttgaagggttcaagactttagtgggggaagtacttgccgatgcgatgggaacaggcagataactagaattagaaatggagcctgaagatgtgactgaacttgtgtcactcatgaggagtttgctttatagacaagcaaagaaagcagtttcttgagatggaatctactcctggtgaagatgctgtgaacattgttgaaatgccagcaaaggatatggaatattacttaaagcttagttgataaagcagcagctgggtttgagagaactgacttcagttatcttattttaagaaattagcatagccatcacaaccttcagcaggcaacaccctgatcagtcagcaggcatcagcatccagga

SEQ ID NO: 642256 - DNA, 3143 bp, Homo sapiens
  misc_feature (1223)..(1223): n is a, c, g, or t
  misc_feature (1361)..(1361): n is a, c, g, or t
ctgtcttgctcgatataaattgatggcgcttttgttgggtaggactagacccaagtgtctaatttcccgtccacccctaccatcaatgaaatgaccctacttcctgtgcatgcttctgctttcagccccagcctcgtcacttgactgtgaggatcctctgggtgtcagggaagtcctcctccagcagtgagtcatcgaagggttcacaaaaggtgtcgctgccaaagacagggttggggacagagaccagggtggggttggtcccttcttgccacggtgagaagtcgtcatcagcatcatcttccgcctggaaggcagagaagccaaagcccatgggcttgcctcgggcacggaggtagagagctccggccaccaagccaagcagtgctccagcggcaagcacagcccccacgcctgccgccacaggtggggcttcaggcgccagcactgcctggggctgtgggggtgccaggagggggctggccagagcatggatgatgccattgaaggccatgatgtcccacacaatgatacggctaaccacaactgtccctggggccacaggggcccaggaactgttgtcagggcctgcgtcactgatgatgaggctgaggcctgagtgggccggaagcaacttcccctggctggcgttggcacttaggagggtggcgttggaggcatgcagctccaagtctgggccactcagcgtcatgttgtccacaaagccttcattgacagggacgaagagtgtcttatacgtgagctcatcatccaggaagtccaggaagtcgagaccccgctgggtggcattggcatagcccaatagcatcccatagaaggtggagaagttggcagtggcagccagcacatccagcagcttcccattgcacgtgctgatcccgtcacccacgaagccatttcggcatcggcaggccacatcttgcacacggaagcagtaggcatcccagcgttctgagaggttcttgcgggcacccaggctgactatgcccacccgaccattgccacagtccgccacagggaaaaccacagggtgggcagtggagccattggccagccagcccatgaggcacaggtggaagcccagctgctgggcagcagagagctgagggaatgaagcaaggacggctccctgtgcttcgcatgccgcctcagcctccgaaaagttcagaccataagggccgctggtggcctggaggtggaanacgccagcccgtttctcctggaagtgcaggtcagtgcacatggcatctgagtgcaagggcggtggctggcccaagcagcggtccacaggtggttccgactcctccagacactgcagtccatcgcctacgtagcctgcntggcactcacagcgccgtgtgttcaggccggtgctcaagcagttggcgtgctcgctgcagcccccgcggtggccatctgtgcaggggttgcgggcccggcagctccagccatcaccctcgtagtcgggcaggcaggtacaagtgaccattgttcctacctggctacagttggcgtgctcactgcagccaccatgcccgtcctggcacaggtctgccactgtacacacgcggccatccccttcatagcccaggctgcactcacagctgttgcctgcacggcacacagcctcgggtgcacagggtggggtacacacaggctgcagctccagttgcacctcacagcgtggcccagtccagccttcatcacagaagcaggagccagagcccccaaggccctcatcacagcggccatgcacagtgcagcggcaggcttgacaatggggcccaaaggcaccaggagcacagagttcacaggctgtcccagcaaaacctgaacggcacagacactgcccactgccactcatgccgtccatgcacacgccacggtcactacaagggctgctgggccgccagggcaagcttgcactcactgccatagtgaccagggcagcagctgggcttccaggtggtggtgacacaattgcggtggcagcccctgcccaggccttggggcctaccccaaaggctggggtggacccagacgctgcgtaatcccaaagagtgcagcggaggggacgtccagaacttcgggtagaagcgccagcaggcctcagggctgccctgctcctgtgacccctcaggacagggtggctccagcccacagatgctgcaggtgttcagtcgcaggggccgggtctcaaagtggtcacagcgagcaccaaggccaggtggctccagcagctggtcgatgccataggccaggccaccctcaaagggcaagtgccgctgcacaatgcgagcatcatcctcacccaccatgagctcaccgggccgcgttcggctgcaggagaaagagatgggggtcccatgcatggttcgaagtgggcccaggttgggcaggtcagatgccaaggcctcgacattgcgaatcatgtggccccgcagaatggctgctagcttgtcacggtggtcctcatggtacagccaggcctggcgatccggaggcagagctcgaaaggcggcgtctgtgggccacagcattgtgaagggcctatgggatgcctctcgaagcaggggcaggaggccggccaccttcaggaggccgctgaagatcttgtaaccgaagccctgggcggcggcggtgacatttctcctcgggatgggagcatcatcaggctcccagtgcagcgcctcggggggcagcaggacacggtcaatgaagtgcaggatgccgttcacggcctcatggtcgctgctcaccacgcgcgcgaagtcattgaggtatatgctgccctccctctcgctgaagcgcagtgggtgccctgagagggccgtggcgtacccctgctccagcaggtcctcgctccgcagccgccgacagccaaccacgtggtagcgaaacaccagctggcgatgcgcacgaatccgggccagctcatcctgcgacaggttgctcattagatctgcgtgcggcacgaagatggtgaaaggcccatcgcccttgagctccttatattccaggaggcggaggctgaagaatgaggcatgcttatccctcaggagctccaggccgactcgggcacggcaggtgagccgtcccccacgtgtgggctggttacagtc

SEQ ID NO: 642257 - DNA, 1370 bp, Homo sapiens
  misc_feature (125)..(125): n is a, c, g, or t
  misc_feature (159)..(160): n is a, c, g, or t
  misc_feature (208)..(208): n is a, c, g, or t
  misc_feature (210)..(210): n is a, c, g, or t
  misc_feature (327)..(327): n is a, c, g, or t
  misc_feature (826)..(826): n is a, c, g, or t
  misc_feature (833)..(833): n is a, c, g, or t
gggggagagcccatgcgcctgggaagccgggctgtttctgggcggggctgcagactcctcgtgctcgtgtcaccgtgtccttcccagtgagacatgatgaatggatggagagcccggaaccaggncctggagcggcgggcggagccgagctgctggggnngccgctccgtggtgcccccacccccgctgcgcctcagtgtgtgcctgncngaggtgcagtgtgctctgctggttgctgggggctctgctgcctgcttgtcatgtgctggcgtgggcgctgcgagcggctgccagctcggggcagcggaacccagagaagctgagtgngtggcggtagcggctggcgacggcgacgacgacgactcccgcgcgtgtgcccagcctcttccctgccgcaggccggccttttcctccctcccttacgtccccgagtgcggcagtaccgcctccttcccagccgcgcggctttcctccagacctctcggcgcgggtgagccctattcccagaggcaggtggtgctgaccctgtaacccaaaggaggaaacagctggctaagctcatcattgttactggtgggcaccatgtccttgaagcttcaggcaagcaatgtaaccaacaagaatgaccccaagtccatcaactctcgagtcttcattggaaacctcaacacagctctggtgaagaaatcagatgtggagaccatcttctctaagtatggccgtgtggccggcttgttctgtgcacaagggctatgcctttgttcagtactccaatgagcgccatgcccgggcagctgtgctgggagacgaatgggcgggtgctggncgggcangaccctggacatcaacatggtctggagagcctagacatgacagacccaaggggctaaagagagcagatctgccatatacagtggctacatctttgactatgatactaccgggacgacttctacgagaggctcttcgactaccgggggcgtcgtgtcgcccgtggcagatggccacgtcggtccctgtgaagcgacccgggtcacagtcccttggatcggggtgtccaaagtaacgtaactgtcaagctctttgaccgtccacaggtgtcatcaccaggtcaggcgagagcagttcaacgcaacgggagctgcagcaccagaggggtgaccagatcggtccaatatgatgcgtgtgaacggtgggcagatcgctgggccgaagggcatcagaatgcagaagaagggagggggggggccccgggagggcgtgtgtggacgcgggaaggtgtccgtggggggccgggcccccccgaaaattgggggggggcggaacgccaagaagggcgccaggaggcgagagggacgccaagaggcccg

SEQ ID NO: 642258 - DNA, 154 bp, Homo sapiens
gactgcatcaacgccgctgacttgcacacgccgctccggattcttaggatctgaacccgactccggagtggcgggttggatgcagtcgactgcatccaacgccgccgcgaggacgtaggagtgccgctgcgtccgcggcggcgttggatgcagt

SEQ ID NO: 642259 - DNA, 238 bp, Homo sapiens
cactgcactccagcctgggcgactgagcaagactccgtctcaaaaaaaaaaaaaacaaaacttgaatttgggtgaggggagggaacttagaggatgggccaataggtgcagcaagccattgtggcacacatgtgcctaggaaacaaacctgcacattctgcagatgtatccccccctttttttttttagaagaaataaagaatattttttaaaaaaagaaaaatacatttgtagctat

SEQ ID NO: 642260 - DNA, 248 bp, Homo sapiens
cccaatagttgctatgtgattatggtactggctatagtattcatcgcacggaacacttttggcatgcttaactacctggtaacaccttcacctgcactggtttactttttcttttttctttctttattatttatttttatggagtggtggttggttttaaaatccacagaccataaaaatcttttttggccaagcttgtgaaacgttgccactgtctcatttccccccctctatccaagggatctgtt

SEQ ID NO: 642261 - DNA, 510 bp, Homo sapiens
ctctatactgtcctcattggtatatggctgtatgaacaattcaagtatgactcctgtagtgattctgaacatgtactaacaaattatagctaactgtagtcaaccggttgtactatcaagttccaggtctttctcattctatctaactataattttgtacccattaaccatccccatttcacaccacttcctactacccttcccaacctctggtaatcatcattctattctctatctacctgagttcaattgttttaatttttatttcccacaaataagtaaaaacatgcaaagtttgtctttttgtgcctggcttttttcaattaacatagcttcctccaggttaacccatgttgttgcaaatgacaagatctctttcgtttttatggctgattgctctattgtatatatgtaccacatgttctttatcctttcatctgttgatggtcacttaagttgcttccaaatcatagctattgtgaatagtgctgcaataaacatggaagcaca

SEQ ID NO: 642262 - DNA, 508 bp, Homo sapiens
cccgtttgggctgtcgtgacgcgcacagtatcattggtgccgtgctgtgctgcaaccagtgtgaatggtacttctgtgcccgcgaagtgctgggacagcccaggatcccgagtcagcaccttgctggcatctgaggagaacttggggatggagctgtagctggagccccggcttgaggagtgacttggtcacagtctccaccacgaagccgtggatgtttcgtgaaggtgcttgtgtgccctccggacatgcctcggaccaggtgaccttgtgccttgaattggtctgcccacgatgtgcttgggggccaccgtacttgattggctatgaggtattttgccagtgggccatggaagtataattgagcatatggtcctcagtgacattcccgaaagtccagttgcaccttggaggggccatcaatggtgaaaaacaatgaccccgatgccggcattcagaggtgtcacgatgaactctgatgacacaccggtagtgcctccctcgagcc

SEQ ID NO: 642263 - DNA, 113 bp, Homo sapiens
tcatgctcttcctctcttctcctcctctgtctcctcacgctctgcaactcaagcccatacagtacctcgaagtcctcgagcggtgggaccccaagacggacagtgagacagag

SEQ ID NO: 642264 - DNA, 210 bp, Homo sapiens
ggtcggtaccgtctatcaggactcttattaggcagttctgggtgctaagatcccaacagcatttgcttatctgaaaaggatcttatttctccttcacttatgaagcttcgtttggctgggtatgaattcttgattggaattttttttttctttaagaatgctgaatataggcccccaaattcatctagcttgtaaggtttccgcttttag

SEQ ID NO: 642265 - DNA, 128 bp, Homo sapiens
cgtttaaatcacgttccaactcaaagcaagtaacagcgccacggtgtctggccaaagacatcagctaagaaaggaaactgggtcctacggcttggactttccaaccctgacagacctgagcaagccag

SEQ ID NO: 642266 - DNA, 738 bp, Homo sapiens
ctaaacgaagtcgtggaggtggcgaaacgaggaggagataagcgcggcttgtggctctgtgtgtctcccagatctgctaaagccctaaggacatcaccatggacttccagccatcgccccggcgggcaagaccggtgagcgggggacgtgttggcctcctcctccgagagcaagcgtgaccgctagggagcgcctcgcggcagctggccctggagaccgatcgacttcaacaaggacccggtactttcatgaggaaccaccgtgggctcctatgaagtgcaagactctgcgctgacaccttcacgaacaatgaggggagctacctggcacatacgcagggggaagaagcgccagaccgaagctggcccggcgagtcgagcgaaggaggccgaaggaggcccctgccccaagcccgcgccgtgagaaggtcaccggtgcgaggtcgaacgaagtttgtgaaggatcggccgcccgggctacgaagtgaccaagcagagagactcggagatgggccagcagaggctcctcttccagattgagtaccctgagggatcgccgagggcctcaggccactgtcgagcgcttcatgtctgcgtacgagcaagaggatcgagcctccggaccggcgctggcagtaccttgcctcatggccgcgagccctagagaacattgccttcaaggtgccgagcagagagatcgacagggggagggcaagtctgcaccactggaaccgggagc

SEQ ID NO: 642267 - DNA, 851 bp, Homo sapiens
  misc_feature (299)..(299): n is a, c, g, or t
  misc_feature (304)..(304): n is a, c, g, or t
  misc_feature (313)..(313): n is a, c, g, or t
  misc_feature (315)..(315): n is a, c, g, or t
  misc_feature (323)..(323): n is a, c, g, or t
  misc_feature (347)..(347): n is a, c, g, or t
  misc_feature (355)..(355): n is a, c, g, or t
  misc_feature (596)..(596): n is a, c, g, or t
tgtagggaaagggtctccctgtgttgcccagactggtatgggtactcctggactcaagcaattctcctgccttggtctcccaaagtgctgggattacaggcatgagccaccgaacctgaccaagcacatcttaatatcactgttgtattaagttttcaagttccagttatttcataaatgatttttttgtttgaatcagtatccgtatagggctcatagattttattgatgtcgcttataactgtgtctatagttcttcttccgttatttccccatgtcgccccaccctttccttattnagttnatgaggaantnggatcatnggtcctgtaggattttcctctagntggatttngctgattttcacctccctggtggtatttaacattatttgttaaattgatggttacatttagaggctccatcagattcagatgtttaagattttaaattaaaacattttttatttttggcaagtatactttatatttagtactgtgtatctccattaggaggcacctaatttttggtggtctccctgctgtgttttgagggctcaggtgacaaattgaagcgattccagatggatcagtgtngaggtatagtttcattcccctcctgaagtagcttcatatttccaaagcgcctggagaaatactatttaacttcttatatatagcacacggagattaaattgtactttatcactagttttagtggaatcagtactctggattcgttgaaactgtcgtatgaagactgggtattcttctggtaggaatctagggtcaacctattaagaatagttccaggaatctgaagaacgacaaagtatttgaacaactagggaa

SEQ ID NO: 642268 - DNA, 108 bp, Homo sapiens
aatttcaattgtttaccctgatgctgacaggctcacttcatcatgttttgatgaagaccggtatctgcctctcaactgaaacaactgaaccagtctagcattaaccac

SEQ ID NO: 642269 - DNA, 760 bp, Homo sapiens
  misc_feature (490)..(490): n is a, c, g, or t
cccttctccactgggggtttcttgccccttctttagggccccgcctcaattgttccgagcctcgtcctgtcctgcgactgtgcgctggccccgcgacgcagcccctcccacaactccttggtcccccccatgcggcgccaggattctcccttcgtaggcccctcgcttgccaccccgcgtcgcgcccctgtgtcagctggcaaacccaggtgggcctctatctgtccccccccggtgtctcaccacggagtccggcgggtcttgtctattatgtcgccccgctgtttctcgtctctctcacgcctcttatgggacggtcctctccgggggtcctcccctctcgctcagagtgcgagtggggtaaccctgccgctggctcttcccacccgacacgattggggggagcaccccccctcgcccgccactcctcgccgcccgtggcgcgtggggtgtttgcgcctccgcggagatatggcatcttggcgcgacnattatctttctgctgatagagctctgcttctccccgaacgccacggcatgatgggcccgcacgtctatgatcgctcccccgggattgttctgcaagccgcgcacgccacggccatactgtgatgtagcgcgttcttgtacgcgctaggctcacgtatgcacgtcccccagcgcatcataatggcgcagtgcgctttctactgttagctcgcaccagagccttgggccccaaaggagcaaacaaaactttctctacaaacaaacaaaacac

SEQ ID NO: 642270 - DNA, 1417 bp, Homo sapiens
gatccgcgcccgttggcggggtcattgagcgctacgatccggtcctcgtgatcccgagctgcggggaggcagatcgactgtgagctgcttgtccccatcctgcggtcgtcctggggacatcatgagccttccgtggtgcccggggcattgggttggacgctcgggacgctcaacttcctcctcgtgcctcctgacgcgcgtgcctcgcgtcgccagacgggcctggacgcacagtgccatggagtaccggacccaatgggtcgtgggcctcgtggcgtggctgattggcgtccagagtggcggtccccttcatttggccctgcggctccgcatgtgtgtcctgctggcatcctggcgggacaggtatcgttgctgcatagagaccgccggttcttgaccccggaaactgactcggaggacaacatacggttgaaagcgtgctgaaaaagggacgcacctacgttgcagagctaggggaggggaagaaagtgaagagttcgcatgggtcctcacaaggaacccaaggcgctagaggcggtggtgttggaacgcattgggccgcattgggaactggggcaccttcgaatagtcctgcgggggcttccaaggcccaggagagggctcggttgccgtcattgcgagacgcgaccgttgaggtaggggccttcagaagtagagggaaccgctggaatgtcccgggagggcagggcaggcactggacagcaagggcatgcatgggggcatggcgtttgaatccccacggcgggtgggacaggttggactacaacgatagatgccttggtgccaagaatctaagcctggccaataccgggaggacttggcacggccgcctataggagatggcaccagggggaggaaagcaacgggaagccgactgggatgaatcccggagtggagagccccattggagacgagagggaggccaaagggccatacctgacgcggccacagagacagagaacccccaatgaaccccggcgacacgcgggagtcaaccggctgaatcctcaggggggccacggaggcaacatcacgggggctggggagcatcaacataagtggggcgacagccaatgggagcagctagaaatagggggacgatcgggggcacgcggtgtacgcgcgcaacgagacctggcgcggcggtgaagcaaacccgcagtgaaaaaccctaccacaagaatgcacaccaggaagcgacatacaatctagcggagatgccacactgttggaacacaagaaccctgtacacaggtaccaccgagctggggaagaccaagtgggcagagaagccgagaccgctgccacctgtgcgacactacctagagcgaggagagcgcgagaagaggaaaaggagcacacttaagtgagcacaatctaccacctcacaacctgc

SEQ ID NO: 642271 - DNA, 608 bp, Homo sapiens
aaaattaaaaaaaaaaaaaaaaaaaaaaaaaaaaaaaaaaaaaaaaaaaaaaaaaaaaaaaaaaaaaaaaattaccctaaactgccctttgttttccaccttccgaactgggaacaccctgtcttaacccaattaattggaaaagcactacatcccccttttttaaggtgctgtaaaaacaaacagctccgccccgatggcctttcccaaaagtggcccaccctgattgccttttgcaaaattgtaaccgctaatatgtggataaaaatcgggtaaaatttttgttaaatcaaatatttttttaaccatttggccaaaaccggcaatttcctttctaattgacaaaaatggcccaagaccgttttgagtgtaggtccagtccggaacaagagtccacttttaaacaacttggactcaaacgtcaattgtcaaccggctctcaagcggatggcccactacaccaacctttaccctaattaggccttttggggaccagtcccctaataactttttcggaaccctagtgccgccccccttatatagcttccctgaggaagccccccatcttgccctaacggaaggaaccgcggggccggacgctaggcctt

SEQ ID NO: 642272 - DNA, 299 bp, Homo sapiens
cacgggaccctcgtgttgaggacgggtgcctgagacccctgagcccctcgagcctctgggcacggttggctgcctgtgtgctgttgtctcgtatgtcccaccccgagaagggagttgaacaatgtgagtcgtctgtggcattggaaagtgcagtgctaacatggttttgtgcaaagtgtttagctttgccttcaggcggtgcgtctagcagggctgatgggggccaggactgctcctggctaactgtgggcagggcttgccttccaggaaccccaaagtgtttgacccagctcggtaat

SEQ ID NO: 642273 - DNA, 458 bp, Homo sapiens
  misc_feature (54)..(54): n is a, c, g, or t
  misc_feature (75)..(75): n is a, c, g, or t
  misc_feature (154)..(154): n is a, c, g, or t
  misc_feature (156)..(156): n is a, c, g, or t
  misc_feature (262)..(262): n is a, c, g, or t
  misc_feature (360)..(360): n is a, c, g, or t
  misc_feature (363)..(363): n is a, c, g, or t
ggaggagcccaggtataaaaaggacaaagcaagctcaaatgagaaaatccttcnctgtccgcagcgacatcaccnaagctggaggtggacgccatcgtcaacgccgccaacagctccctgctcggaggcggtggcgtggacggcttgcaattcnantcgcgccggccccctgcttaccgacgagtgccggaccctgcagagctgtaagactggcaaggccaagatcaccggcggctatcggctcccggccaagtacgtcatncacacagtggggcccatcgcctacggggagcccagcgccagtcaggctgccgactccgcagctgctacctgagcagtctggacctgctgctggtatgncgntccgctcggtggcgttcccctgcatctccaccggcgtgtttggctacccctgtgagcggccgccgagatcgtgctggccacgctgcgagagtggc

SEQ ID NO: 642274 - DNA, 313 bp, Homo sapiens
tctgaatgcccggtaacgcttaaggatgtgagcgacctatgaaaacatgttggcaaatcctcgaaattgaaagcacgacgcaaatagacattatccgccaggcttatcttgctcgcttaccgttgtgtcatcccgaaaccgatccgcaagggtttaaagcattacgccaggcctatgaagaggccctgcgactggcggtaaatcctgtcgaggaagcagatgatgaagaaaaagatactgcggtgacgccaagctggtcaggcgtagctttaccatcaataatccctgtgcgttgttgattcccccagcgcgg

SEQ ID NO: 642275 - DNA, 414 bp, Homo sapiens
tccgagtacataaaaaggcttgatttactaccagtcttgccggggggcgtattgagagcctaggaggtacatggaacgtatgatccaggagaaggcagtagaagtataaatgtggtgctgagaagcatcgcgacatggatgtcaccaggtaatcactggagtcctatgccttcaacatgaaagcgagtgtagaagatatcgatacttcaaggcaagataaaagatgaggacaaacagaagattctggacaagtgtaaatgacattatcaactggcttgataagaatcagactgctgagaaggaagaatatgaacatcaacagaaaggagctggagaaagtaagcaaacccatcatcaccaagctgtaccaaagtgcaggaggcatgccaggaggaatgcccgggggtaggcggt

SEQ ID NO: 642276 - DNA, 162 bp, Homo sapiens
  misc_feature (44)..(44): n is a, c, g, or t
  misc_feature (60)..(60): n is a, c, g, or t
  misc_feature (66)..(66): n is a, c, g, or t
caccttactaccagacaaccttagccaaaccatttaccaaatanagtataggcgataganattganacctcgcgcaatagatatagtaccgcaggaaaagatgaaaaattattacccaggcataatttagcaaggactaacccttataccttctgcataatg

SEQ ID NO: 642277 - DNA, 454 bp, Homo sapiens
catgtacgtatatctgggggaagatcttagaccagggggaggacttcccagcatcagagatgacacggatcgccgggctgattgagagacaagatgagtgaggggaagaaggaggagctccagaagagcttaaacatcctgacttccttccaaaagaggggggccgagaaagaggagctgtaaaaaggctgtctgtgatttccagggttgggtgggggtagggaggggagagttaaccgtgctgctgtgagtcccttgtggaatataagggggtagggggaaaggtggtactaacccacgattctgagccctgagtatgccttggacattgatgctaacatgaccatgctggggatgtctctagcgggtcgggggatagcgggagcacttactcaggtggctggtgaattgacacctcagagggaatgagtgcaatagagaggagagaggagtg

SEQ ID NO: 642278 - DNA, 991 bp, Homo sapiens
agcgggcgagcgccaccagggcagcagccgccgcagccgccgcgctgggcagaggagccggagacgcgagcgggcgaggtggcggctggcggcgagagcgggagcagggtaccgggcgcgggcagagctgcggcggcggctggtagagacgggggttttgccatgttgaacctgggtgggtctcagaaactccctgaaccgcaagtgatccggcttgcctcaagcctcccaagggtgcctggggattaccagggcaacagtagccacttgttgccttggccttctaacgtggtttgactttctttattaaaaggtgtggtgtgtccaagaagaaaagcatatggcccttcagaggaacactttttggcgttaataattatggaccggcatggaaggcgttggtacaagggggagaactacaagggcatattaagttgaaggaagaggtaatttggttatcagcaaaagaacaaagtggtcttaagatggacaggactggaacaaagggacatagggacggtggggcaacatgggactccggggcacacagcaggaatagccttaaaagataccctaattaaggatatagaacccatcttgatggaatcactaaggtgtacggaactcagtttgtagggcctgatcgttggaacatgatattcggccaatgttgttatatggggtagaagaagagatttgctagaacgaaacttccttacattcccaaattcttcccggtgaaagagaaaacgtgtttggaaatgtgccatgtattgccaagaaaccataatggcggtcaggttcttaaccatggggtttatgaaaaagtggttgccaaccatttaaacaaacaattggtcgtcaagcgaattggggagtaaggggacagtgaaaaaaacaagaaatcaagagaacgtgtcgggcagagaaaaacgcggaatagtgtgtatgaaggacgcacggaacaggtagaaacgagacaatgatttga

SEQ ID NO: 642279 - DNA, 319 bp, Homo sapiens
caacattggcaggacagtaaccagatgtacctaacccaacacatcttactggcagaggtcagtgggctggagtttgtgctcctcccccacacaagtttaataatacaaatgcacaagaaaaagacttcggtactgtttcctcagcagaggagaaaaactcaaactagttatgagaccaaacacacaaaacaatgaaaagctgcactaactagtccagaatgtaagttaagatgatgctggggtgaataactcgttttttctagagcccttataaatacaatcccccagttaggtgtttgcatttcctgcaaagtgttgg

SEQ ID NO: 642280 - DNA, 1419 bp, Homo sapiens
ctctgctgtggatgaactggccatcaaaccatcagatacagtcctacctgatctctcccttttccataggcagaggagcctcatctcatggccaccacttctataggcccatgggagtactgacaggctaccattgatgttcacttaggcccagtggctctttatcagcttgtggtgaattctgccatgtctggaacgtacccttcagggcagtggctccacctctggcccaggcaggccccaaaatgccatccaagtgccaagacctggaactagggacccaaagagcatgcttggtactctaccccactgtggctgagctggtacctaaggtgcaagtgaaagtccccttttccctttgctttcctcaagcataaggagtctcttaccataactcccacagttggcaatgttctgggtgtcacctgaagccagtatgtctcagagtctcatgtaaggcccatggcatactacctgggaatcactgctggttattcagagtcaaagggatctttggttagcagctgatagattctgcctgaactggatacttcccttcaaggcagcagattcccttctggcacaggttgtgcctagaaatatcatccaggacctagggcctagaaggggccactattgaacaatgacaagccaggaaataacaagtattggcagggatgtagagatactggaacttttgtgttgttggaatgtaaaatgatataactgttgtgaaaaacaatatgtgatttcttacaaaatataaaatagaattaccatatgagtcagcaatttcacttctgagtatatacccaggattactgaaagaacactctgaaggagatatttgtatatccatatttatggcagccatattcacaatagctaaaatgtggatgcaacccatgtgtccattgattaaaaaatgaatttaaaaatgtgatatatatgtatgtatatgcacaattctcaaactgcagggtatatatatgtatacacacacacacacacggtgatattatttagccttaaaagggtaggtaactgtggcatagaatacaacacgcatgacccttgaggacattaggctaaatgaaaaaagtcagtcacaaaaaagtactgtatgattccacttacatgaggtacttagagtggtcaaattcataaggacagaaagtagaaaggtagttgccagaggttgtgggtaagagggaatggggaagtaatacttaacaggtaagagtgtttcagttttgccggaggaaaacagttcctgagatgaatggtggtgattatgaatgtacttattaccactgaactgtatacttaaaattgttaggaggataaattttgtgtgtattttaccacaataaaaatgttttattagaaaaataaaataaaaaaattcattgtaacaaa

SEQ ID NO: 642281 - DNA, 565 bp, Homo sapiens
  misc_feature (55)..(55): n is a, c, g, or t
  misc_feature (161)..(161): n is a, c, g, or t
  misc_feature (163)..(163): n is a, c, g, or t
  misc_feature (175)..(175): n is a, c, g, or t
  misc_feature (177)..(177): n is a, c, g, or t
  misc_feature (187)..(187): n is a, c, g, or t
  misc_feature (197)..(197): n is a, c, g, or t
  misc_feature (213)..(213): n is a, c, g, or t
  misc_feature (215)..(215): n is a, c, g, or t
  misc_feature (222)..(222): n is a, c, g, or t
  misc_feature (235)..(235): n is a, c, g, or t
  misc_feature (265)..(265): n is a, c, g, or t
  misc_feature (291)..(291): n is a, c, g, or t
  misc_feature (314)..(315): n is a, c, g, or t
  misc_feature (317)..(317): n is a, c, g, or t
  misc_feature (319)..(319): n is a, c, g, or t
  misc_feature (326)..(326): n is a, c, g, or t
  misc_feature (338)..(339): n is a, c, g, or t
  misc_feature (344)..(344): n is a, c, g, or t
  misc_feature (369)..(369): n is a, c, g, or t
  misc_feature (379)..(379): n is a, c, g, or t
  misc_feature (383)..(383): n is a, c, g, or t
  misc_feature (404)..(404): n is a, c, g, or t
  misc_feature (474)..(474): n is a, c, g, or t
  misc_feature (486)..(486): n is a, c, g, or t
  misc_feature (500)..(500): n is a, c, g, or t
  misc_feature (554)..(554): n is a, c, g, or t
tgctcgcccaccacccaatcctcgcctcccttctgctccaccttctctctctgcnctcacctctcccccgaaaaccccctatttagccaaaggaaggaggtcaggggaacgctctcccctccccttccaaaaaaaaaaaaacagaaaaacccttttccagncnggggaaagcatnanggagatgggncgccgggctngccatggagctgctgntncacgagntggatcctggttncgcaggccgttcgggaccgcaacctgctcngagacgaccgcgtcctgcagaacctnctcaccatctaggagcgctaccnncngnagttgcnccgacggcaagnngcgtncagaaggacatccaatcctacatgngcagaatggnggcnatctggatgctggaggtgctntgtaggaacagaattgcgaataaatatggtgcttgccctgctgtgccatggaatgaacctggtaccgtgngctgggggctgngggtgccctgactnccgtaagtgccccatgctggctaactgcctgggcgtgtctgtgctggcatggtntcctggttcct

SEQ ID NO: 642282 - DNA, 253 bp, Homo sapiens
ggttttaaggtggggaaaaataagggctctttcgggccattctacccggtatgactgggtaatgaggacagactgtggaccccccatttacctgagtttgattttttaacaacaaaaacttaggggtgcaaagtgttaactgggaaaggtttgtggctccttgcagcctccagggactggcctgtccccgataaaatttaaacagtccccggggaggggatgatacaaggagtaaaccttttttttccctcca

SEQ ID NO: 642283 - DNA, 423 bp, Homo sapiens
  misc_feature (31)..(31): n is a, c, g, or t
  misc_feature (55)..(55): n is a, c, g, or t
  misc_feature (167)..(167): n is a, c, g, or t
  misc_feature (188)..(188): n is a, c, g, or t
  misc_feature (231)..(231): n is a, c, g, or t
  misc_feature (268)..(268): n is a, c, g, or t
  misc_feature (289)..(289): n is a, c, g, or t
  misc_feature (345)..(345): n is a, c, g, or t
  misc_feature (353)..(353): n is a, c, g, or t
  misc_feature (386)..(387): n is a, c, g, or t
  misc_feature (401)..(401): n is a, c, g, or t
  misc_feature (406)..(406): n is a, c, g, or t
gcacgcgagatgtggtgacactatgtgaganagacacttagctctttaaagagtngggtgaatagatgaatagccatcttgacattccttggaaagaaatcccctttgatgagaagtttctttgtgattccaatatagaaagatctcaggttttcattaccatttgnccagtgcaaatgcactatttncaggcattcaacaaattcaacagcactgatggctttcctaagngctgggacacattagatttcaacttgtgtcaaattgnccatttatggtatatgcccgntttttgggggtttcggtttaatctaaaggcagcaagtgagggccaagtacacaggnttgctgtntttgcgctaccttgagagcattgtgacttaacnngtgaatgagttgtntactngtgggctcttttgtgtc

SEQ ID NO: 642284 - DNA, 370 bp, Homo sapiens
  misc_feature (31)..(31): n is a, c, g, or t
  misc_feature (55)..(55): n is a, c, g, or t
  misc_feature (114)..(114): n is a, c, g, or t
  misc_feature (135)..(135): n is a, c, g, or t
  misc_feature (178)..(178): n is a, c, g, or t
  misc_feature (215)..(215): n is a, c, g, or t
  misc_feature (236)..(236): n is a, c, g, or t
  misc_feature (292)..(292): n is a, c, g, or t
  misc_feature (300)..(300): n is a, c, g, or t
  misc_feature (333)..(334): n is a, c, g, or t
  misc_feature (348)..(348): n is a, c, g, or t
  misc_feature (353)..(353): n is a, c, g, or t
gcacgcgagatgtggtgacactatgtgaganagacacttagctctttaaagagtngggtgaatagatgaatagccatcttgacattccttgctcaggttttcattaccatttgnccagtgcaaatgcactatttncaggcattcaacaaattcaacagcactgatggctttcctaagngctgggacacattagatttcaacttgtgtcaaattgnccatttatggtatatgcccgntttttgggggtttcggtttaatctaaaggcagcaagtgagggccaagtacacaggnttgctgtntttgcgctaccttgagagcattgtgacttaacnngtgaatgagttgtntactngtgggctcttttgtgtc

SEQ ID NO: 642285 - DNA, 168 bp, Homo sapiens
ttggcttcctccctccattttatcctcctaaaatgctgggataataggagtgtattagtctattctcatgctgctaataaagatacctaaaactgggtaatacacaaagaaaagaggcttaactgacgcacatatccatgtggccagggaggcctcacaatcatgttg

SEQ ID NO: 642286 - DNA, 506 bp, Homo sapiens
gggccatcatgcccgtacatccagaccctgcgagtgcttagtggagatctgggccagcttcccactggcattcgagatttggtaagagcacagtgcccgcctgtgccaaaccagagggcgatccacatctgtgatggaattgaggctgacaatactgccacactgaccctgctggagcagtcagggtcctcatccgaaagctccctcaagtacaataacgtgcgtggactggacccagtgagcagcaccccaaggagtgtggcacgagctatagagcaagacggtgagttgtaagctccttctcagcggggacacgggtaccactcccgcctggtggggcccgtgggcagctgggcaactggatgtccccagctgatttccagtcgagctgtggatgagaggtttccaggctgcatgcagggtgcgcaaccatgtatgtgcttccattcagcatgggtcctgtgggtctccccgctgtcccgcatacggggtgcagctaccactga

SEQ ID NO: 642287 - DNA, 121 bp, Homo sapiens
atgccccacctactctatgatcagtcgtggcgatgagtggaccctgaaggagtgtgaccccgagctcagcgttgtggagtgcacgggggcggacacgaaagaggtaagatgtgccaacaga

SEQ ID NO: 642288 - DNA, 926 bp, Homo sapiens
tgcgtagcgggctcaggcggaaccggaacggccgtcctcttaccccgcctccgtcgcgcctcctcctcctcctcctcctcctcctcctcctcttcctcctcgtcggttcctcctgagccgcgggcgtgagcggggtgtcggcgggccggtcgggggggcatggctctctggggggggcttggcctgtcgtgtcgggaaggtatgagccgcagagccccggggtctcggctgagcagcggcggcaccaactattcgcggagcttggaatgactggcaacccagaactgatagtgcatcagctgacccaggtaattaaaaatattcttcatccagagatagaggtgccccttcctcttacggactgcaaccttaaaattcagctgtggtgactcggcaaaggcacgatgataccagagtacacgctgacatacagaatgacgaaaagggtggctacagtgtcaaggaggatctggggaaaatacttatggtcggaagtagagagacaagagatgagggtaaaaatgtgaccagcctgagttcaacagtgttcagcatggagtcgtgtttaaacaccaaagaatgaagaaatcaaggagagatcgaagtctatgtgatgagtctcgaagacaaaatctacctaccgaggcatcacccggggacagagaacgcaactggaagatggacaagcaaaaccagtgacagaatgtaatcagacaacagaaaaaaagggaccaaaacaacacggaacaacagccgcgcacctgaggctaacgaacaagacagccaagacgacaaacaaagaagcgcaggaacacaggacacgaacaacagcaaacacacgaatcaatgaccacgagaagaacaaacaaattgccaacccaggacaacacacgtcagcacacagacactacggcaacaccacaaaa

SEQ ID NO: 642289 - DNA, 360 bp, Homo sapiens
ccccgattagtggtgggcagccaggcagaggggctccttacgctcccagacgatgggcagccaggcagagacactcctcacttcccagacggggtggcggccgggcagaggctgcactcttggcactttgggaggccaaggcaggcggctgggaggcggaggttgtagcaagccgagatcacgccactgcactccagactggacaccattgagcactgagtgaaccagactccgtctgcaatcccggcacctcgggaggccgaggctggcggatcactcgcggttaggagctggagaccagcccggccaacaccccgttagcctattcctgagtagaacatggcagccttccgttttcct

SEQ ID NO: 642290 - DNA, 979 bp, Homo sapiens
  misc_feature (463)..(463): n is a, c, g, or t
agcgggctgtttggacgcgggtcgatcgggcgctgtgcgatggcggaggcgggcaccggccgggctgtagaccagtgatcatagtcgctgtgtgccggggagtggagcagccgggggatggatggacgaagctgaggcagcgtatcgtgaagcgattatgcgttgcaaggagaatggccgagcgtgacgcgcccagtcaggagggctaagaagccctggagcagtgcaggcgcccgaaagtccgcggagaccgacggacctcagtgggcaccaggacgctcgtactgactggactgacgctggatggttcaagagaccccccccgtcgacggtccctcagtatccgtgctgaacaaggcagtcaggtagcattcatggtggcccgcagccgccatctcgagcccagtctggccaggcgcccgtaggccgcaatgggcggcaagactggcagtccgcgtagtgnagtgtcccgtcgtgagcggatgacgtagggaggctatggctggggccatgtctgccagatacgtttgcactaagtgaagtgccgacgcaggataagttccggtgcaacggaaaggccttggcagtttaagcactcacattggtggccaggcagagtgcatggccctggagcaaaatagacgagacgttgtcagataggccgtcttgcgctccacgtgatcttgttactgggacctggaaaagcttgcttgtgtgctgaaggaagaggatgcgagtgcggacagctgtgtgaagatcacttaaaaggcattgccaggtgggacccataagaaaggaagaaagaggattgtagaaagggcgtggtggggatccacgcgatttgttgggacgaccacgcaaggttttaggggggatgcaggatcgacaaacacgaggaggtgattggaaaggcttgtggcaagaaattcagttgaattaagcaggtatggagcaagtattttggagcacagagaggtgg

SEQ ID NO: 642291 - DNA, 162 bp, Homo sapiens
tgtagcgcgtgtgaggacaggcagtaatgtgtcagtgtgatgggagctgtgcaattgactgtgcaaaagaggtgattgaatgtgcatggaaggtgtgtgtccactataacaggcatgtagtgtgtcaatgtgatgcagtcgcatgtcatgatgatggagaag

SEQ ID NO: 642292 - DNA, 274 bp, Homo sapiens
tgaaggagtggagccccatcccaatggctttatttatatttactgggacctgccctaatgtttaaccaagaaaatactgggtttaaaggggtttgttgagttattttcttaagcatcattaacccacatccccgtttttcctgttttcattgatctgttatagtcttcagtaaagcatcatatgagtttaacaaccctggaaaaaatcttaaaaactgtgtatagatcagctaacactgacatatgctcagatgcccaggtaatcaaattgtaa

SEQ ID NO: 642293 - DNA, 128 bp, Homo sapiens
gcaggcaaaaccacaggccagtaacgccagtacggtggttagcggcgagttccagcccatcgccagcgtattgctgatcatctcgatatgcgtggaacctgctatcagcgccaataccagcagtgaga

SEQ ID NO: 642294 - DNA, 345 bp, Homo sapiens
  misc_feature (269)..(269): n is a, c, g, or t
  misc_feature (282)..(282): n is a, c, g, or t
tgctggagattacaggcttgagtcaccacgcctggcctgttgtttatttttttgagatggagttttgcactccagcctgggcgacagagtgagactcggtctcatatatatatgagactgacaaattgatacagtttggatatatgtccctgccccagtctcatgttgaactgtaatctgcaatgttgggaggtgggggcctgggtggggaggtggttgggatcatggggggcagatttcccatggaatgggtttaacaccatcttccnggggtttgtcccncatggacagtgagtgagttctttgaggaggaactccattcattttaaaaatgtgttggccact

SEQ ID NO: 642295 - DNA, 195 bp, Homo sapiens
aggatatgtactagcaagaggcttgaaagattgttgatgcatttaaacagacagtgtacacatagttctccattgagacttagcactgggagatgcatggaaatatgattgtagagcaggagatccagagatacattggaaggaactttcatcctttgtgcagacacatttattaaggtatttcctgacgtttgg

SEQ ID NO: 642296 - DNA, 149 bp, Homo sapiens
  misc_feature (98)..(98): n is a, c, g, or t
caggatctctttcagagccttcagtggcaagggtcagaaactgggcagcactgccccccaggtgttgatgttccagctctccagcccaacaggcatgnaaaagtgacgcctaagcctgctcttccatctttatcgattaatcacactgt

SEQ ID NO: 642297 - DNA, 279 bp, Homo sapiens
  misc_feature (62)..(62): n is a, c, g, or t
cactggggccccccccgggggaaagggggtgttttttccccccccgtttcccccccgggggncttccttttttggagagggggcccccaacccgtggtgttggttttaaaaattaattttccccccggaagggggggttttttttttttgggggggggccccccccccccgtttttgccccccccccctttggggggcccttttttcccccgggggcgtttttttcccccccccccggggggggggggttttatggggtttttttgtttttttccctta

SEQ ID NO: 642298 - DNA, 370 bp, Homo sapiens
agcggggaacaatcactttggtaacagtgggcactgctcgggtgatgggtgtacccaaatctgagaatcaccactagagaacttatctggctggacacggtggctcacgcctgtaatcctagtacttggggaggccaaggcgggcggatcacctgaggtcgggagtttgagaccagcctgaccagcatggagaaaccctgtctctactaaaaatacaaaattagctgggcgtggtggcacatgcctgtaatcccagctactagggaggctgaagcaggggaatcgcttgaacgtgggaggcggaggttgcggtgagctgagattgcaccattgcgctccagtctgggcaacaagaatgaaactccatctc

SEQ ID NO: 642299 - DNA, 307 bp, Homo sapiens
  misc_feature (27)..(27): n is a, c, g, or t
tccccccccccccccccggggaaaacnacggttctcatttttttaaatcaaagggtaaatttccctgttttaaccttcatatgaggggaattaacccaaagggaaggcttctttcccctagcaaaagggttttgagatttattcagggtggggcagggggcagggattcctttctttttattgcgggggattctttgggaagaaaaaatcccaggttggttttttatctttctggtgaggggcccggggccctttctgcttgttttttactggtatgaaaaaagcggctatgaacctttttagccca

SEQ ID NO: 642300 - DNA, 938 bp, Homo sapiens
tacagtattgtagtagataaaaatagatgaggctctggacacgttgggtatgatgcaggatctgaatatgttatggtgagttaaaccacgatcattggtaatatttatgatcaaactgtcatgaagtaataggggcttaatacgttggcctgctctcttcaaattagactctaagtgaaatattgcatgattagtttgtaggcctttgaacaataggtcggaggatgaagtctcagggatacctaatatcctggttagggacaacatcagggtcgcctggtacttgcgtgtattaccgtaggagaggccagcatatataaagagtgggctagaataaaactactagagctcgccttcgtcagtgacgccatgtggtggaggctgagagtatgctgaaacttaagatcaggaaggctgaaaggagatctgggagtcgttcctgctgcagattcgaatgtcgtgtctgatattgtagcagtgcatttccttactgtgtagattggagtgatgtcttgctgtgtgtgtagggcgagaaatgccctgaactggtctcctgtaagtggatgacagcaaatattttatagaactgtcatttatcatattctagggctacgttaaattttgaaaggctgtggttatctgtgccgacccctaaggtggggggactagttcattacaccacatgggctaacgagtggactcatgtgtatgcatggattaggaatatctgggtgtagatatttggttaaatgggtattttccggttagagggtggaagatggattggttaagatcatgcgtttatgggttcgggggaaaaattgcaatgaagtagtcaaggtgggcggtgaaaaaatggttagaagcgtatatgagggaaattggaaaaaagtttgtaaaaaaggatggaaaaaaagataaggggtgcaaaatagagg

SEQ ID NO: 642301 - DNA, 474 bp, Homo sapiens
ccggacccccaaatggatctatctatagttaccttaaaaactacatatttaatacttaagaagcagagagtttctagttgaaaaatgtctctagataaatctctcaaacacattacagactgttaacatgtttagaaagagtaactactattaaattctgaaatcagatataagtagtcaccctcatttcccaaaggctcaaagcagaatgaggaggatgacatgagaaacttagttgggacctgcagtactgaacgactagcaatggatgtcttatcccaatactgcccatggatatgaaatggagttagatttgaagatgtttcattctttacagtaacagttttaaaatttctggcactataagtacagtgggttgaagtgtgtgtcccacaaaaagatatgtccaagtcccaacctctggtccttgtaaatatgaccttacttggaaatagggcctttgcaaatgtaatt

SEQ ID NO: 642302 - DNA, 681 bp, Homo sapiens
gcggcgagcctggaaacctggccggcgtaggcacatcatcctggtcctctcaggaaaggggggcgttgggaaaatgcaccatctccacggatgctggccctggcactgcagccaatgcaggcaaagaaggtgggaatcctggatgtggacctgtgtggccccagtattcccccgcatgcttcggggctgcagggcagggctgtgcaccaggtgcgatccgcggctgggcacccgtcttcctggaccgggagcagagcatctcgctcatgtctgtgggcttcctgtctggagaagcccggacgaggccgtggtgtaggagaggccccaagaaaaacgtgctgataaagcagtttgtgtccgactgtgagctggggggagctggactacctggtggtggtacacgtcgccccgggtgacctccgatgagctacatggtcaccatagaaggccctgcgtccctaccagcccctgggggccctcgtggtcaccatgccccaggcggtgtccagagggggacgtgaggctgcgagctgacgcattctgtatggaagacgggcttgcagggtgatgggaatcgtgggagaatatgagcggcttcacctgcacccacactgcactggtagtgtcgaccagcgtcttctccaggggcggcggagaggagctggccagctcgccggggtg

SEQ ID NO: 642303 - DNA, 210 bp, Homo sapiens
gcgttaacagggcaagacggtgaagttcgctcacgctctcgcagcagcttcacgagcttgatgaagttgccgacgaccgcgtcgcaaagtcgtcagtcacaagtcccgccacacgaccgcggcgggtaaagaactgaccccgtcgcaactgctcgagaagctcgggtttgcggccgcgaccctgcagactccggtcaaggatctttccgg

SEQ ID NO: 642304 - DNA, 866 bp, Homo sapiens
gaaccgcttcaattcgcgcacctactccaagttcagcaagctctctggtggtttccttcctcagactactgcgagtactaccggccccggttcttcctcctggagaatgtcaggaacgtttgtctccttacaagcgactccgatggtcctgaagctcacacctccgctgacctggtccgcatgggctatcagtgcaccttcggcgtgctagcaggccggtcagtacggcgtggccagactaggaggcgggccatcatcctgtgaccggtgccctggagagaagctccctctgtttcccggagccactgcagccgtgtttgctccccgggcctgcccagctgagcgtggtggtggatgacgaagaagtttgtgagccagataagcaggttgacgctcttccgtcttctccaggaccaatcagcgcgatgcagagacaacgattgtccgaccgtgaccgcgagagtgcggaagtaggagcctctgcgactggtacgatctcctacgagcggggagcctcagtacctggttgccagaggacacgactcgcggggcgcacagttaccagcccatccatcagggagcacatctgtaaggacatgatgtgcatcggtggcggccggcatgcggcacatccccttggcccccaggctcagactggccgcgatctgccaagatacgaggtgcggctctcagacggcaccatggcaggaagctgaggaatacccaccatgacaggaagaacggcgagacagctctggggccctccgtggggtccgctcctgccgtggaagccggcaaagctgcgacccgcagccagcagtcagaccctcatccctggtgctggcccacacgggacggcaaccacg

SEQ ID NO: 642305 - DNA, 363 bp, Homo sapiens
cagaatatagataaagactagtcaggatcctgcctattccttgaaggtccagaagtatgagcatcaccaattcctgcaagagctccaatttcaaatgtggggatttccaccatcccaccaccagctgttcattttttgcaaccccctacctcagtcccttactaccttagtcccttttttcacacacacacaaagtttttgttttgtttcagccagcaggtcctggaagtccagtgagactgtggaaagatccccaagcccaacagctataatcatgaagctataaccatttcatttgtcccaccctctcccaagctcaataaaatatcctctcaaaggcctgcagagggatttcaaggtcta

SEQ ID NO: 642306 - DNA, 153 bp, Homo sapiens
tggcgaatcctcctcctcctgaggatatagtgaaaaaacagcacagttacaggtatttacatgttccccggtctctccacgcttccaaaaggacacgtcccttacctccttgtgtcctcagcagtgatgagtggttagacagtgcagccacac

SEQ ID NO: 642307 - DNA, 750 bp, Homo sapiens
tgacgagcacgtcaaaggacagtaggtccccgcccggatctggcccacagcacccgagggaccctgcagcactacagaagtcccatggggcagacgggagccacaggcccagactccacagcccctcagtccacatgtcctggagcctgtggtggaagtccctgctcttccatcactgccgcctctcccccaggacctccgaagaaacaggccagggctgtcccaggcctgggcacactgggccaagatgtccagcaccaaccccgtctgacccctccaggccccgcccttcacccgaaagcagctcactccagcagggacaagctcactgatgaggatcggtgatggcgttgagtaaaggcttcctggagggctgctagtccggacagtgctctgcactcggatgatgaatcttgtgactccaaggaggtgggggacattagatagcccagcaaaatagacacatatgcgggatcatatttagagagtagtctgaggtcccaggcacagacagtgttgagggtctagcctcatgccacaagctgggtagcagccagctcagagccaaaagaaccagacttctagccgaaaatcccccccaactttgtttcccaggaaaggtctcacggaaagtacacttttaggacgatccctcatgtggggaccactatcccggcagaacaacgatctgcatcctgaggtgaaggaccggagtgaagagatcagaactttccccggccccgatgtgcc

SEQ ID NO: 642308 - DNA, 928 bp, Homo sapiens
tgcacacaccaacaccaggatccccaggttatgagtcagcacatgtcacccagaggcagggcaccatggtcttcatcggagcctgaggtcagagggcctcttctctgtggggaaccttgacaaccttcttcaggttccatatagtcttgaaaatctttcacaaacttccgttccagctccctcattttttctggtggaattttcattttatcaatgtgctcacgtaaaacactagcccatttctgcagagattccatcacagtccaaggtctagacatgtctgcaacaaaaatgacgagggtctctggcaaggattcagcagaaactgcaaatttcagcaggcctttgtggtacaagtctccatccagaatccacacgttgcagcgcgtgtgatcatctcggtcctcatcatggacactgaggtagagatattctaggcctcttccttttttgccatgctcagctccttgtagtttagtcatgagggttgttttaccagaaccatcttcaccgaagaccaggatgttcttgccggacggcagcttggacctggcgcgggtggacacttcgctcagaatggaggaccataggctctggccttcctcctcctcactggtcaggtcgccggcggccgccaccgcgggcccgttgggacctagcagcagcttcttctccacccccaccggcgccatcttgccaactgcagccacaaagagggccctcccccgggcccgccgaggacccgcgaggacccgggccggccagccccccgctcgccgtccctcgcgccgcgccgcccgccgaccttgccgcggcgactgcgccgcccaacgtgtcctctaggtctgcgatggccacgggctcccacgggttgcgaggccgccgaggtggcggcggcggtcaggcagccgccggggcagccatgcgc

SEQ ID NO: 642309 - DNA, 727 bp, Homo sapiens
tgcacacaccaacaccaggatccccaggttatgagtcagcacatgtcacccagaggcagggcaccatggtcttcatcggagcctgaggtcagagggcctcttctctgtggggaaccttgacaaccttcttcaggttccatatagtcttgaaaatctttcacaaacttccgttccagctccctcattttttctggtggaattttcattttatcaatgtgctcacgtaaaacactagcccatttctgcagagattccatcacagtccaaggtctagacatgtctgcaacaaaaatgacgagggtctctggcaaggattcagcagaaactgcaaatttcagcaggcctttgtggtacaagtctccatccagaatccacacgttgcagcgcgtgtgatcatctcggtcctcatcatggacactgaggtagagatattctaggcctcttccttttttgccatgctcagctccttgtagtttagtcatgagggttgttttaccagaaccatcttcaccgaagaccaggatgttcttgccggacggcagcttggacctggcgcgggtggacacttcgctcagaatggaggaccataggctctggccttcctcctcctcactggtcaggtcgccggcggccgccaccgcgggcccgttgggatgcatcgatactagttgttgtggaacggcgcgcgatcttgttccaagccatcgcaaggtatcttccgttagcg

SEQ ID NO: 642310 - DNA, 1168 bp, Homo sapiens
acatcttcaggccacaaatagaacgagcaattcatgtagttcctggcgggcccagaataacatatgcgagctgtgccaggcagccgcccttccagaggcccgaagtgccaggaccctcccagcgtccaatcctcagggacagcattccctaagaatagcgccagtacatccttctgtgaaagcttaatcttgtgggttgaaggaaatggagtgtcggttacgatagggagtgcatagcgttgcagtactgacagataaggccacaaggttgcgtgcatcatgactctcagatgactttgcaatcctgtgactcatagggctaagtgagcgcagacttgaagagggggaggcaacggttcgggcagctggggagaagttgaccggtgtctgaccccgctgtccatgtgtgcatgctcgatgttggcccagtggctgcgtcccaagaggcaatgtacactcaagctagactacatacaaggagaagcagaaacgacgtacagtcgaacccaggggtgtcgtcactggatagacaggagcttcttagtactgtgagatcgatgggagatctggcatcagtggagcgttaagggtctatgtagctgttggtgcaataacacggatagctagcagtgaagaacatcagccagtgcccagagaggagcaaattgtcccacgagcaataccagtgagcaggtaacagattagctgggagtaggtcgttgaacaggtggctgaatttcggatacgtggtctctccagagttgtgcaaaaaccaggattggttaccaaaggtcagtttgaagcgtcagactaagcttgtagaaggttgtcgagcctttcttggttagcattgcaagtcttcctaagccaaggtcttccttttcccgttgtggttaaccgaagagacattgaagatcccctagaaatgggttgaagaaaagcttccagaaaccttagggcgctctaggggaaaactccgtttggcaaggctcatctggtcacaggggctggggtgtcctggttccctgggagggggccagtgaagtcttaaagggaatggtcaacttggtaagttccctcccccctttggggggtctctctcaccgcaacaacgctggcatggtcccaccacactggggttactctgtcaacacacaaacaccaagcg

SEQ ID NO: 642311 - DNA, 953 bp, Homo sapiens
  misc_feature (306)..(306): n is a, c, g, or t
ttgagagagacaaatgggtcacagctggcaccctgggaatagcacataatccagggtgtgtctgtggtggtggacgtgcaggggaacaccatctgtcctgtgtcatgatgggaaaacaatcatgaaccactggtctaaattaggcctggccatgctttctcagcccctccctcatttaaatttgtcttcccaaagctgagctaaaactaaaccatttctcctctgctggaatgatggattggtcattcagaggaacaataccaggggtgggaggtttgcaggctgagttccccaggcatgggggtngcagggtgtccctgaggtttacccaaagcacagctcgctggcctgtgacctctgcccttcctcccacagtgtaagaccccccaggaagcagctggggcctgaacctctcacctaggaggtaggtttattttattttttgttagcatcaggctctgaaggagttggtatacattttgttttgaaaacatcttctggacttacaccagagcttagtgtcgtctttactatggaaagagaggagaatggacagaaatggtttaactgtgtggagttttgtttgttttgttttaaatggaagaaagaccaaaactttcctggtggatcagctagggcctttgaccctgcattaccacggcattttatccaggtgaagtccagggaaagaactcagccaaatggactaaggaacacacgagtttggaatgcgagactctgacatttttgtgttcttggaaatccaattaccttcccatgcccagatttccttcctgcctcttggaccaggctctggcactgaggttctcactgttcccaacacagacaaagcttcctgagggctggaggggcagcaaggggagaggagaatggggaagaagcgcttgatgtagttgtgtggaataaacagtattttttcttttgtaaaaaaa

SEQ ID NO: 642312 - DNA, 360 bp, Homo sapiens
cttgttctctgggaactacaaccagtttagggagacaaggttaaatgatcacacttaagaggggcataattcagccaggtgcagtggctcatgcctgtaatcccagcactttgggaggccgaggcgggtggatcacctgatgtcaggagttcgagaccagtctggccaacatgatgaaaccccatttctactaaaaatacaaaaaattagctgggcatggtggcatgtgcctgtaatcccagctactcaggaggctgaggcaggagaatcgcttgaacccaggaggtggagaggttgcagggagccgagatcacacacaccactgcactccagcctgggcaacaagagcaaaactccgag

SEQ ID NO: 642313 - DNA, 287 bp, Homo sapiens
gtctaagttgagatacagtttggcagttgtgagtatatagatgtaattaaaaccatgcaacttgtaaatcaccaaggagagtgagtgcaggaaggaggaaggcacccggccctctactcgtttgtagtctttatgcattgtacatttgagttgtgtgcaccgcaaaactgatgtaccaccgggcgtggtcgcacgcctgtaatcccagcatcctgcgaggccgaggtgggcagatcacttgaggtcaggagttcaagaccagcctggccaacatggtgaaaccccat

SEQ ID NO: 642314 - DNA, 112 bp, Homo sapiens
  misc_feature (76)..(77): n is a, c, g, or t
gctccagaggaacggacaatagaatagctagaagagttgcaattacttttgccaaaagaataagttattaggaggnntttttccaaggaaggcaaggggattgggtggaaaa

SEQ ID NO: 642315 - DNA, 423 bp, Homo sapiens
  misc_feature (423)..(423): n is a, c, g, or t
gacagagctgcactcgagggacgaggcctacccataatccagagaggcttgcccagaggaggactatgagcatgacgtgctaccggagccctacttaggggcgggatgacactccgaggtcagagctgtgtaccctgctgattgtcggaccctactccctatccttcgctctggtactgtttattgacacgtctgtgtcacatattgtggcctgaatttgaattaatgataataacttatgaaatcacatatttatcatggtgctgtatgccttttatccctaccatgcctttactgatcatgtgcagtggtgagaggctatgacactgcgtaccaccgggttagtcatgtgatctacatttcattatctaccctgctgctgctcgaatcctagcgcattctagatgtagatacgctagacgn

SEQ ID NO: 642316 - DNA, 257 bp, Homo sapiens
tgcttccccgaccgccggggcaggggccccacggggaacgccagggaacgtgaggaatccggagtcaacactgggccactgtgtgctgccagccgggcgggccgtgatttataaagacagcggaggcttggctggtgtcggggcggtgaggtcacggcggccgggggctctggaatttcttcagaagaattttgcttaccaagccacatacttttctagccatcagtttgatcagaggcaagatgaaaaatatgcta

SEQ ID NO: 642317 - DNA, 302 bp, Homo sapiens
tagctcgctcaaacccgtggaccatgagctgcatgcaatctaggacggctttgaatgtagcccaatgcgaatttgtatcactttcttataacactctgagattagttttgcaatattaatttttttttttctttaccttcatcacctttctctcttgttatttgtttttaacttttggccccagaactattcttcttctaatgtggcccaggtaaaccacaaaattggatacccctgcttgtgttcctaatcacttgaaacccggccatattcatgctatctccactttctgtctatttcta

SEQ ID NO: 642318 - DNA, 898 bp, Homo sapiens
aatcatgtgtgactgagagaactgctaatatctttatggtatcttcctctgtattagtagaatgcagcagaaatctcatctcttttgagaagttaagattatagtgttactcgagaatttcgtgttaatctagaatgtaaactatagaagtggacccgctcaacctatcagtagatgtacatacggaaataggtgacttgagttgataaagtaggatctggagttcatcttcgatttaattgtatttgagtaacaaacgtaccaatacaagttctcgacttaagacacgaattaagtatgtatttgcctgtgaattgggggttagaattgctagagttggtgaaagtatttgcagcacctgtgacagtacccagactgagtgaatgagctcctaagccttcatattaaaaagagcggtccccaatcgacgtgacactacggtactaatggaagtgattttcttccctcaggcgttgagagatcctgatgcacgtatggtgcggatgtgccagggtggttattacattgataatgtcagagttatatgctactattgaggtcatcttctttgcggaaatggtacgacatattgtgagactggcccttctaaagtagagattagagttaaactctgtctgaggattaacatatatactgattagaggtgtacgatgctatgcgatcggaaaactggtccgaacaattcagttaggttttgagggagagatatcccgactggtctaggggtaaaaaaggtttactcgtgttttggggcccgggttttatgggggagggaacgagagagagaagaaaaaaagggggtagagaaaaataaaaaaaagggggttatggggggtgttatttgttaacatgttagtatttatttactttttaagga

SEQ ID NO: 642319 - DNA, 251 bp, Homo sapiens
aagaatgaaaagatgattcgctacttcagttcattaaaatgggattctatctttgaagttcagaaaaagctgcatttcgatgacagctatggttaaaaaaaaaaagcacactaggtgtctaatcagagagcagaggaaatcattgggaaaataaagaacaaaagctataataatgggtaaaggattcccagttagtaggttaaaatctcaggagaggaatggatagcactacaaccaaggtgttcacattc

SEQ ID NO: 642320 - DNA, 351 bp, Homo sapiens
  misc_feature (10)..(10): n is a, c, g, or t
  misc_feature (23)..(23): n is a, c, g, or t
  misc_feature (51)..(51): n is a, c, g, or t
  misc_feature (73)..(73): n is a, c, g, or t
  misc_feature (124)..(124): n is a, c, g, or t
  misc_feature (215)..(215): n is a, c, g, or t
ctcaagttcnacccttcctcggncaccaatgacttcccagggaggcttttnaaaccaaaggattttttttccnagccccattgttttgaaaaaaatagtgtttaaaaggttccttaggagtctnacacacagagtcataaagctacaaccagtacccttcatttcacagacaacaacaggtggggaccttgagtatagcggtcacctgtccaaanacacacaccctcatcctgccacagtccctgccaagcctagattggctgattccaagttcttcgttcttcatggctaaggctacctttgaagtggttttgtcacatgtttcccctgttgctgtttcagatcccgtgg

SEQ ID NO: 642321 - DNA, 413 bp, Homo sapiens
aaaaccgcaatctacaaccatctgatctttgacaaatctgacaaaaacaagaaatggggaaaggattccctatttaataaatggtgctgggaaaactagctagcattatgtaggaagctgaaaccggattccttccttacaccttatacaaaaattaattcaagatggattacagacttaaatgttagacctaaaagcctagaagaaaacctaggcaatgggccaatattcaacattcttaaagaaaagaattttcatgagccactgcgcctggcctgttgtcatctgttttatgtctgttcatatccttcgcccactttttgatggggttgtttttttcttgtaaatttgtttaagttcattgtagattctgaatattagccctttgtcacttgagtagattgcggtgtttg

SEQ ID NO: 642322 - DNA, 1463 bp, Homo sapiens
gaccttgtccagtgaaacaccctcgcgctgggaacgtcagttcgcttctcatccatcatcctctctctcttgctttgaacatggctgcggcactaaagcagacagctgttccgggcacttacagcaaacagctggtggcctgctcgaagccccccagaaaggtgctgtggttcattccaccatctgaccaactaactacgacagtcagctcacaatcgcagcgacacggcctgacacacatacaccctcctgcagcgagggcaaccccgcacaacgcgctgccgccccaacacccgcacagctgcgcacaaccccagcgaacgtgggccgcaacctccctcccccgccgctcgctcacccataccacgcacctcccctgcaccacccacgacgcaactcacgcatccccctgacccgcagggcccgggcacagccacgccggccctccagccgcaacaccgccaaacggagcacaccacgccactgcttccctttcggacacaacccatgaactcaacaaccacagatgtgcaactgacacgacagcacattagaaacccttttccttcaactttcaactcatccacgggaacttacaccgttgcctcccttgggcttgcgaacgcccttgggcatactttacctacgcaaacgtggctaccacctccgtaccccccttcaacgcctggctggctccggatgcccccaaacctctaggacctctcggctcgacacccacgcgccacctcccacactcttcaccaccacactcttacgcggcctcctcccacacctctcacagacattgcttccccacaccaccacgactcaggctccggctcgacacacaccctctctcggaagcaccaacgttccttggctacacgtcaacccttcacacgctctcagttgcctgctacaccccatcctacagcccctatctaacgctctactccctccaccgctaccttcaaccttggccacgctcttagtgcctccctaggcggggctatatcacctttatctaaccccaacccacttctcaccgcctgtgctccctacaggcttttccaattgggctcgcttacacaacttcacaccgcgtccgcactgtcggccccagctgcgcctggccctcccatacaccgttcaacacaaccgcgcctcactgcacagagcaacactcccgcaagccaacctccgcgccccccccacacagggcctgagacacccggcctggccccatacgcacacatcgagccggcatccggcgacccacctggccacacgccgcggcaccgactcccggccccccccccccaccaacaagtgccacaaaaaccgacgccgccctacgcaactcccgcgccccctctccgcccgtcgccgcgcaatccatcacccacgcccccacgccatcgcaaaaacacacacatggcaccccccgtccgccgccctgcaca

SEQ ID NO: 642323 - DNA, 383 bp, Homo sapiens
gtcgacaatggaacgtaattgaatggtgttggggaagatgaatcgaaggatggatggaatggcagcgaagggactggaatggaagggaatgatggaatgtagtagaatgaatgaatggacccgcatggaatcaatggaatggaatggactcgaatggaatggaatggaatggactcgaatggaatgcaatggaatggaatggaatggaaaagaaaagaatggaatggaatggaatggaatgagtttggaatggactgcaatggaatggaatggaatgggcccaacaggaatggaatggaatggaatggaaaagaaagaaatggaatagaatcgactggaatgtaatgagtttggaatggaatgcaatggaatggaatggagtg

SEQ ID NO: 642324 - DNA, 298 bp, Homo sapiens
aattggcaagatgctgagaaactggctcactgatacagtgtcggtgggagtgtaacgtggcatagtcactaagcggaaaagggggttgacagttcttcgaaaaaaaataaaaagaaactaaacatacaactaccagatgacccatcaattacacttctgggcatttatcccagagacatgaaaacctgtatacctatgttcacacaagaaccagtacacaaatgcttatagcaacttgagttcataatagtcccaaagtgaaaacatcccagatgctattgaaacttctaaaactagg

SEQ ID NO: 642325 - DNA, 329 bp, Homo sapiens
cttgtatctttgttttgttttctttttttctgagatggagtctcgctctgtcgcccaggctgggtcaccaggcatggagtgcagtggcatgatcttggctcacggcaacctccacctcccaggttcaagcgattctcctgcctcagcttcccagcagctgggactacaggcacgcgcaccacagccggctaattttttatttaattttttgtagagacgaggtttcgccatgttgcccaggctggtcttgaactccggggctcaagcgatcctcccgcttcagctccccggaattcagctgagcgccggtcgtaccataacagtaggtc

SEQ ID NO: 642326 - DNA, 374 bp, Homo sapiens
  misc_feature (7)..(7): n is a, c, g, or t
gcattantatttgtgattgcaagctgagtacattttgctggtgtattttcaggtaacatgatttccgttcatttctggtggtgggaggggactgaagcggtttagtacttttccagaatgcaacctataaaatcagtgacaagaaacattccaaacaagcaacagtcttcaagaaattaaactggcaagtggaaatgtttaaacagttcagtgatctttagtgcattgtttatgtgtgggtttctctctcccctcccttggtcttaattcttacatgcaggaacactcagcagacacacgtatgcgaagggccagagaagccagacccagtaagaaaaaatagcctatttactttaaataaaccaaacattcca

SEQ ID NO: 642327 - DNA, 370 bp, Homo sapiens
agtactgcaagctggcaggcatgcgagctggcaggcatgaggaaaacaagaaacttctggacagactgtatctcccagcctttcagggccaatgagacaaagatttaaggaagactgtcacctcacaaagagctctaccaggctctcagatggcacccctaaggggttacactgtagaaaaagggaaggatcaacaatagacgaagtctcatcaaaatgcaactcggctctgaccagctacttgccacctggatggagatggacagctcaccaccgaccacatttcccatggaggaaaggaaagccctctctggaagaaaacaccctgctggagtctctggcttgtgatacacaatgagcagcacaccac

SEQ ID NO: 642328 - DNA, 256 bp, Homo sapiens
actttaaaaagtacaaaatacagacacaaaacaatagtattcctgtaaggacttattatgagccaaacagctaagctacatacttgatccattacctcatttaaatctcacagcactaggaagcaggtactgttattggccccactttaaagattaagacactgaggctcagagacactgaggcacttcacgatgatctccagcatctgaatgtaaacccagacattctaattcaacgtccaactgattaaccatg

SEQ ID NO: 642329 - DNA, 478 bp, Homo sapiens
gggaaggatagatggcaaggaaagagggaaaggatgagtcatgtggtaaaagagatgcataagaggaggataatgtggtagaagagtataggggaatgcaaagtagaggggtagatgataagaggaggagatgaggcaacaggaggagaagtgagttggattgcggggatcaggagtatgaagagggaagaatggggaggaagtggatgtaagatggcaggcaaagagagtagaagaatgtgaactatgggttgataagtagagaggaaagatgcaaggagacaggtagttggacaagaactagagaagggttcatataagatgcagaagttgtcagtggtaacaagatatgggacacatggagaagagagaaataaaagagcatagaagtagagctatacagcacacgagatatatatatatatctatatatatatatatatatatatatatatatatagtgccgaattcctgcagc

SEQ ID NO: 642330 - DNA, 112 bp, Homo sapiens
gggttgatatatatgagtagtaatggaatggctgagagcttggggggtagcagtcagactgtggcccaggctgctatgcctcgactctttgtagtatggaatatattacctt

SEQ ID NO: 642331 - DNA, 674 bp, Homo sapiens
gtggatcgtgttcgcactccattttagctgtctggacacttcttataatagacctgatgccacatgatttggctagagcagccgcttacgggttggtgcatcggaccagtgtccctaaggaagtcgttgatcatatcatctttggtacagtctattcaagagaaagtgaataacaagcatatgtggctagagaggctcgccctttgagatgctaggcattctctgacatagactcctgcctcacatctgtcaccatggctctgtatctctgccaaccaagccatgaccacaggtgttggcattgagttgcttctgcccagtgtgatgtgactcgtggcaggattggtgtagagttagatgtccgatgtccctatcggcgtcagcctcaaggtaaccacctgagaataatctgatgcttgagtctcaattaatggccaacatctatgtgtcccagcgatctgtctttaatctctaaattccgactttaatttgcctagcacctgagctccctgccggtttgctgagttctccaccagtgagaccatggggccactctgaatgaccgaactggccgtgccttatgcactgttctcgggtggaacagggatgaatatgcactgggctctccacagtctagccatgaaggcacaggatgaaagggcctcctttctgat

SEQ ID NO: 642332 - DNA, 185 bp, Homo sapiens
ctggctgggcagaaacgctgagattaacagtgccttgagcatcacagccggcaagggtctccgagctcgcatccccggcctggggcagctggaggtgcctcagaaggtgcattctgcttcctgcaggcgtttgaaacaccaaggcactccaggtatcctgaagtcaaagtagcagccccggttgt

SEQ ID NO: 642333 - DNA, 1707 bp, Homo sapiens
  misc_feature (797)..(797): n is a, c, g, or t
  misc_feature (836)..(836): n is a, c, g, or t
  misc_feature (843)..(843): n is a, c, g, or t
gcttcctggtgctgcccctgtggcaagactggacgtgtggacaacgaatgcgcccacgtgtctgtggccacacagcccctgtgctaaacatcgcctggtgcccgcacaatgacaacggtcattgccagatggctccgaaggactgacacatatcatggttgtggtgagatcccgcgtatggggtgcctcgatgcgtgtgcccgtgtctgggtagtccctgtcgtcaccctgagagtggcactacaccaatgcgtgtgtggcatttgtgtgcctggcactaccacagcccataacgtgtctgctcagtgcacggttgtgacaacggtgatcatgggtgtggtgacgtgggcactggggcggtcatgtctgacactgggtcccagaagtgtgcgacctcagacactgatctacagtgtaggatctggagccgtagatgggaggcctcatttgttaccgtacctgcccggtgacatatgcgctgttgctgcatcatcggagccccggcatagaggcgatcgtgatcgtgacctgagaatggacccgatcgcgccgacgcatggggatcccgtgcaccgctgttgtgctaggtgctactgtgtcgtgaggggcacagatcctgaccacgggcttcagccgcatgagtgacgcggcaggtggcgctgtggtgacacaaagcacctggaggagccgctgtccctgcaggagctggacaccagcagcggtgtcctgctgcccttctttgaccctgacaccaacatcgtctacctctgtggcaagggtgacagctcaatccggtnactttgagatcacttccgaggcccctttcctgcactatnctctccnatgttcagttccaaggagtcccagcgggggcatgggctacatgcccaaacgtggcctggaggtgaacaagtgtgagatcgccaggttctacaagctgcattggagcggaggtgtgagcccattgccattgacagtgcctcgaatagtcggacctgttcccggaggacctgtatcccacccaccgctggggtcccgatcctggcctcacggtctgaggagttggctggtggggtcgggtatgctgggccccttcctcatctccctcaaggatggctacgttacccccaatggagccgtggagtctgagggtcacacccggggcctggtacccgggccgcaggtgggcacgcagcctagtaggcctagtggcagctcccagctcgcgatgccgtgtctcgtgctgagaggaggccgatgcggaagctccagggccacgtgtgctggagcctcacagaagccgcttgtacacggctggcgtgagactgttccaggccatcgtagagccccgcatgggcctccagtcgtggtctagccaattcgcatcctatccaagatcagcctccgcatgtccagtcactatcggcagaggaaggagccctccttataaagatggcgtgaacttttcttgcttgaaggcttcccgctgtggctggccccccttcttgggggctctcctactcgggtcgggcgaaccgggcgtctggagcggccccgggcctcagggttttttcagcgcggttttttaccagggtgaggcccgcgggcccccagtggcgcgccgttttcgaagccggggtcgttcctccctccacgaggcgcccaccgacccggccctgcccgcgcccgcgcgcccccccccccccc

SEQ ID NO: 642334 - DNA, 164 bp, Homo sapiens
tttgaaacccccaaaatttggggcctttttttccggaaataaaacatgttttttttcagaaagggaaaatatgggggcccccccaccttttctgttaaaggggggtatctttaaatgtccacccggttgaaccccgttatgagaattttctgcccagggtttta

SEQ ID NO: 642335 - DNA, 413 bp, Homo sapiens
  misc_feature (146)..(146): n is a, c, g, or t
  misc_feature (375)..(375): n is a, c, g, or t
caagtgtctgacctggagcgagtgaccttaaccttcctgaaccccaggggcctctttttaattatttattttttattttatttatctattttttgagatggagtttcactcttgtcgcccaggcgagagtgcaatggtgccatctnggctcactgcaacctcctcctcccaggctcaagcaattctcctgcctcagcctcctgagtagctgggactacaggcacccaccaccatgcctggctaattttttgatttttagtagagacggggtttcaccatgttggccagggaggtctcaaactcctgaccccaggtgatctgcctgccttgggcttcccaaagtgctgggattacaggaatgaaccaccatgcccnggcctttaatttcattttttgcgggctggctcttttgc

SEQ ID NO: 642336 - DNA, 207 bp, Homo sapiens
gccaggtctcagaatgtgtaacagtgcctgttcaattccccttaccccaacagaaatagactttaagagtccacagaaaaagacatacaaggatcttaaaatatacaaaaatatcttttagcgactcataagaagggaaatcaaaacaaaaactacactgttgtataatttttcacatattatcaatttccaaccatgacctgtccc

SEQ ID NO: 642337 - DNA, 369 bp, Homo sapiens
  misc_feature (35)..(35): n is a, c, g, or t
atttttggttggttggtttggtttggttggggggnggggggtggttttttgccccccatttttgggttccttttggcctggttgaataaaagcggagggtccttttggttggttttttaaggctccctccaaaattccccttgggggttggcggggggggtgggttgccttggggtaaattttttccgggggttggttttgcccggtttatttaacccaaaatccccccatgaagggggctttttttggttggcccttggccaggatttgggccttaaaagatttttttggttttttattggaaccaaaggttttccccctttttccagggggggcttttttttggggcccttttgttccttattaaaa

SEQ ID NO: 642338 - DNA, 150 bp, Homo sapiens
gagtacttgcggcacctggctcgcgtgcgccgcgcgacctcctctgcttcgtgtaccgctggattcgccagaccctcctggcagcgacgtggaaagtcaggcacaggcgggcttccgcggctgggggactcctgggaaggataccaagtc

SEQ ID NO: 642339 - DNA, 1724 bp, Homo sapiens
  misc_feature (371)..(371): n is a, c, g, or t
  misc_feature (803)..(803): n is a, c, g, or t
  misc_feature (1555)..(1555): n is a, c, g, or t
cacgaggcccgtcaacgtgatgattcggtcttcgtgtttgactcttttagttcctcacgtacctgttttcacgagaaaacagcatctgggatgagaagtatgacgcggtggacatgcaggacatgaacaaccccctgtctcattactggatctcctcgtcacataacacgtaccttacaggtgaccagctgcggagcgagtcgtccccagaagcttacatccgctgcctgcgcatgggctgtcgctgcattgaactggactgctgggacgggcccgatgggaagccggtcatctaccatggctggacgcggactaccaagatcaagtttgacgacgtcgtgcaggccatcaaagaccacgcctttgttacntcgagcttcccagtgatcctgtccatcgaggagcactgcagcgtggagcaacagcgtcacatggccaaggccttcaaggaagtatttggcgacctgctgttgacgaagcccacggaggccagtgctgaccagctgccctcgcccagccagctgcgggagaagatcatcatcaagcataagaagctgggcccccgaggcgatgtggatgtcaacatggaggacaagaaggacgaacacaagcaacagggggagctgtacatgtgggattccattgaccagaaatggactcggcactactgcgccattgctgatgccaagctgtccttcagtgatgacattgaacagactatggaggaggaagtgccccaggatataccccctacagaactacatttggggagaaatggttccacaagaaggtggagaagaggncgagtgccgagaagttgctgcaggaatactgcatggagacggggggcaaggatggcaccttcctggttcgggagagcgagaccttccccaatgactacaccctgtccttctggcggtcaggccgggtccagcactgccggatccgctccaccatggagggcgggaccctgaaatactacttgactgacaacctcaccttcagcagcatctatgccctcatccagcactaccgcgagacgcacctgcgctgcgccgagttcgagctgcggctcacggaccctgtgcccaaccccaacccccacgagtccaagccgtggtactatgacagcctgagccgcggagaggcagaggacatgctgatgaggattccccgggacggggccttcctgatccggaagcgagaggggagcgactcctatgccatcaccttcagggctaggggcaaggtaaagcattgtcgcatcaaccgggacggccggcactttgtgctggggacctccgcctattttgagagtctggtggagctcgtcagttactacgagaagcattcactctaccgaaagatgagactgcgctaccccgtgacccccgagctcctggagcgctacaatatggaaagagatataaactccctctacgacgtcagcagaatgtatgtggatcccagtgaaatcaatccgtccatgcctcagagaaccgtgaaagctctgtatgactacaaagccaagcgaagcgatgagctgagcttctgncgtggtgccctcatccacaatgtctccaaggagcccgggggctggtggacgggaccttttggaccggatcccgcgtacttcgcctcactacgctgcgggctctccacgcgccctccgcggcctcaacgccgctttgtacgccccttgggctttggcgggattggccctc

SEQ ID NO: 642340 - DNA, 167 bp, Homo sapiens
agactgagaaagatattcagtccaaccattgtatggaacaccatcaacagtatttgtggtaaaataccaaaagcagctttttcttctttttaagagacagggtcttgctccgttgcccaggctgcactgcagtggtacaaccacagctcactgcagccttgacctcc

SEQ ID NO: 642341 - DNA, 2722 bp, Homo sapiens
  misc_feature (38)..(38): n is a, c, g, or t
  misc_feature (50)..(50): n is a, c, g, or t
  misc_feature (1369)..(1369): n is a, c, g, or t
  misc_feature (1801)..(1801): n is a, c, g, or t
  misc_feature (2553)..(2553): n is a, c, g, or t
aagcatagtagagcccggggttaatcggacgaggcggngctgagtgaccngagtcgggacgcgggctgcgcgcgcgggaccccggagcccaaacccggggcaggcgggcagctgtgcccgggcggcacggccagcttcctgatttctcccgattccttccttctccctggagcggccgacaatgtccaccacggtcaatgtagattcccttgcggaatatgagaagagccagatcaagagagccctggagctggggacggtgatgactgtgttcagcttccgcaagtccacccccgagcggagaaccgtccaggtgatcatggagacgcggcaggtggcctggagcaagaccgccgacaagatcgagggcttcttggatatcatggaaataaaagaaatccgcccagggaagaactccaaagatttcgagcgagcaaaagcagttcgccagaaagaagactgctgcttcaccatcctatatggcactcagttcgtcctcagcacgctcagcttggcagctgactctaaagaggatgcagttaactggctctctggcttgaaaatcttacaccaggaagcgatgaatgcgtccacgcccaccattatcgagagttggctgagaaagcagatatattctgtggatcaaaccagaagaaacagcatcagtctccgagagttgaagaccatcttgcccctgatcaactttaaagtgagcagtgccaagttccttaaagataagtttgtggaaataggagcacacaaagatgagctcagctttgaacagttccatctcttctataaaaaacttatgtttgaacagcaaaaatcgattctcgatgaattcaaaaaggattcgtccgtgttcatcctggggaacactgacaggccggatgcctctgctgtttacctgcatgacttccagaggtttctcatacatgaacagcaggagcattgggctcaggatctgaacaaagtccgtgagcggatgacaaagttcattgatgacaccatgcgtgaaactgctgagcctttcttgtttgtggatgagttcctcacgtacctgttttcacgagaaaacagcatctgggatgagaagtatgacgcggtggacatgcaggacatgaacaaccccctgtctcattactggatctcctcgtcacataacacgtaccttacaggtgaccagctgcggagcgagtcgtccccagaagcttacatccgctgcctgcgcatgggctgtcgctgcattgaactggactgctgggacgggcccgatgggaagccggtcatctaccatggctggacgcggactaccaagatcaagtttgacgacgtcgtgcaggccatcaaagaccacgcctttgttacntcgagcttcccagtgatcctgtccatcgaggagcactgcagcgtggagcaacagcgtcacatggccaaggccttcaaggaagtatttggcgacctgctgttgacgaagcccacggaggccagtgctgaccagctgccctcgcccagccagctgcgggagaagatcatcatcaagcataagaagctgggcccccgaggcgatgtggatgtcaacatggaggacaagaaggacgaacacaagcaacagggggagctgtacatgtgggattccattgaccagaaatggactcggcactactgcgccattgctgatgccaagctgtccttcagtgatgacattgaacagactatggaggaggaagtgccccaggatataccccctacagaactacatttggggagaaatggttccacaagaaggtggagaagaggncgagtgccgagaagttgctgcaggaatactgcatggagacggggggcaaggatggcaccttcctggttcgggagagcgagaccttccccaatgactacaccctgtccttctggcggtcaggccgggtccagcactgccggatccgctccaccatggagggcgggaccctgaaatactacttgactgacaacctcaccttcagcagcatctatgccctcatccagcactaccgcgagacgcacctgcgctgcgccgagttcgagctgcggctcacggaccctgtgcccaaccccaacccccacgagtccaagccgtggtactatgacagcctgagccgcggagaggcagaggacatgctgatgaggattccccgggacggggccttcctgatccggaagcgagaggggagcgactcctatgccatcaccttcagggctaggggcaaggtaaagcattgtcgcatcaaccgggacggccggcactttgtgctggggacctccgcctattttgagagtctggtggagctcgtcagttactacgagaagcattcactctaccgaaagatgagactgcgctaccccgtgacccccgagctcctggagcgctacaatatggaaagagatataaactccctctacgacgtcagcagaatgtatgtggatcccagtgaaatcaatccgtccatgcctcagagaaccgtgaaagctctgtatgactacaaagccaagcgaagcgatgagctgagcttctgncgtggtgccctcatccacaatgtctccaaggagcccgggggctggtggacgggaccttttggaccggatcccgcgtacttcgcctcactacgctgcgggctctccacgcgccctccgcggcctcaacgccgctttgtacgccccttgggctttggcgggattggccctc

SEQ ID NO: 642342 - DNA, 367 bp, Homo sapiens
cgcctactactactaaattcgcggccggtcgacactcatccttgttccaggacttagatagcctggaaagctgtttgccttcggaagtcgttattatttctgagtcaccgaacaacagctcggctgcacctttaatctcgctgacccaggcgcggcccgggcctggcctgcgcacgaaagatagtgcgacgttcatatcacgtgcacgggtcaggcccacatatagaagacgcttgttctccgccaatgcctctgcctgcatggcttggccagttacgctggcttcggcattgagtgcggcttggggctgggaccgcttgccccagctctttaaccagcagtggacgaagcggttggcgagtcgacg

SEQ ID NO: 642343 - DNA, 809 bp, Homo sapiens
ctgaatataatcaccaccccccctctctggaagaaaaaattcttttttctcgcgacaggaatatacttatatttcttaaataataagagtgagatgcgcttctcattataaaaaacaaatactacttctatatattagaacatcacacccctcaatctaatctcactccactgtttttgttttgttgcttccctccctcccccccccccccgcgctgttttctttctccctcgtgtgtggcgtgataattctgtggacctctccctcccccgcttgtttgttttctcgcccctgcgcctgttttgtttttttttctctatactcacccctctctctcggtgtgtgcgcgctcctctcttttatcttttgttgatataacaccccctcctcctctccctctcacacatatacatacaccccccttgtggtgtgggcggccccccccccctcccctctatgttgtgcgacatgcgccgctcccgggtgtatgtccgccctcgattttgttttttattggtggtgcctcaccaaaggagcagttatagatgtgcgccccacccctccccccccctccgccctctcctcctcctcctggcgggcggcggcctcttctttttttatataataagaagatagatttgtattaagaataaattttatttatataaatatattttttttttttttttttttttgttgttttcccccccccccttttgtttttttctctctctctcttgcttcggccacacacaaaatcctcctctctatatatatatataaatatattttctctctctcccccccca

SEQ ID NO: 642344 - DNA, 2862 bp, Homo sapiens
  misc_feature (1509)..(1509): n is a, c, g, or t
  misc_feature (1941)..(1941): n is a, c, g, or t
  misc_feature (2693)..(2693): n is a, c, g, or t
gaggcctgggcttggagaaggagcgtcgacaggggtgaaggtgaagttctggaaatagaaacagtgatgataccacatcacagcctgggggccactccactgtcacagggctgttgggaagaagctgtaaggtgctgctttcatctatacaagttgtgctggtggccagggtaggcgtgagtttgggaggtgaagtatctgtgtgtgtgaaggattctgtttgagaaagaaggaaatgggaacttactaattgtagaatggaaactagcaaaattaggcaaggcatggtgagagcatgtgcagcaggaagaggagaccccgcagagctcagaagaggtggaggaggggctggcctccccggcctcaggacttcagggatcccactgcgtcttctctgctcctgcttcggctggatttcaccggccaggtgtctctctccccagcactaccagccactccaggatgtccctggcctgccaccagcctccaccagtgggaaaagcccctacaccagtggatatcatggaaataaaagaaatccgcccagggaagaactccaaagatttcgagcgagcaaaagcagttcgccagaaagaagactgctgcttcaccatcctatatggcactcagttcgtcctcagcacgctcagcttggcagctgactctaaagaggatgcagttaactggctctctggcttgaaaatcttacaccaggaagcgatgaatgcgtccacgcccaccattatcgagagttggctgagaaagcagatatattctgtggatcaaaccagaagaaacagcatcagtctccgagagttgaagaccatcttgcccctgatcaactttaaagtgagcagtgccaagttccttaaagataagtttgtggaaataggagcacacaaagatgagctcagctttgaacagttccatctcttctataaaaaacttatgtttgaacagcaaaaatcgattctcgatgaattcaaaaaggattcgtccgtgttcatcctggggaacactgacaggccggatgcctctgctgtttacctgcatgacttccagaggtttctcatacatgaacagcaggagcattgggctcaggatctgaacaaagtccgtgagcggatgacaaagttcattgatgacaccatgcgtgaaactgctgagcctttcttgtttgtggatgagttcctcacgtacctgttttcacgagaaaacagcatctgggatgagaagtatgacgcggtggacatgcaggacatgaacaaccccctgtctcattactggatctcctcgtcacataacacgtaccttacaggtgaccagctgcggagcgagtcgtccccagaagcttacatccgctgcctgcgcatgggctgtcgctgcattgaactggactgctgggacgggcccgatgggaagccggtcatctaccatggctggacgcggactaccaagatcaagtttgacgacgtcgtgcaggccatcaaagaccacgcctttgttacntcgagcttcccagtgatcctgtccatcgaggagcactgcagcgtggagcaacagcgtcacatggccaaggccttcaaggaagtatttggcgacctgctgttgacgaagcccacggaggccagtgctgaccagctgccctcgcccagccagctgcgggagaagatcatcatcaagcataagaagctgggcccccgaggcgatgtggatgtcaacatggaggacaagaaggacgaacacaagcaacagggggagctgtacatgtgggattccattgaccagaaatggactcggcactactgcgccattgctgatgccaagctgtccttcagtgatgacattgaacagactatggaggaggaagtgccccaggatataccccctacagaactacatttggggagaaatggttccacaagaaggtggagaagaggncgagtgccgagaagttgctgcaggaatactgcatggagacggggggcaaggatggcaccttcctggttcgggagagcgagaccttccccaatgactacaccctgtccttctggcggtcaggccgggtccagcactgccggatccgctccaccatggagggcgggaccctgaaatactacttgactgacaacctcaccttcagcagcatctatgccctcatccagcactaccgcgagacgcacctgcgctgcgccgagttcgagctgcggctcacggaccctgtgcccaaccccaacccccacgagtccaagccgtggtactatgacagcctgagccgcggagaggcagaggacatgctgatgaggattccccgggacggggccttcctgatccggaagcgagaggggagcgactcctatgccatcaccttcagggctaggggcaaggtaaagcattgtcgcatcaaccgggacggccggcactttgtgctggggacctccgcctattttgagagtctggtggagctcgtcagttactacgagaagcattcactctaccgaaagatgagactgcgctaccccgtgacccccgagctcctggagcgctacaatatggaaagagatataaactccctctacgacgtcagcagaatgtatgtggatcccagtgaaatcaatccgtccatgcctcagagaaccgtgaaagctctgtatgactacaaagccaagcgaagcgatgagctgagcttctgncgtggtgccctcatccacaatgtctccaaggagcccgggggctggtggacgggaccttttggaccggatcccgcgtacttcgcctcactacgctgcgggctctccacgcgccctccgcggcctcaacgccgctttgtacgccccttgggctttggcgggattggccctc

SEQ ID NO: 642345 - DNA, 200 bp, Homo sapiens
agtgaggcagatcctcatggcttggtgcggtgccatgatagtgagtgagttctcacttggtggtttatgcaagagctggtgtttaaaagagcctggaacttcctcctctctcgctgctctctctcaccatgtgacacactggctccccttcaccttctgccatgattgtaagcttcgtgaggccctcaccagaagcagat

SEQ ID NO: 642346 - DNA, 858 bp, Homo sapiens
tttttctgccaaggaggagaagagaggagaggagagagaccaagataacaagatcagagagtccgaaattggggtatgctctatatgagtcgcccgcagttctgctggcccaatgagatcacttgctctgtgaacccgggtctcttcacagggccttcaacatggatgtgacgttttagacgaagatcgcctgtggccactctacaacaattggggtccccctctgaattaacgccttcccaatgggaacccatttttgggagaccccggaagtttctatgaacccctccggagcttcccctgttacaacaccgctccccagtccccggccccccttttttggccccccccggccggaaataccactggcaattatctaccaaaacagtccttcctgcaaaaagacccaatgtcccgtcgcccggttctgcaatataatgttaccccgggcaacttctgttaaaaatgcttgcccccccccccttctgacagattcttctgcttttcagaaccaaaaactgggaacaggtacttcctctcagaacgttcccattagtacgttattcgcgtatcagatggtaagcgttactacgataaaatgactgcctcttccaagaaaacccccaccaccttgggcgaacattgcatcatggacgacccggtggaatctctccgcacccttggaagctgtttcgtccactgcacactgcttcacacagacgcgaattgtgaaccaaattatccaaagcctcctaacactgtatttcaaaacagattaactgagaatcatcaaaaaaaagtacacaccatctgcatttatgctttctttccccctcccccgctagaaaaccccctgtt

SEQ ID NO: 642347 - DNA, 335 bp, Homo sapiens
cggcatatgacaaacttctctgtctccgatggggtgggcaccaatcgggttgtatgcccacggctcatcatccgtcctgtggttgatcaagcatcgcacagtcattttaatctcaattgttccttgctcccggcaacatgcaatttacagagacacagaatccagtgatatccctacaccgtattgttacattccgtgctgttgtcatgctcgtgggggtctaaacgcagcaaccccgtgagttaagacacaagaatttcatctgaactcatttcagccacatcatttttttgcctccacaaaaaaaaaaaaggaaaagaagacccaaaaaaaca

SEQ ID NO: 642348 - DNA, 410 bp, Homo sapiens
  misc_feature (30)..(30): n is a, c, g, or t
ctccctagctcatgttgctatgaaaagctngaggggtggccaggcacagtggctcatgcctgtaatccttagcactttgggaggctgagtggggcggatcacttgaggtcaggagttcaaggccagcctgaccaacatgatgaaactccgtctctacctaaaatacacaaattagccagacgtggggcgtggtggtgtgcacctgtaatcccagctactcgggaggttgaggcacgagaattgcttgaaccccggaagcagaggttgcagtgagccaagattgcgccactgcactccagcctgggtgacagagcaaaactccatctcaaaaagaaaaagaaaaaaagaaaagctagagggtccaggtcagtcgctcatgattacccagcacttcgggagccaaggcggcc

SEQ ID NO: 642349 - DNA, 368 bp, Homo sapiens
  misc_feature (48)..(48): n is a, c, g, or t
  misc_feature (70)..(70): n is a, c, g, or t
  misc_feature (72)..(73): n is a, c, g, or t
  misc_feature (110)..(110): n is a, c, g, or t
  misc_feature (113)..(113): n is a, c, g, or t
  misc_feature (121)..(121): n is a, c, g, or t
  misc_feature (124)..(124): n is a, c, g, or t
  misc_feature (136)..(136): n is a, c, g, or t
  misc_feature (144)..(144): n is a, c, g, or t
  misc_feature (146)..(146): n is a, c, g, or t
  misc_feature (157)..(158): n is a, c, g, or t
  misc_feature (195)..(195): n is a, c, g, or t
  misc_feature (197)..(197): n is a, c, g, or t
  misc_feature (200)..(200): n is a, c, g, or t
  misc_feature (209)..(209): n is a, c, g, or t
  misc_feature (216)..(217): n is a, c, g, or t
  misc_feature (259)..(259): n is a, c, g, or t
  misc_feature (269)..(269): n is a, c, g, or t
  misc_feature (271)..(271): n is a, c, g, or t
  misc_feature (281)..(281): n is a, c, g, or t
  misc_feature (292)..(292): n is a, c, g, or t
  misc_feature (302)..(302): n is a, c, g, or t
  misc_feature (304)..(304): n is a, c, g, or t
  misc_feature (307)..(307): n is a, c, g, or t
  misc_feature (310)..(312): n is a, c, g, or t
  misc_feature (316)..(316): n is a, c, g, or t
  misc_feature (327)..(327): n is a, c, g, or t
  misc_feature (329)..(329): n is a, c, g, or t
  misc_feature (335)..(335): n is a, c, g, or t
  misc_feature (337)..(338): n is a, c, g, or t
  misc_feature (341)..(341): n is a, c, g, or t
  misc_feature (344)..(345): n is a, c, g, or t
  misc_feature (362)..(362): n is a, c, g, or t
  misc_feature (366)..(367): n is a, c, g, or t
ggccagcctccagtagagaatgcgattcaggaagatggctcctcaganggcagggaggttagctacggcngnngctcacgtggaaatgtccagtgaaccaatgccaaggnagnagataaanttntctggggctgtncacaacantnggggtggatanngtcaaaccacttgcctgtacttctcctcttctctttntnccnttccctgcnggccggnnccctcttttcccctcctcttctttcccccccgccactttccntcttctcccncnccctcctccnccccccccttncccctggtcncnccnccnnngccncccccccctcntngcctcncnnccnccnncccctgggcccccctcncctnnc

SEQ ID NO: 642350 - DNA, 453 bp, Homo sapiens
  misc_feature (21)..(21): n is a, c, g, or t
  misc_feature (371)..(371): n is a, c, g, or t
  misc_feature (390)..(390): n is a, c, g, or t
cgaaccgacccccacccacgnacacccggacccccgacgaaaagcaaccgcccggccaagagacagcgttagggggggcaaacccaccaaaaagcagggaccccaccgccaaggcccacaccacacccaaacccaagccgaacgaccaccacggcgcgcggaaggccacaagcaaccccaaacccccgaccaacgacaacagggggcacgccagggaggcccaaacgcaaggccaaagccgaactaaaggggccgggacgaaagggggccaccagaatcaccaaggacccgaagcccaaacgaaaaagcccacgcagcaggcaacaaacaaccacaaacagggaaaccaaacaccccccccaaaggaaacncgggagggcaaacaaacgncaagacagcgccaacccccaccccaggggggcgccggcccaaagggaacagccaagcaaaggg

SEQ ID NO: 642351 - DNA, 115 bp, Homo sapiens
cttgtacagcatctctgtatatctttagcagtatcaatcaagaaaagtcatgctgctcttttaagtgagtcactactgctcagcaatcctttcactgacactagacagcatatca

SEQ ID NO: 642352 - DNA, 245 bp, Homo sapiens
aggatcttccttgcgaccactgattgattgattgattttttgtttctgttgtttttctgagatggagtctcgctctatcacccaggctggagggcagtggcgcaatctcggctcaccgcaacctccgcctggtgggttcaggcgattctcctgcctcagcctcccaagtagctgggaccacaggcgcccgtcaccacacccagccaattcttgtcttttctaatagagatggggccgggagcggt

SEQ ID NO: 642353 - DNA, 391 bp, Homo sapiens
cagcacaccttcaccgggaacccactctgcttggcacaagcacccagcgttctccaggggcagggcagaggggacagatgaccccagggcccctatgtactctgtaaaaggaggggcatgactcctttcccccattacagggagtcaagggactaagaggggcacagattctcgaggggacagcatcagcgctcaggattccatgcctcaggcatgtgccatgtaccatacaccaaagacaggtaggctgcaaagacccccagtctaaagcgggttgggaggtattgctccatccctcatggagacagaatctactgtgggcacagagtagcgaatgattttgcatctctctcttctctaagaacctttagacagtcaaattacaacgcaa

SEQ ID NO: 642354 - DNA, 170 bp, Homo sapiens
aattaggggaagtattgacggggagaaagctcccccccagatattgtccacactgctccctgaggccgtctcacgaccatctccatctggctgactcgcgcaatgcccccggctctaggcctccgatccccacaggggatcgggcggcgcattccccaccatcctcatcc

SEQ ID NO: 642355 - DNA, 695 bp, Homo sapiens
gcttctccaaacttcagtgaccacacctgtgttcctgcagcttgagtgtctctcagaatgggtgtctcttagggacacactgctgtagctcaacacacggagcattgccgaacactttgagcctggagaataacacgaaccacagatgagcctcttggaatgaccactgtggggacctgaaggtgtgtactggaggctggacaagcgttgaggggctcccctggcgagcatctgtgacaggtttgatgaggcctgttcccagcagtggcagtgagactggcatgtctggatgacctctacccagaggcccagctttattgcaggctggctctgaatcctttcatctctggccgacagccggacaaagtgccagagctgagcagctgcctcagttctccagcccctgtgctctgagaggccacacaggggacagagatcagaggagccgacaccaaagtgatgcaactgccctcccaggaatgctgttctcaacagaggaaaaagagtggtgaaatgggagccatgggccctgtcggggcaggacaggcttctagacctcatcctcgtgtttaactcctttatttgacgtatggggaaactgaggcccaagaagggaagggagttgcctaaattcacaacagctggacacactttttcaaataactccacttatcttacagtagttttgcacttac

SEQ ID NO: 642356 - DNA, 305 bp, Homo sapiens
ccctctaaaggatcccccagagtccagacagcgcccattatgaatgcgtcctgtgactcacacacctaccaccatgtcccacctttaacattggggattacacttggacatctttttgggagaggacaaacatcaatgctatatcagccagactacaccacaaccacagccgtaactggttgagcacatgctatgtaccaggcaccatactaagtgctttccatgagctatcacgttcaaccctcacagtcctctgcaaggcaggtactcttattaccccttcctcaagcagtgtttggactctg

SEQ ID NO: 642357 - DNA, 834 bp, Homo sapiens
  misc_feature (42)..(42): n is a, c, g, or t
  misc_feature (76)..(76): n is a, c, g, or t
  misc_feature (106)..(106): n is a, c, g, or t
  misc_feature (109)..(110): n is a, c, g, or t
  misc_feature (117)..(117): n is a, c, g, or t
  misc_feature (122)..(122): n is a, c, g, or t
  misc_feature (158)..(158): n is a, c, g, or t
  misc_feature (214)..(214): n is a, c, g, or t
  misc_feature (217)..(217): n is a, c, g, or t
  misc_feature (220)..(220): n is a, c, g, or t
  misc_feature (229)..(229): n is a, c, g, or t
  misc_feature (308)..(308): n is a, c, g, or t
  misc_feature (383)..(383): n is a, c, g, or t
  misc_feature (439)..(439): n is a, c, g, or t
  misc_feature (473)..(473): n is a, c, g, or t
  misc_feature (477)..(477): n is a, c, g, or t
  misc_feature (503)..(503): n is a, c, g, or t
  misc_feature (668)..(668): n is a, c, g, or t
  misc_feature (765)..(765): n is a, c, g, or t
  misc_feature (794)..(794): n is a, c, g, or t
aggaaccaataattccttgggggttaatagctgttccccaanaaaagggttctgtggtcaaataagtttagaaaanatgggtaaaagaaggtttagcaagaagctnttnnatagggnttgtnagagccttaaaggcaataacggccttagtgaatgtncaacttggaggaacagaatgtgcagcactaccgaaagttattgaaccaaaaaaccnctntcncacaaaagnatctagaagggtggtgtaacatgggcacccagttggaaagtgctgccctaagatgtagatgaccgctaatggaaatggnacctgcatcaggcagtaggttgggggaattatggaaggagtagtgctgtggcgtgatgggcacagaaaagaaatnaaaagtaatgatgatgaaaggacaagacaagactcggcccctcccaccatcctganttttgctgttcccagagcagaagctaaatagggntgtncccatgggtgggtcctggctgcccanagaggagacttggagtccaagcaaaggggcaagaggcctggcactgccaaacacgcttgtctccgggaggggtggcctgggttcgccagcctccagccaggaggggaagatgaggtgggggtggccgctctgactcctggccgctctgttccacccacgcccgcnacctcgccaccccctgccccttctctagggccagccctgcccccagaggcttgtgtgggccggcgggcgcttcaccaggcagagatgagcatctggnaggtgctggagggcatccagaccagcccnccagacggaactggagggagccgatgacaaagcggagagg

SEQ ID NO: 642358 - DNA, 727 bp, Homo sapiens
  misc_feature (235)..(235): n is a, c, g, or t
  misc_feature (291)..(291): n is a, c, g, or t
  misc_feature (493)..(493): n is a, c, g, or t
  misc_feature (497)..(498): n is a, c, g, or t
  misc_feature (508)..(508): n is a, c, g, or t
gggtgctataggccgcatagattatccatgcagggaaatcagtcagcttggtttacagtcgtggcttccaacatcctccctgtgcatatcacctccttggacaggggacagatcgcatctggtagtcaggtaagcatgtgcatgtggtcagtaccgttagctgtccacgacttccaactgcgcgtctggaacacacgatgcgatagtggcacgtgactgttccttccatccttgntttgccttgaaagggaccaatgtacctggtctaaacaaagacgaacagtgggaccnttgggcgagtgcgaaattctgtcgacagtgtcgagagcttgtggctcctgaagcaaatattcacaagggtcttgtctcccattcgttgactatgaggctcttggggggaatgtctccaaaggataacaaacaagcgccgttaaaagtttgttttctacaagggggggaacgccaaagggaaacgcttgggcaattctgtccnccgnnaaggggtacnttaaagttagcggaacccgtttgtgcacaaaaggggggaaaaaacctcaaaggggttaataattgattgggaacccccgggttacgccgggtccccccatcatcgtttgcgcagtatactgtgtttcaagcgatcgaagaggtaccagtcgcatctaagaacaagttgtggccgtataaggagacctaaggaagccgttccttgccccttatgtacgaa

SEQ ID NO: 642359 - DNA, 740 bp, Homo sapiens
tggtgcgctgcgatccgtgcgagcgcgcgtgcactggcccatttgcgcgcctccgcccgccgtgtgcgcggatgcttggtgcgcgagccgggctgggctgctgcctgtatctgtgcgcactgagcgagggccagccgtgcggggatctacaccgagcgctgtggctccgggcttcgctgccagccgtcgcccgacgaggcgcgaccgtgcaggcgctgctggatggcgcgggctctgcgtcaacgctagtgccgtcagccgcctgcgcgcctacctgctgccagggccgccaggtccaggaaatgctaagtgagtcggaggaagagcgagcgccggcaagtgtggagagcccgtccgtctccagcacgcaccgggtgtgtgatcccaagtttccagcccctccattcaaagataatcatcatcaagaaagggcatgctaaaagacgagccaggtgctacaaagttgactacgagtctcagatgcacatgatacccagaaattctcctcccgagtccagcgggaagacagaagtatggtccctgccgtagagacatggcagaacccgtgattacctgaagttcctcaatgtgctgagtccagggttggtcccattccaagttggggcccgcagggttctcagaagaacagggtccctcaaggcgaacggctcgcggtgtggaacatggcgctccggaaccccatgaaggagagtcgcccttaaaatactccaggattgcac

SEQ ID NO: 642360 - DNA, 247 bp, Homo sapiens
  misc_feature (84)..(84): n is a, c, g, or t
  misc_feature (88)..(88): n is a, c, g, or t
cggaaggtaggaggatagtgacaaggatggctttttttccttgggtgcctgcccacatgtgccagaattacttatatttatagnaagnggcttgttctttttattaacattgatgtgacatcgctgttttcaattttaccttatgcaacactaaaatctttcatgaattactattgtgccaccacgaatagtgatttgtcgaatttagaactgcgcttctagttattaaagctttatgagctccacg

SEQ ID NO: 642361 - DNA, 115 bp, Homo sapiens
gggcgtacaactcacatatgacgcccacttgttcctaaacaccctttacgacagcacctctcccacttgagagccactgggtccgggaatgaatgtgtctgcactaacttggtct

SEQ ID NO: 642362 - DNA, 295 bp, Homo sapiens
tgtagggagaacatgtcaaaattactatatttcacatgacttcaccctttaagacattcggttcctatcaccctgcccttgtaaatatcatctctcgcacctagtgaagactacaaagataagaaatggtgcccaattccaatgtgattccactccctaaataagaaggacagctacactgtcagtatagaaaacatagaatgttatgtaccagagacgtacagagtgagtgaggaagacaatattagggtaccctctgccctggggtggaaagaggatcaaatgtaatgtgaga

SEQ ID NO: 642363 - DNA, 222 bp, Homo sapiens
  misc_feature (87)..(87): n is a, c, g, or t
gtacaggccggattgtagagaaggctccaaaagccaggtgcctgatctggacaagaggaagtacctagtgccctctgaccttactgnttggccatgttctacttctataatccggatagagaatccacctgtagacctgtaggacgccattattcttcatttgtcaacaacaccatcccatcccaccatgtgctaccacgggtgccttgtacgtgggtaccg

SEQ ID NO: 642364 - DNA, 810 bp, Homo sapiens
attctccttcttcagcctcccaagatgctaggactacaggtgcatgtcaacatgcccagctaatggttttttttttttggtaaaaacagatctccccaggttacctatgcgggtccaaacaccgggtttcaagaaatccttcggctgtgacctcccaaagtgctaggattaaaacatgacccaccagtgctcagagtccatttccatttatgattggagtaatttaatctttctctttttttcttagccaatctagtcaagggtggtcaatttggtgatttatttggaagaatcaactttgggtttcagtaatttcctctattcggttcccattctccattttatttatatccaccctaatacttattatttccctcattcacgggtgctggggttaagtcggccttcttcgatatccggaagtatacagtaggtggtgacctgagctcttcttcttttaatgtcagagtcacagtataaatttcttggccagactcaattctctgaacccctgattcctcacctgaaaatgcgctaaagagtactctcttcactacccatccctcaagaggttaaacggcgccatgaacaagagtgcgccccaaggaggacccatgtcggcggtatattatcacaagcatattaggctgggatcaaatgcctaaataaatcccaaatccccgggctagccttgaaccgaaagttttacccgcagcttcgtctcccgcaaggaagcccgcgggtgggggaacgaaggagtagcgcgctaaaggacccagcttccataaacggcaacacggtttgagacac

SEQ ID NO: 642365 - DNA, 731 bp, Homo sapiens
  misc_feature (22)..(22): n is a, c, g, or t
agtggaatcaaagataccatgnagacccaagtttatccaaagttacgtaacacattaggtagaatactgatctcatgagctatgagatgaacattaaacggaaggagactggaaggggcgtgggttaagacgagagctatgacttgaataactaactcaacagttttgaggaaaccggtttggcatctattcacacccagtgggcatcggtccggccattcagcgaagcgttagacgtagtcgtattaagtcattatcatgacagtcagcacagtttacaaagcaacaacgttgtccagtattagcgactaaagcaacacatgaagcggctttgggagacaattgaaacttgaaattgcactattcatgaggattagttcaacttgtgtattacttaacaagtttgcagataaatatatggcatggtagggtccgtgggtaagagtagtggtaaacaagtaatatggtcaaagatttaccggatcacacgacagacataatcactgaaaaatatataataggggcgcttggcgtgggtggagaggaataggtgacatttgtctaaatcatgttctaaaacaaatttgtcataaaagtctcaatattcgccggcggcacaagttttctgaaacattcgaagatgggcattccaacggaggaaaggagacaggctcagttggaaccccggaaccagaatagatgtttaggacagttaccttggatccatcgta

SEQ ID NO: 642366 - DNA, 162 bp, Homo sapiens
attaatttgtttccaatatccattcttcctttttccagcctccaccttcaagtaggccctggtgtctgttctgcccttcttttgtgtccgtgtgaacttagatattaagctcctaagtgagctaatagtgaaacatcagtatttggtttgctgtccgtgtat

SEQ ID NO: 642367 - DNA, 152 bp, Homo sapiens
gacatcagctcggtaccactcttaggggttgcaggcgcagtggggccctggagtgtgtacattgaagatgtctgcgggcaaagccgtggacacagagattggggttacaaatggtatggggttgtggtacacccagtgtgcatgtgacacga

SEQ ID NO: 642368 - DNA, 579 bp, Homo sapiens
  misc_feature (168)..(168): n is a, c, g, or t
gggcccattgaatggaaaccgcctctttaaaccttaaatataatgggaaccctttcttatattggttgcgttgtaaatgggttataattcggtcatcccagatagagtccagtgacccagaatagcgtggccttccagggctaaaggtatcctcccacatcaacttcngaaatagctgggccctctatgggttcatcccaccacacctggctaattatggtatcctctgtagagacagggttcggtagagcacagactgggtaaccttttgatttaaaatgtattttgaattccttgtggaaaaaagcatattttgacatttagatataatattgtaattgactattcataaatacagaacttctaagtataagaccaaaaggtccgttttaaaaagaaataagacaattggccgggcgtggtggttcccgcctgtaatcccagcactttgcgagtccgaggcaggcggatcacgaggtcaggagatcaagaccatcctggctaacacggtgaaaccccgtctctactaaaaatacaaaaaaattagctgggcatggtggcgggtgcctgtaatcccag

SEQ ID NO: 642369 - DNA, 626 bp, Homo sapiens
gcacgaggtaggtccactgtgttcggaagaaaaagttcaacatgcatttgatagagccatcttatatagcaacgtttatgaatttgtaagttgcaaccgcacgtgtgctgtagccatgtagagtcatatgtggattcttccaaacatatccagcatatgcatcttttttttatgagagataaaaaaaaatgaggtggggtcatataaaacttggactatttccttggaattttcttgtttgtaaaatcagagcagagctcttttatttacttttgtttttgacgatggggacgagcgatgtactcacatcttcgatatcacttgcctgaaaatatataaatgcgttaaacgatagaaaatcaaaaacatcgttcttttcactagaatattttaaagtcaaaacataacactttactatttacgtaatgaagtcttgtagttgtatatatttacagagtgtagtgctttagttgagaaaatatgacactcggctttcctctttcttttatttactggcttggttgttgcatatccatcatgacgtgctttcttaacaaaatttttttgatgttttttttcaaggtcaaaggatcctcaacaccatgatccttcaaaaattgatcaca

SEQ ID NO: 642370 - DNA, 424 bp, Homo sapiens
caacattggccctccctagtcagagcagtcaagtaggttatgataaagtgaaagccataagctcttggcttagcattttcccattcagatgccgcagcagcatgtgtccctctgtcactcagcaggctggtccccttctttcaggtaccctttcacattcttctcactccgggcacaggtggtcgctggaaggctcgaagccctggggtcttcagaccagcctggaacgtgaatctcctttctcacccccacgaaagcctcggcccgcattcgtaattctttttatttttactttcgagccatgtaaggcatgcagatggggtaggagcgttcccgcgacacgttgccagcagcgcagcgccggcccgctcgtgtggcccgagcccggggaggggacagggcacgcgtaacctgacccacctgc

SEQ ID NO: 642371 - DNA, 368 bp, Homo sapiens
  misc_feature (19)..(19): n is a, c, g, or t
  misc_feature (25)..(25): n is a, c, g, or t
  misc_feature (51)..(51): n is a, c, g, or t
  misc_feature (58)..(58): n is a, c, g, or t
  misc_feature (81)..(81): n is a, c, g, or t
  misc_feature (86)..(86): n is a, c, g, or t
  misc_feature (113)..(113): n is a, c, g, or t
  misc_feature (140)..(140): n is a, c, g, or t
  misc_feature (155)..(155): n is a, c, g, or t
  misc_feature (227)..(228): n is a, c, g, or t
gggggggcgggtggggggnggtttngggggggggtgggggggggggccgcnggtgggngtgtggggggggtgggggggggnggggngcgggcggggccctcgggtgtggcggngtggggagggctctgtgtggtgggggncggggtcggtgggcnggtgtggctgtccgacgtccggggttcggggtgtgggtcccaggccggaactccccctgcttttttccccgnncgcaatggggggcgggcgccccccgcattaacaacataaaaccctcattcccccgggggaccccccccagggtcaaacccccttcccccattttcctcctatccctcaaccccggcatcattaccgggttttcctcttta

SEQ ID NO: 642372 - DNA, 793 bp, Homo sapiens
atggcggcccagccgtgttccagagctccctgtcgggtgccctcgcccgctttatataaattcgtctgattcactttgcattagaaagtaacagtgtttgtttgtacaaaagagggagttccaggagattcaacaggaaatgcatggatctcaaaggaaacaaacacccgaatacactcggagtggaagaattgacaactgtgagacatgtggtgggtacgaaggcagaaatttcatgtgcaccctgtgttgtctacagctgtgggtaatgacaaaagacaatgccaaaggaatcttcaagaaggaggattgaagtatatcggtgggtgagacgcaaggaaccaaaaaaaagaccggtgctgtcagtgaccgtgatacactctacatgtgcttgctagtaaggcaccaagggctcccccaggccagggcctccagttgcttcctctgccctctaatagtcaatgactcgccgccgggccgaggggcaaattaaggacacacacggacttatgggaggcaaagaaacaaaagaagtcagaaaccaccacacaaccgtttgctcggccgcccttccgccactagaggaaagctctgtaaaaccacctctggtgtgcggcgcgcggcccaatactggttaagaggacacatctgcacaagcggtgtcccatagagaaaccgtgccataggacaaggggcgtagatctacaaccaaaaaaaagccgccgggggaccggggtctgacacacccagggggttggaggactcaggctaacacagggacaagcggcaaata

SEQ ID NO: 642373 - DNA, 952 bp, Homo sapiens
  misc_feature (13)..(13): n is a, c, g, or t
  misc_feature (892)..(892): n is a, c, g, or t
cggacgcgtgggncctgaggttccggcagaatacactcaaaagcaagcattctcttcccagtgcctatcggacagtgcggcggtcgaggtcccgctcccggtcccctcggaggagagcccactcccctgagagacggagggaagagaggagtgtgcccactgcctaccgcgtgagccgcagccctggggccagcaggaagcggacccgctccagaagtccccacgagaagaagaagaagaggcggtcccggtcgcggaccaagtccaaggccaggtctcagtcggtgtcacccagcaagcaggcagcgccccggcccgcggcccccgcggcccactcggcgcactcagccagcgtctcccctgtggagagtcggggctccagccaggagcgctccaggggagtctctcaggaaaaagaagcccagatctcttcagcaatcgtttcttccgtgcagagcaaaatcactcaggatctcatggccaaagtcagagcgatgcttgcagcttccaaaaacctgcaaaccagcgcttcctgagacggggccagcggaggcagagccgggaggctgcgtgggcttctgggcaggctcacgcagacgccggccacaccatccacctggccgcctccatggacccttggtggcttttgtaaattaatttttgatgacattttgagttttaagatttctgaccagcagtctcttacctgtatatttgtaaatatatcatgtttctgtgaaaatgtattatgaaataaaatgggaggaaacaccttttctagctaaaaaaaaaaaaaaatcgggctttttcggtgggaacagtttgatggctgcctgcgtctgccattttgcaggactgcggccattgcgtatcgtacgtgtgcgggtcaaanattggcataaaagaagaaaactaccaaacatagattaaacagagagaaacgcaggcggtg

SEQ ID NO: 642374 - DNA, 104 bp, Homo sapiens
agcaattaattggagcagagaagttgttgagaaagagttcttagaaaaagttaaacatcttgagaatcaaatagcacaaagtcctgccattgacccttaccatg

SEQ ID NO: 642375 - DNA, 561 bp, Homo sapiens
  misc_feature (13)..(13): n is a, c, g, or t
cggacgcgtgggncctgaggttccggcagaatacactcaaaagcaagcattctcttcccagtgcctatcggacagtgcggcggtcgaggtcccgctcccggtcccctcggaggagagcccactcccctgagagacggagggaagagaggagtgtgcccactgcctaccgcgtgagccgcagccctggggccagcaggaagcggacccgctccagaagtccccacgagaagaagaagaagaggcggtcccggtcgcggaccaagtccaaggccaggtctcagtcggtgtcacccagcaagcaggcagcgccccggcccgcggcccccgcggcccactcggcgcactcagccagcgtctcccctgtggagagtcggggctccagccaggagcgctccaggggagtctctcaggaaaaagaagcccagatctcttcagcaatcgtttcttccgtgcagagcaaaatcactcaggaagcgctggtttgcaggttttgggaagctgcaagcatcgctctgactttggccatgagatcctgagtgattttgctctgcacgggagaaa

SEQ ID NO: 642376 - DNA, 287 bp, Homo sapiens
catgagacgcagcctcccggctctgcctccgctggccccgtctcaggaagcgctggcagagccgggaggctgcgtgggcttctgggcaggctcacgcagacgccggccacaccatccacctggccgcctccatggacccttggtggcttttgtaaattaatttttgatgacattttgagttttaagatttctgaccagcagtctcttacctgtatatttgtaaatatatcatgtttctgtgaaaatgtattatgaaataaaatgggaggaaacaccttttctagcta

SEQ ID NO: 642377 - DNA, 391 bp, Homo sapiens
  misc_feature (26)..(26): n is a, c, g, or t
  misc_feature (49)..(49): n is a, c, g, or t
  misc_feature (51)..(51): n is a, c, g, or t
  misc_feature (133)..(134): n is a, c, g, or t
  misc_feature (140)..(141): n is a, c, g, or t
  misc_feature (144)..(144): n is a, c, g, or t
  misc_feature (153)..(153): n is a, c, g, or t
  misc_feature (157)..(157): n is a, c, g, or t
  misc_feature (159)..(159): n is a, c, g, or t
  misc_feature (161)..(161): n is a, c, g, or t
  misc_feature (167)..(167): n is a, c, g, or t
  misc_feature (169)..(169): n is a, c, g, or t
  misc_feature (238)..(238): n is a, c, g, or t
  misc_feature (298)..(298): n is a, c, g, or t
  misc_feature (300)..(300): n is a, c, g, or t
  misc_feature (302)..(302): n is a, c, g, or t
  misc_feature (318)..(318): n is a, c, g, or t
  misc_feature (339)..(339): n is a, c, g, or t
aagaaaaatttgaaaatttctattcnggctactggaattggttattaananaaaaaggaaaaagaagaatcttgctgctttcagtatttcctgatttttttgtaaatataaagaggaacttcaattatgaaanntttttnncanatatatatntctntntntctatntntctgttctgttttgtttcctgtcttgaagattttgagttatggttattggtttcagattgattaattcncatatgctgtgttttgaaatgagatccccttagctttttttttttttttttttttttccntntnaagtgttttctttaanagtccttttggttcgtggccncgtgccttggtttttccctttttttctttttaaatgccaacccttttccccc

SEQ ID NO: 642378 - DNA, 371 bp, Homo sapiens
ctaagtcgactctagagttatccccttcatacgtcaattaagtatagtgcgatagaaattgaaaactggcgcaataatatagtaccgtcaagggagagatgaaagaattataacctagcataatatatcatggactaacctcctataccttctgcattatgaattatctagaaattactttgcaaggagagccgttgctgggacccccgaaatccagaccagctacctaagaacagcttaaatagcacactcttctatatagcataatagtgagaagattcatagttataggcgactaaccttccgagcctggtccttgctggttgtccatcatttaatcctagttcaactttctatttgccttaattaat

SEQ ID NO: 642379 - DNA, 784 bp, Homo sapiens
  misc_feature (13)..(13): n is a, c, g, or t
cggacgcgtgggncctgaggttccggcagaatacactcaaaagcaagcattctcttcccagtgcctatcggacagtgcggcggtcgaggtcccgctcccggtcccctcggaggagagcccactcccctgagagacggagggaagagaggagtgtgcccactgcctaccgcgtgagccgcagccctggggccagcaggaagcggacccgctccagaagtccccacgagaagaagaagaagaggcggtcccggtcgcggaccaagtccaaggccaggtctcagtcggtgtcacccagcaagcaggcagcgccccggcccgcggcccccgcggcccactcggcgcactcagccagcgtctcccctgtggagagtcggggctccagccaggagcgctccaggggagtctctcaggaaaaagaagcccagatctcttcagcaatcgtttcttccgtgcagagcaaaatcactcaggatctcatggccaaagtcagagcgatgcttgcagcttccaaaaacctgcaaaccagcgcttcctgagacggggccagcggaggcagagccgggaggctgcgtgggcttctgggcaggctcacgcagacgccggccacaccatccacctggccgcctccatggacccttggtggcttttgtaaattaatttttgatgacattttgagttttaagatttctgaccagcagtctcttacctgtatatttgtaaatatatcatgtttctgtgaaaatgtattatgaaataaaatgggaggaaacaccttttctagcta

SEQ ID NO: 642380 - DNA, 643 bp, Homo sapiens
agcgctggtttgcaggtttttggcaagctgcaaggatcgctctgagctttggccatgagatcctgagtgattttgctctgcacgagaagaagaagaagaggcggtcccggtcgcggaccaagtccaaggccaggtctcagtcggtgtcacccagcaagcaggcagcgccccggcccgcggcccccgcggcccactcggcgcactcagccagcgtctcccctgtggagagtcggggctccagccaggagcgctccaggggagtctctcaggaaaaagaagcccagatctcttcagcaatcgtttcttccgtgcagagcaaaatcactcaggatctcatggccaaagtcagagcgatgcttgcagcttccaaaaacctgcaaaccagcgcttcctgagacggggccagcggaggcagagccgggaggctgcgtgggcttctgggcaggctcacgcagacgccggccacaccatccacctggccgcctccatggacccttggtggcttttgtaaattaatttttgatgacattttgagttttaagatttctgaccagcagtctcttacctgtatatttgtaaatatatcatgtttctgtgaaaatgtattatgaaataaaatgggaggaaacaccttttctagcta

SEQ ID NO: 642381 - DNA, 338 bp, Homo sapiens
agccgccccgtggtgaattagtcttctacaatcccagaaattcaccctcccatctgtgactaggatacagttcactagatgaaattatgggaacctcctgcgtcttaccaagaagctgtagctggaacttagtcaatgaaaaatgatttgtaaactctttggagctggctttgaaagaacgtttaaaatgatagctgatactgccagacaacagaacaggccggccttagccatgaggctccagaagaaggagaactgcaaagtttgtgtccgctacctctgcccttgggatggagccattctgtctgcttggctgtacagccctggcattgggaaca

SEQ ID NO: 642382 - DNA, 236 bp, Homo sapiens
  misc_feature (38)..(39): n is a, c, g, or t
ctgagtagctaggattacaggtgcccgccatcatgccnngctaatttttgtatttttagtagagacagggtttcaccatgttggccagcttggtctcgaactcctgacctcaggtgatcctgctgcatcgacctcccaaagtactgggattacaggcgtgagccaccacgctcagcctctttcttgttctatatgtccatgctctgctccacttctgccccttctgtcgtcttctc

SEQ ID NO: 642383 - DNA, 164 bp, Homo sapiens
tttttttttccgattgaggcacagctgtggcaatatcacaatatttccctggtgttttctttggatctccttacctggtgccaacgtacacaacgaaagtagaagagagttgcttggttggaacaaaatcccagtcaaaatgctgagttttctcctggcccatt

SEQ ID NO: 642384 - DNA, 751 bp, Homo sapiens
  misc_feature (252)..(252): n is a, c, g, or t
  misc_feature (495)..(495): n is a, c, g, or t
ccgtggttctggcctactgtggccggcctggacacctcgtgcatcctcgtgtggctgaaggaaccaggctatgacgtcattgcctatctggcccaccattggccagaaggaagacttcgaggcacacggccaggcaagcaaggcactgtaagcctctgggcgcccacaacaggtgttcactctgaggtgatgtcgatgcaatgggggagcttgtgtcggccagtgcatgtgcactactcggtcgccgggccnactcacagggtgcacaagcagccaccttgtaactgagggattccgcctagcgctgctcctgtgggccaacccttacgttcgtgtgcctctacgcgccccctgggcaactcccgtcaccctagcgacacatcgacatggttgtgcatatacttccgctccgagctgagcggaggtgtgggcggccaaagttcactgttgttcctcacgcggctggccacgaggcagaagtcggtgaactcccgnagtccatgtgttgcccttggtctatggacgcgcatctaagccaattgtcgtcatcgttccaaccttggtgccaccctcgcgcccacgtaatcaagacggctacgaaattgggcgtcccccctctgccgaatgggcattctgcgccttgcacagtgtcctgagcgaaaaccccgggatttctagatgagtgccactgctagagtggaacccttgcaatggggacgtgaccgacgagaacggccaaaaccagttgggg

SEQ ID NO: 642385 - DNA, 577 bp, Homo sapiens
caacacacaacactaacacggagaacttagcaacgaaaacactttgttcaagtgacacatatgcactaactctggagggtaatccaacagaaccatagctgcccgaaaacagtagctagttctctagcaggagtagcacttaaagacccactgaagcaacagtcgcagctcatgcatatagctcaattcaaacttgtatcatcaggagaaccggcagctaaaaacgtcggtactggtgaccctaagacattgattacactgaagctacctctagcgttacgcacaggagtgctagacacgataacgcccacagggtgcaagtcgtgatcaaaggcatagtttggcactgcaaaaacctgcagcttcttctccccattggccatataggagttttggcagccacgacatatacaatctaagcaggctttgcggttagagtagcaagtgcagcgttggcctcggcatgtaagaacacttggattttgagtagcacgcccacatttacaccctttcttttcctggggttttttgtacacagtcttggtaggactttcttgcataaaatgatgactaggaa

SEQ ID NO: 642386 - DNA, 1038 bp, Homo sapiens
gccatttctcgatccccggacatcttagcggatgctgttggttgggggccgtcccgctcctacacggcacggaacgatggtggccgcaaacgacagacgaacacacacgtcgctggagtcgatcaactctaggctccaactcgatactgaaacagtgcggaacagatacgtcctggggtaaccaagcatgactctgacacgactgatcacgacaacggcaacacgcgacaattggtcattactcgctaaacaaatggcccagactttgacggacaatctgaaactcgagtactatgctcatgtgggctaaacactggatgtccatcactacagtggcacatcaatcattgacactgggcacagccatgcggcacaattcactaccagcagtggtgcacactggctatcatggatccaaggtgactctgaccatccatcagaagcatgccagaacagactggtgacaacagtaacccttaatcacctcacaaaatttcacctggcacaccttcaacctgcaaaacatggaccgtatcaggtaaacatgggcatagaaaacacaacacaacagaaaacaacaaaagacaacacaagaggaggaactcagagccacagacacacggacaacagacacaacggaagagacgagactgaacccagagaaacagaagacgcacacacaggacacaacgagaaccaaacgagaaacaacaaaagaaagcaacacaagtgacagcgaataacaacaacaataaaaaaacgcacggagtgcacaacaccagaatgaaacacaacccaccagaaagtccggaacacaaggggaaaaaaaaacaaggacccaaaagcagagagacaaaaaaaacaacaaagaggggacaaaagagacgagagaagagaaagagcaaagaacgacagaagcgaagaacaagcaaccaacaacaaagcgcaaaaacacaaacagcacagacaaccacgccaccaagaaaacaaccacaacagaaaacacaaccgagacgcaaaacaagaaacaagaaaaga

SEQ ID NO: 642387 - DNA, 109 bp, Homo sapiens
gtgctaatgataggagtatggtggggtggtgattgtggtatctttaatagtgtaggaagctgaataatttataaggataggggtcagggtttttcccccataatctatt

SEQ ID NO: 642388 - DNA, 209 bp, Homo sapiens
tgcggcccagatattctatgaactgatgaagcacataatctttctatgattaacgtcagagtaccgcttaagtgagtcttttaattatgtggcaagtgatagaagttatgtactattcaggtgggagaaatggcctgatatgctagcaatatcactaaaatatctagaaagggacaaatgtagtctacatgatacggtcaggaccttca

SEQ ID NO: 642389 - DNA, 426 bp, Homo sapiens
  misc_feature (192)..(192): n is a, c, g, or t
  misc_feature (201)..(201): n is a, c, g, or t
gttccacgggggtcccccagggtttttcccccaacaggagatttttttttggcacccaaaggcgccgaaaggtacccctgccgggctttctctcatgagggcccctccccctgtaaggggggattgcccctcccctttgggcccaaaaggaaccggtttttgccctttgtccccctgggaggggaggggaanccgggattnttccctggttgaaaaaaaaatggggcccccccccggggggcctttcccaagccctgggggtttttccccatgactttttttccagcccccctgggcccccttggggtttttttccccccccggggggggttttgcccgggccccctttttttgggaccccttgggggggtggcctttaccccgggggggttttttttttttaaaaaccccccccttggggtccca

SEQ ID NO: 642390 - DNA, 151 bp, Homo sapiens
gtagctagactatgcagggaaaagctgactagcagaaatagagttggttcaagggaagcccgcttggcaatacagaagaggtgagaaggatttgagttcaggcaaatgaccagggagtaaaattgattcctggggaggaaagttaagcccc

SEQ ID NO: 642391 - DNA, 808 bp, Homo sapiens
  misc_feature (35)..(35): n is a, c, g, or t
  misc_feature (69)..(69): n is a, c, g, or t
  misc_feature (71)..(71): n is a, c, g, or t
  misc_feature (83)..(83): n is a, c, g, or t
  misc_feature (85)..(87): n is a, c, g, or t
  misc_feature (101)..(101): n is a, c, g, or t
  misc_feature (119)..(120): n is a, c, g, or t
  misc_feature (123)..(123): n is a, c, g, or t
  misc_feature (145)..(145): n is a, c, g, or t
  misc_feature (147)..(147): n is a, c, g, or t
  misc_feature (151)..(151): n is a, c, g, or t
  misc_feature (178)..(180): n is a, c, g, or t
  misc_feature (195)..(195): n is a, c, g, or t
  misc_feature (199)..(200): n is a, c, g, or t
  misc_feature (231)..(231): n is a, c, g, or t
  misc_feature (248)..(248): n is a, c, g, or t
  misc_feature (265)..(265): n is a, c, g, or t
  misc_feature (272)..(273): n is a, c, g, or t
  misc_feature (329)..(329): n is a, c, g, or t
  misc_feature (801)..(801): n is a, c, g, or t
attatgttttctctccatcagaatgaaagctcctngagggcagggactttggtctattgtctgtatttncnggtgcctagaanannnaatgtatgaaaaangaactcaataaatatttnnaangtagaatggaaaggaatgaatnanattntttggggtttctgcagagattggtttnnntagtgggtgctaggnaaannttctgctccctgcaacctccccattttaatntttcagtattgaaaagnggagaggaaccggattnagtttgnnggggaaagaggcagtggggtgtggaggtgctcagagcagcctttgggaaggtgtgngggaagctggattcccaactgtcagcctccaggcctgggatggacctaggatgctgagaaagggcatacactgctgagggagtaacctgccagttaccagctcactgaggaaccagaagaatgtacagttcttggtttgaaggcacttggagaaggagaggaaggagggatgggagctgaatctcttcccgcccccatctctgccaggtcccaggccccctctgggcttctgttccacacagacctgcctggaagccttcaaaggccgaggagcccgcggtcggggtgggggtccctgttctggagccatgggtttggagtgccagctccagcagaggcatctgagcagcggcctgaggtgctgtgtctgacatggttgttggccatggaaggcctcgggccgaaatgagctcagatcttggctgccggctgctggggcggctgcttctgcagcagggccaggggtgtcccncttctca

SEQ ID NO: 642392 - DNA, 225 bp, Homo sapiens
tgggcagccgtagtttcaccgagtgcccatgctataaggaggaacagtatatcgctagataaaactctacatcccagataaaacacatggaatcgcgagcgactctgtaacccaggtaaagactgtgcagggcattcagccagcactgcacacccctcagaagttcactgactttcgttttgcacctccaggtctgatacgtggcgcctggtgaacccaccagca

SEQ ID NO: 642393 - DNA, 162 bp, Homo sapiens
ggctgccatctgtttatcaatatagcatctatagctgatcctttctaaaaatagtgtgtcagaacatgttactcagaggtgaaagtccctgtgatggtccttacctcacttgctgaaaacctctcttgtggccctatctagggcccgctgttctactccctc

SEQ ID NO: 642394 - DNA, 1903 bp, Homo sapiens
  misc_feature (571)..(571): n is a, c, g, or t
ctgcgcagcggatcacataagacatagaatggggtgtcctaggaggtctgatcgcaggatgctagtaggcagcaacggaagccatgtctgctggtcctagcgcgttgtctctacatgaggggttcccgaatagcatgggaacccagacggctcagtcactctcgactgtctcgactaggggacatcacacgcaggcgccaatcctcgggtcacgaggattaacagcgtctcccagtacatgtggctcaagataagtgcccagatgacatagggattcactggtaaattataattaggcgaattgcgtagttacgggccgctggataggggcgcgcagagactttcgccgaaagtctcgctcatagtggtgtgctaaattctagacgtgcacagggctctagatactcagtcacatcgctgggtgtttaaacccacaggctcatagatgggtatcccggactcccagagagtgacactaaacaagctaagtcagtgtcaagccaccgaacagcgagggaacagaagagccttgcgacttctggcctcaaggcttagcttggaggggagacantctatgtaggggaacgttgacccgtgaacacatttctctgatgactctggtgggtcatgaggtaggtaaaacgaatatacaaccaccgatttaaaccaagggaggtattacccctgcagccatgggggtattaagagcgccgtgccaactcctgtggagtaactacgactccgatacacaccctaaacttaaggggcttagtaaccccagagaacagaccaaagaagatacccctatagcgatcgccaaggcccccaaggtttgcgggggtcacttgacaaatacctctaaaagaaacacccaaaagttttacctatagggagcacacaagtcgaccccacagagtatgggaacggcaccaagggcagcattcgtgacggaccttgcacttggcgatgcaatgggacatagaggaccttcgaaagcacaggataggcccatgattatggtgggcgctttggaggacacacacacaaaggggcgccctcaaaaaacaatagtataggcgcaaacaccagcggcaaccggttaagatacaacgagggtacgccgccaattccctatcaagatcgccgatatgcgacataagtctagtatatggggccattgaacaacaatgccggcagaacccatagatagacgctaagtatcccgagcgtaatttcactaggcgcaggaacacagattctgagcatatatagggataactagacggagggataataccacgatgggctcataaggtctcaataggaaattaccccaagtgaccttaatatacattacaggatggcacacggttaacagtgaaccgcccgtttgagagtaggatcagttgctccatgaaccacgggaatagaacacacgagtgagaggaacacagtgcacggaaaagaaaatggttaagctatcatggcacagcgagagatgcataatacatatagaacaacacatgagcgggcacgaacaaagacacaataacgagcaaaaaaagataagaacaccaagatgacaacaccaaccagagatattagttaagacgaccaaccaagagacaaggagacagaaaacagcgaaaatagaccacacacaatggacgaatcatagcaacactgagacgacgagagataaagacaccaacagaagacacaaagagacagagtgagccaccacactcaacacgaagcagcaggaaagaataccacacacggagaaaggatagcacaaaaaccagataccacgagatgaacgccaaaaacgcaagagtgtacaaaaacacaacacacacacaagagacagaaacaagacacagtaacgaatgaaaccaccacg

SEQ ID NO: 642395 - DNA, 262 bp, Homo sapiens
  misc_feature (8)..(8): n is a, c, g, or t
  misc_feature (84)..(84): n is a, c, g, or t
atggcttnacacctgcaatcccaccactcaggggcaagcagtgaggctaaggcagatcacttgaggtcaggtgttcaagacgcngtcgccaacatgatgaaaccccatcgctactacaaatacaaaaattagctgggcgtggtgcaggcgcctacaatcccagctactcgggagactgaggcacgagaatcacctgacccaggaggcggaagtcgcagtgagcactacactccagcctgggctatagagcgacactcagcct

SEQ ID NO: 642396 - DNA, 450 bp, Homo sapiens
aacgggtgatgcggtttgagcctggtgcatgagcgcgaccggctcatcgccgaggtgaataagcagctggagtttggataacgcacgcaggcggtggtcttagaccaagaagatgcactggtgcgcctcctgcacgaaggacgccatcttttactgctgttggaatcaccagctactgtgactacccctgtccgccagcccactggcctgagcacataaagtcttgcacccagtcagctactgctcctcagcaggaagcggatgctgaggtgaacacagaaacactaaataagtcctcccaggggagctcctcgagcacacaatcagcaccttcagaaacggccagcgcctccaaagggaaggagacgtcagctgagaaaagcaaggagagtggctcgacccttgacctttctggctccagagagacgccctcctccattctcttaggct

SEQ ID NO: 642397 - DNA, 202 bp, Homo sapiens
ttactgctagcagaacagagtcaccctcctctggatattggggcagggacggcagtgccaggtgtggtggtggcgtgggccgctggcttctgctggccaggatggcttaaccctgactttgggctctgcccgcatcggtgttggccactgtccccatttacattttccccactctgtctgcctgcatctcctctgttgcggg

SEQ ID NO: 642398 - DNA, 352 bp, Homo sapiens
gtcgaccaaaagctgttttaatgctggtcgagtcggactacttgaccggtgagatactcctgtcagacggagggttgaatctgacctaggttttgcgtgctccggtggcgcattcagaattttcaagattgcaatttgaccacgccagaaacgacaaagccccggattcccggtttgaggtatctcgatatggcggagggcagagactcgaaaccttccaccacacatcaaaaaaaccctttaaaatcaattgcctagtcaccataaaaaacaaggtgtgacctcaattgtgcccacatctgtcgcgagaacgagcctagactacccttccatcaagcgaaccatcaagcgt

SEQ ID NO: 642399 - DNA, 401 bp, Homo sapiens
  misc_feature (2)..(2): n is a, c, g, or t
  misc_feature (14)..(14): n is a, c, g, or t
  misc_feature (218)..(218): n is a, c, g, or t
  misc_feature (220)..(221): n is a, c, g, or t
  misc_feature (262)..(262): n is a, c, g, or t
  misc_feature (305)..(305): n is a, c, g, or t
  misc_feature (331)..(331): n is a, c, g, or t
  misc_feature (351)..(351): n is a, c, g, or t
gnagaagacgacanaaggggaagagaaatcaatcctatgtataagaaatatgaagcatggtacatatacatacagtgttgcaacactgatcgtactcatgggcatgaacaagccctgggtgtcttggaaggctctgggcctggtgtcgcttcacacttggctattcttgaaacatttcctcagccgtcatctatggagtgcctgcttctgtagagaananngggaggaggaaaggtgctggtggcagtgtgctgcgtatggncccactcagccagggagccccatggttcattcttgaagatatntaactttctttagttgacagtttagncatgaggatgggccaggctnagtgggctcatgcctataatcccaggactttggggaggccggctggtggg

SEQ ID NO: 642400 - DNA, 180 bp, Homo sapiens
aaattttgggggtttttggccccgggggggggggccccccctttttttccccccccccccggggttttttttggggggcccgggggtttttgttcccccccggggccttttttgggaattgggggggttttgggcccaaaaagttttttttttttttttttacccccccccccttgggga

SEQ ID NO: 642401 - DNA, 301 bp, Homo sapiens
gcggattcatttcacccgcgtgatacgacacatgagggcgcagcacgtcttcaactggggtaagagggacgagtcggagtcatagtctacgtgtacacgtggtggtggagtaagcaggtcagtcactgacttgatggtttcttgatcttcagatgagtaccaccagtcaaggaactgcaagaagaatacacccacagaaaggccagtagacagggataaggcaggagcccccaacagctttcttcagagctgagtttatcttctcactaacactcctggctggttgtaagcagcgtgctgt

SEQ ID NO: 642402 - DNA, 727 bp, Homo sapiens
gaggggaacgaagcctgctccccaggctgcggatcccaggacaaccatacgggagtatgccaggcgattcagaccgagctccgcagtgccgttcgctcgagcaggaagacccatcagccgtatggctgacgcgtggaacatgggtccatactacaagcgcggatctcgccgaaggcagatcgggaccccaaagcctgagtgccgtcctgtctcatgagtacgtccagacgatctcatggtcccgatggaaggatgaactgtgggacccgctggattaatgcatcgtataccactccaaattctcgtagcgtcggcatttcgtatgtccccaccagcgggagccagcacgtgtgatgatgcagcatggcaaacccaagttccctcgtgagggcctggggtcggtgcaagtgcgctctgagggaccgcatggggtgcccacgaggggtggcgtccttacttcgttccctcctaaccacgcaatcccgtatgaaacatacgtacgcaacggcaactgtccctttgcgtgaccaaggggctgactgggaccacccaacgttgcaaccccacgaaacgaatcttggcgccaatcggaattagccccattggtgaatgatggccttcggatccggatttgcgcaaaaagagctggcaacgaaaccctatggggggcacatccctacaattcgcttggtgcgttcagaaggctttgggacaccaacggcagatt

SEQ ID NO: 642403 - DNA, 833 bp, Homo sapiens
cgagcctgagccgagccgctggccgagccgcgccgatcgccatccggcctcgtgcactcgctgcgcgatccccggccggctggcttgctggcctgggtgggccaggctggcttgccacagcccatggagctcgagaacatcgtagcggaacacggtgctactcaatggcccgggaaggtggcggtggaaatcgcaaaaggcaaaagcaatgaaatggcggcagatgctccagttccctcacatcagccagtgcgaagagctgcggctcagcctcgagcgtgactatcacagcctgtgcggagcggcagcccattgggcgcctgctgttccgagagttctgtgccacgaggccggagctgagccgtgcgtcgccttcctggatgggtgtggccgagtatgaagtgaccccggatgacaagctggaaggcatgtgggctggcagctaacgcagaattttctgagccacactgggtcctgacctcatccctgaggtcccccgtcaagctggtgacgaaactgcaccagcgggtggacggcagggtccctgcaaagacttttccaggaactcaccctggtgaccaatgagtactgagcggtggccctttttggcgaactacctcgacagcatctacttcaccgtctccttgcgctggaacgtggctggaaatgcagccaagtgaacaaaaacacgttcagggcaataccgagtcgggggcaaggtggcttggggagtgtgcgctgcaggtggggcccagttagatgtttctgcaggagcagagaaacggtcgaccggcaggagccagcactaagagagcacctggacctacactctg

SEQ ID NO: 642404 - DNA, 356 bp, Homo sapiens
agaggatccccttacttattcaagatacctgccaaaggtaaatggtcttactattctaaatgactttgaaatgcatgtataattgcaaacagagcagagaagactttaatcagaatttctgtgcccatttcaattcagtacctgcttcgacagcatcggtttggctgagctgagggatcataggactgctcttttatggtgttgaatttctcttgacaattcctttagaactcttgagccctggtgccgggctggagtctttgttctcccactttctcctgtctgctgtccttcagctagttactttatttctgggcctcaatttcctcctctgcctttttctgtgcccttttcta

SEQ ID NO: 642405 - DNA, 844 bp, Homo sapiens
tagatcaagatagactccgcttgtagagtccagacactcctgacgacgtgcacgatgatctccctaagtcccttgttgaagccccattcagttggttcaatagtacgttgcgcgctagtactctggataacttaggcggctattggtataatacgcctcacacgtcatgtctcgaccccctagacgagactacatagcctaccccattccgttgtactatccctgatgaggcatcaattatgaacaagctccatctgcgcggacgacaatacagaccttaagatcgctcatgtgcatactgctttcaagtcagccacatagccctcgtagtaagcagccattctcatccaataccccctgaagcttcaccggcgcagtcattctcataatcgcccactggacttacatcctcattactattctgcctagcaaactcaaacgtacgaacgcactcacagtcgcatcagtaatcctctcttcaaggacttcaaactctactcccacggaatagctttgtgatgacttctagcaagcctcgctaaccgtcggccttaccccccacgattaacctagctgggagaactctctgtgctagtaaccacggtctcctgatccaatatcactctcctacttacaggactcaacatactagtgcacagccctatactccctctacatattttacccacaatcacaattggggctcactcacccaccagcagttaacaacattgaaccctcagttcacacgagaaacacccttatgctcatacacctatcccccattgtcgtattacccctcacccagcatctcggtcttttgtcgttggcggttggggggtgt

SEQ ID NO: 642406 - DNA, 805 bp, Homo sapiens
cggaggggacacccgaggtgtcaccagagagaggggtgcaaaccgggcggggaagaccgagcgtgtgtcaccagaaaacaatggtggtgggggcccaacacgggcgataacagggtcacagagcgcgccgttgccacagaaagttgcgcgccgcgagacggtgttctaagagcgcccaaggcgagggcgcaaaagaaccccgcggcgccaaggggctggccggccaaaagcatttggagcgccgccgttctgccaccgataggttcaccgccagctgaaacgtttctgaatcgcggagcccccaaggtctgcccatagtaatcgcccagtgccgacaactgcaaacgagtagcataatcataaaggaaggaggcctgctattcaacaatgatgtactcatgggcacaagaagatcttgcagtcgtttatggatttaggggttttctgccgcgcgacttttttgagcacccaaatcgtgggagcactatttttgcaacctcatagacctcccccaccaactgcttttggtaaccttgtgaagacgcctccaatcttgggatgtgtttcagtggagcaccccgtgtgatcgcaacacttagggataaagaatgttggggggaccaaccgtgagtctaggcggatccttcatggtgctaccccccttgctcccccgcctattgtacggcagggataagggtagattctcccaagactcccctctgcgtccggttatatcagtcaccaaaaactggtcgccatgctttcacagcacccggactcttccatggctctttctcaacaggcc

SEQ ID NO: 642407 - DNA, 284 bp, Homo sapiens
  misc_feature (14)..(14): n is a, c, g, or t
gtggggtgtccaanttgagaagatttacacaaaacccagcgggagaagttttgctggtgcccttgacatggctgatgaaagactatgagttttagccagtctccaagaggccagagttctggtgaagaggacacagtgtggtttggcaaagatggatacactgagcctcacttgccctcggtgcatggtgggagagaggcagccaagagtcttaacaaacccaacatctttggcgaaaaggatcacctgggagatattatacagggcgcgctgggcccagttgt

SEQ ID NO: 642408 - DNA, 866 bp, Homo sapiens
  misc_feature (721)..(721): n is a, c, g, or t
tttcctaactcagaagtggtgcatgggcaagcatgagtcccactactgggcgtctacccagaagaaaagaagtcattatatgagaaaagatacctgcacacgcatgtttatagcagcacaattcacaattgcaaaaatgtggaaccagcccaactgcccatcaggtcaacaagtggataaagaaattgtggtgtatctatacgtaccatggaatactactcagccaggaacgaaataatggcattcacagcaacctggatggatttggagaccattattctaagtgaagtaactcaggaactggaaaaccaaacatcgtatgttctcaattataagagggagctaagctatgaggacgcaaaggcatgagaatgatacaatggactttggggactctggggaaaggacgggaggcgggtgagggataaaaaacgtacacactgggtcctgagcacggtggctcatgcctataatcccagcactttgggaggccaaggcaggtagattatgaggtcgggagttcgaaaccagcctggccaacaaggtgagacccctccccatcctctactaaaataattagccgggcctggtggcgcatccctgtaatcccagctactttacttgggaggctgaggcaggagaattgcttgaactcgggaggcggatgttgcagtgagccaatatcgcaccactggcactccagcctgggcaacagagcaangactcccgtctcgaaacaagaaactcaattttaaaaactacacattgggtacaatgttcactcctcgggtgaagggtgccacaaaatcttcaaaattccctactaagggacttatccatgtaaccaaaaacaacctgttccccaa

SEQ ID NO: 642409 - DNA, 307 bp, Homo sapiens
attcactagaaacattaaccaataggattttggtgagcttagcttctgtattcctactgccgcccagaaaaggggcagggctctgcagcccgccagacagacgagcaccccatgcctatacctccctccccgagctaagtcccagggcatctgggccttgctggagactgggctagctctgtaggctcggcgagggagcagggtgccacccacctctagtattagggagatagggaaagtaaaccacttcccttccaaaccccagggggcccccaccacaagctactactcagagaagaaactccca

SEQ ID NO: 642410 - DNA, 786 bp, Homo sapiens
agcggatgcgcgtgggcggggagcgaccgagtgtccgtcctcctactgcggctacctcacctggcacagcggctggccgccttcccagcctactgcagccccagtcgctccccgcagagcgtaacacttcaggagacggcgctgcagtcccccaggccagacaggcgcacgaacgaccccgcaagacatgggctattacaaccccattctacgttcactgagccaccggagggacgagggcgacctggacccgcggacagatcgcccaggcctcacgacgacccgctggcgcccaggtacaccgagggcgtagagagaccggccgggcactcctcacgtggcagagacagtcgagatccacgcggacacactctcaagtgaacgaaagagtaggactccgcacgacacctatccagcgaaagccccgacccggaccaaacgcggccgaccacggccggccacgcagacactgtgctcagtacccgacaccctcggccccccacgcgccactacactgccccagcaccaactgcgcaggcactacctctctctcgcacccccacccgccactacaaaagcccacccccactcgtcctcaacaccgcccccaacgccaccctacacggggcagcaacaaccagcgcacctcccccccccccccgccaactggccctcatactccctagcaccgccaactccccaccgacacaccaaacagtccacccacacccgcacccgacacccaacccgcgccgcccaccagcgcccccccaccacacccccccc

SEQ ID NO: 642411 - DNA, 898 bp, Homo sapiens
gttacccaacttcgggctggatcctgggctctcattcttagggtgcgtgctcccgatttaaccaatggcgcaaaaccgtttcgagtccacacgaggggaacactcttttgggtaaggaacatacctataaggtactcctgataatggcgtgttgaaaagtttcttcaaagacgccacggtgtttaccccctctgttgtctcaaaccaccacggggcgacaagaaattctttccggcccctttcccaaagccgcgcgtccgccctttgtggagggtcccttccccgtcggaagagggggtattttccttattttcgttgttatttaattcccccagatggggtccccaccacttcctccgtggggtataatcccccacaagtgttgttaaaattgttgtgaaaaaaaacatctatgcgcgtttaacttttccataaaggctcccaaggatttattttctccaacgagcgtttctctagagagcctttttcccagaggttcccacccacgatcccccccaacaaccacatatgccgcccctctcttgaaagaaaattttgagaccccaagataattggctggccaccgtgaataattatgtgacctgtgagaaaaggataaatccccttctcgatccagaacctccgtagatgtgctttctttagagacctcccatcttctgaataataattgtccgctgccctctcttcactattactcttccccacttcttcccaatccacgtggacctcatttctgccccacaaatatatttccgcggatattctttgacatccctctctgccgcgtccccgcattggaaaagggaaaaaaaaaatttccagaactttttcccccccccccgggaaaaatttaaaccccaccccttcggccaaaaaa

SEQ ID NO: 642412 - DNA, 370 bp, Homo sapiens
  misc_feature (5)..(5): n is a, c, g, or t
  misc_feature (261)..(261): n is a, c, g, or t
  misc_feature (306)..(307): n is a, c, g, or t
  misc_feature (309)..(309): n is a, c, g, or t
  misc_feature (345)..(345): n is a, c, g, or t
  misc_feature (347)..(347): n is a, c, g, or t
  misc_feature (349)..(349): n is a, c, g, or t
aaagnaaatattaattggaaaaataatacccaatttttttacccttccagccaattgaatggtgcctttgttgtggtgtcctgcctggaaagtcctacctgcccattatagggaacccttgccttgttagccttcctcctagatcctcctattcctaaacaatctgttagtgatgataaattcctgtaggagggtctattctgagccgttaacttcctgtaaggggaaaatgggtgggttaccagaaataccattgaagcngggtgggctgtggggtggaaggttggggtatttgtcttgagaatnnanaactacgaaacacttttgtacacaactgattttttnananataaacacatttttaaagatg

SEQ ID NO: 642413 - DNA, 342 bp, Homo sapiens
  misc_feature (5)..(5): n is a, c, g, or t
aaagnaaatattaattggaaaaataatacccaatttttttacccttccagccaattgaatggtgcctttgttgtggtgtcctgcctggaaagtcctacctgcccattatagggaacccttgccttgttagccttcctcctagatcctcctattcctaaacaatctgttagtgatgataaattcctgtaggagggtctattctgagccgttaacttcctgtaaggggaaaatgggtgggttaccagagcacgccacccgccatgggagtgtgctcaggagtcgcgagcagcgtagacatatgtccagaggggcagaatctccaatagaggactagagcaatgc

SEQ ID NO: 642414 - DNA, 417 bp, Homo sapiens
  misc_feature (1)..(1): n is a, c, g, or t
  misc_feature (414)..(414): n is a, c, g, or t
nttagattccacaactaacctttctttttcctggagacggagtttcgctcttgtcacccaggctggagtgcagtggtgcgatctcagctcactgcagcttccaccttctggattcaagctattctcatgcctcagactcccgagtagctgggattacaggcacctgccaccacacccagctaatttttgtatttttagtagacaaggggttttgccatgttggccaggctggtcttgaacttccgaccctaggttatctgcttgcctcggcctcccaaagtgctgggattacaggcatgagccactgcacccaacctcccacgactaaccttttaagaaattatttacctatgagttttgggcagagtattcaaaggaagactacctacaagggtcttttcaaaaggactattnaaa

SEQ ID NO: 642415 - DNA, 1065 bp, Homo sapiens
taaaaagggaaacaaagaaatctggagcaatttattattattttttatttattggagacagagtctcactgggtcacccaggcgtggagtgtgcaggtggcgtgtgggtgttcagcttcacagcaacctctccacctctcccaggtttcaagtgtgaatctcggtgcctcagcctagcggaacagtgtgggacaacaggctcccgccaccagtgccgtggctatactttattttttttttgtgtgggtgccagaggaatttcatttctgtgtggtcacacccgaggctgtggaagagtgcggaggggccaccaaatcaatagttccaagtgtggaagccttagaaagcggggttatatagcctctcccaagagtgatagcgtgggggacagtgtggagagggcgcgcctccacccactctgagtcgcccgacgccaaaaaaaggtggaagacacttagacggggggggcacagaggtgggggggaaataagccacacaagaggtgtgaagaaagagaaacacttataggcaaagagtgtggaagagggaacacaagtgtgtatacaaagtgtctccccagagggggcgccacagcacacagaggggccctgtggggaccagaggtgggagagagggagcgccagaaacccccagagagagagggagagggggacaaaaaaaaagaaagaggcacaaaagagaggggtactcggaagaatatcccgagaaggggagaggggccaaagagaggggaaagagaggcgtaaaacatttttccccaaaacaaagtggggggtaacacaagagggggggcccgcggggggaagctcaggggggacaccaaaagcgagagtagtgtccacaagaggtgccccgtggagaaaaccacgagaaaaactatcgtgagagaggggagaaaggacccctatgtgttcgcgggggccaagaagacctaccacccaagtaggggatggggcacaaacgggggcccaagaggaaaacaaccaataaaacgctcgggggcgaggcaaaaccacagtgttattggggaccaaaggcgcaaac

SEQ ID NO: 642416 - DNA, 903 bp, Homo sapiens
tatatcaacatatgagtgatcccagtcacgtgagattgttcctcgactggtcatatctgtttcctaaaaaacatctatggtactgtcgcattatgtgtcccgtctgcatcaccgattggacaacgcccggtgatgtgcgagaggatacatgtatatttgccagtaagtgctctgtgagagctctagtctcgtggctcttcattcagacagatgtgcagagttcagaaagcgaccattgtcaagattaagccccgaaagtggggttggaactaataagtgggctatgccagaggaaagtacccgagccgcccgggtagacaaatttgtaaataagccctgaaagagactccaaaaagattcctgtggccaatccaatacatcccagcctcttctaatcaggttctcctttcaaaaatggaacaataccgaagtgtgggagagcagctgtaaaaagtctccaaatcagttgaccccatttttggacaaccttgagatggatgctgcatctccaacatccagcgaagtcagagctggttcagcaaagattggcccacccatcatgagatagacacagttcatcccatggacacaatgcaagatgcctttcttgtcacctttatctaatacaggggatgacagtgccgtatttgcttcacaggcacagacttgatgaaagtagctcccatggtggtggggactggaccctgtgggttgaaacttctctacactcagtaactcaagcagaagtggcacattccatgggttggcgaaaggctcaaaaccaaggcgctttcgtatgcaacattatgagcggggcaacgcggacgaaggcggtaaagcccaacacatttgtaacaccacagcacgactgcacacaagccggcgggcagtgaacgaaaaccg

SEQ ID NO: 642417 - DNA, 1042 bp, Homo sapiens
  misc_feature (887)..(887): n is a, c, g, or t
  misc_feature (1041)..(1041): n is a, c, g, or t
acgagccacataggctagtggagcctgggtgaatcggacgaggcgcccgtcccgtcgccgccgccgccgccgcagacccctcggtcttgctatgtcgagctcacccgtgaagcgtcagaggatggagtccgcgctggaccagctcaagcagttcaccaccgtggtggccgacacgggcgacttccacgccatcgacgagtacaagccccaggatgctaccaccaacccgtccctgatcctggccgcagcacagatgcccgcttaccaggagctggtggaggaggcgattgcctatggccggaagctgggcgggtcacaagaggaccagattaaaaatgctattgataaactttttgtgttgtttggagcagaaatactaaagaagattccgggccgagtatccacagaagtagacgcaaggctctcctttgataaagatgcgatggtggccagagccaggcggctcatcgagctctacaaggaagctgggatcagcaaggaccgaattcttataaagctgtcatcaacctgggaaggaattcaggctggaaaggagctcgaggagcagcacggcatccactgcaacatgacgttactcttctccttcgcccaggctgtggcctgtgccgaggcgggtgtgaccctcatctccccatttgttgggcgcatccttgattggcatgtggcaaacaccgacaagaaatcctatgagcccctggaagaccctggggtaaagagtgtcactaaaatctacaactactacaagaagttagctaccaaaaccatgtcatgggcgcctccttccgcaacacggcgagatcaagcactggcggtgtgattctcacatttaccaagtcctggagagctgtgcggaacgcagctgtgcnggtccgccagggccagcgactgaaatcccggggaagttcgggtgccccggccggtggacccgcgcccattccgacaggcggcacattagagacccggacacccgcaacgcgttcgcgcacatatagcccgaaaaacgcctgtagttgtgttggnc

SEQ ID NO: 642418 - DNA, 424 bp, Homo sapiens
gagagcttggcttactgcaacctctgtctcccgggcttgagtgatcctcccaccttggcttcccaagtagctgtgactacaggtcaccatgcctggctgatttttgtattttttttaaagagtgagttccaccatgttgcccaagctggtcttgaactcctgggctgaaatgatccttctggctcagcctcccaaagtgctggacttacaggcgtgagctaccacgcccagccaattattttcttttttggggggtgggggatggagtcttgctctgtcacttaagctggagtacggtggcgcgttctcggctcactgcaacctctggcttccgggttcacgccattctcctggctcagacttctgagtagctgggactaccgatccagatgatggaggcagcaacacgacacatcgaggaggg

SEQ ID NO: 642419 - DNA, 929 bp, Homo sapiens
  misc_feature (775)..(775): n is a, c, g, or t
  misc_feature (781)..(781): n is a, c, g, or t
  misc_feature (802)..(802): n is a, c, g, or t
  misc_feature (804)..(804): n is a, c, g, or t
  misc_feature (806)..(806): n is a, c, g, or t
  misc_feature (809)..(811): n is a, c, g, or t
  misc_feature (816)..(816): n is a, c, g, or t
  misc_feature (822)..(822): n is a, c, g, or t
  misc_feature (826)..(826): n is a, c, g, or t
  misc_feature (839)..(839): n is a, c, g, or t
ggacgcgtgggtcgacccacgcgtccggcgagctcacccgtgaagcgtcagaggatggagtccgcgctggaccagctcaagcagttcaccaccgtggtggccgacacgggcgacttccacgccatcgacgagtacaagccccaggatgctaccaccaacccgtccctgatcctggccgcagcacagatgcccgcttaccaggagctggtggaggaggcgattgcctatggccggaagctgggcgggtcacaagaggaccagattaaaaatgctattgataaactttttgtgttgtttggagcagaaatactaaagaagattccgggccgagtatccacagaagtagacgcaaggctctcctttgataaagatgcgatggtggccagagccaggcggctcatcgagctctacaaggaagctgggatcagcaaggaccgaattcttataaagctgtcatcaacctgggaaggaattcaggctggaaaggagctcgaggagcagcacggcatccactgcaacatgacgttactcttctccttcgcccaggctgtggcctgtgccgaggcgggtgtgaccctcatctccccatttgttgggcgcatccttgattggcatgtggcaaacaccgacaagaaatcctatgagcccctggaagaccctggggtaaagagtgtcactaaaatctacaactactacaagaagtttagctacaaaaccattgtcatgggcgcctccttccgcaacacgggcgagatcaaagcactggcggtgtgantctcancatttaccaagtctgggaacngngnggnnnggcantgggcngtgnccagcaggggcancagggctggaaaccccggggaacccctgttggaccagaacagtgggcaccccggcccaggccgaatacagccggaaaacaagacaacccc

SEQ ID NO: 642420 - DNA, 237 bp, Homo sapiens
gcttttctctttttgagacaatgcctcattctgtcacccaggctggaatgcagtggcacaaatacagctcacagcagtcccaacctgccaggttcaagcagtcctcccacctcagctgcctgagtagctgggactacacgtgtatgtcaccatgcctggctgactttttaatttttttatagcaatgaggtctccctgttacccacgctaacaaaaaaaaatttttttttttttgag

SEQ ID NO: 642421 - DNA, 876 bp, Homo sapiens
  misc_feature (6)..(7): n is a, c, g, or t
aaggcnnggtagcgaggctgggtgggctcggtcttgctatgtcgagctcacccgtgaagcgtcagaggatggagtccgcgctggaccagctcaagcagttcaccaccgtggtggccgacacgggcgacttccacgccatcgacgagtacaagccccaggatgctaccaccaacccgtccctgatcctggccgcagcacagatgcccgcttaccaggagctggtggaggaggcgattgcctatggccggaagctgggcgggtcacaagaggaccagattaaaaatgctattgataaactttttgtgttgtttggagcagaaatactaaagaagattccgggccgagtatccacagaagtagacgcaaggctctcctttgataaagatgcgatggtggccagagccaggcggctcatcgagctctacaaggaagctgggatcagcaaggaccgaattcttataaagctgtcatcaacctgggaaggaattcaggctggaaaggagctcgaggagcagcacggcatccactgcaacatgacgttactcttctccttcgcccaggctgtggcctgtgccgaggcgggtgtgaccctcatctccccatttgttgggcgcatccttgattggcatgtggcaaacaccgacaagaaatcctatgagcccctggaagaccctggggtaaagagtgtcactaaaatctacaactactacaagaagttcgctcccaaacccggtcgggggcccccttccggaagggggaaaccagctggcggggggttcccccacttcccaagtcgggaggcggcgcggccgcagggccgtgccccagggccgcggccgaaccggtgatccggggccggcagggggaacgggcctg

SEQ ID NO: 642422 - DNA, 1200 bp, Homo sapiens
tgcagtggctcttccctgctaatcccagcaactttgggaggctcaggtgggaagatcgtcggagctcaggagttcaagaccagactgggcaacatggcaaaaccccgctctgctgcaaacaacttacaaactacttagcctggcactggtgccactactgcctatactccagactactctgggaggctgacgcgagggaggactcccattcagcccccagcaggctcaacggctgcacgccatgccctgcacccctgcccacagacacctataaggaaggccaaaggacacggctacgactcacctgccacgcatcaggacgcttcgtgaccacgccttggccacatacggatgcaaaccctgctctctacctacaacaatacaaacaatccggtcctggattgtggctcgagccgggccacgtgctaaatcccaaactacttccaggcaggcctgcagcaccagcgacgcaaatcacctttgcacactccatgggcgacgcgctggcaccgggcatgccacgccggaacccacacgacttgaccaccccacctgcacgacaccaggcctaacggacaacggggcacgacgcgcacggacctcatgtccacacccaccgacacaacccacccacaaaccaaacacaaaaaaagccaaagcacgaaccgcagaaacgcaaaagacaccaaagacgaacagactaccagcgagcaccacgcgagagcacgcaacacctcaagtggccctgtgaagccaacaacaccgccagctgggcgaggcccaacgagcgcggcaccggcctcccccgtgtgccaccctgcggcgagataaagacagcccgagcccccagcaacacaccccagcgggagagaagcagacactcacatcacaaccaacgtcagaaagacaagccgacgcaccgtaccccccaaacacgcgcaaccccacggggcgacccccggggcgcccaacaaccataccccagcgcgcccgcacacgcggacaaacgaggaccgtaggacattaagaggcaacaacgagaaccaagagcgtcgatagtgcacccgcagtcccccgtctgcgagacaaacgtagtaaggacacaagcaagaaaagagagaagaactacaccacaacacccacgccaccacgcagaggacagctagtcacgccacggcccacgcgcacagcgcagagcgg

SEQ ID NO: 642423 - DNA, 689 bp, Homo sapiens
  misc_feature (578)..(578): n is a, c, g, or t
  misc_feature (614)..(615): n is a, c, g, or t
cttttggggtctttgctctccttgtggtggtacggcagtgggatgcacattttcctttgaccagcgttctcccagctgtcgcaccgctcactcccatgctgttacaggtcacctcttgcaggggcatatttgatcgctgggcacttagtgtttgttgttccatcattatgcaaacagccgcctcttgatgaaccttcagtgacccagaagaaggtgtgagaagtgtggctggaccccgctttcggaaatgctctggactcccctaacgtcctggggaattacagggttccttcacatgtttccagttggaagcaagtactccacttactttggcttttgaaaactatttccctacgccatcgacgagtacaagccccaggatgctaccaccaacccgtccctgatcctggccgcagcacagatgcccgcttaccaggagctggtggaggaggcgattgcctatggccggaagctgggcgggtgagtgcctggactcgggagggtcccagctaggccctcgtgctagtctagttggccttgcttccctccctaactgaattttagttctcaaacaccangaactcaaggggggaaaaaaaccctatctttttgcnnatttttgtttattgaagtgtaatctgcatgaagtaacctgcacctgtggtaaatgagcagttcagagagttttg

SEQ ID NO: 642424 - DNA, 309 bp, Homo sapiens
ctagtggaggaaagctggtaatagcggtggtatacatggttgtccggtgcaagattttagtggccagtgtgatgagctgcaacatctggtgtgacgcaaggggccggtcggcaagtgcccgcgggaacacccactccggcgaggcagaatataacactgggtgggtgggtgtcctgacgaatgggccggtaatatggggtgcctcgaagcgttcattacaaattggagcagggacagatcatagatttctgattttatgtaaaattttgcctaatacattaaagcagtcacttttcctgtgctgtttca

SEQ ID NO: 642425 - DNA, 143 bp, Homo sapiens
gatcatggggtgatacctcatgctgtctctgatagtgagtgagtctcatgagataaatggttttataaggggttctcctacttcatctcattctttacttgttgtcccatgtacatgtgttccttccccttctgtcgtcttct

SEQ ID NO: 642426 - DNA, 1284 bp, Homo sapiens
acgagccacataggctagtggagcctgggtgaatcggacgaggcgcccgtcccgtcgccgccgccgccgccgcagacccctcggtcttgctatgtcgagctcacccgtgaagcgtcagaggatggagtccgcgctggaccagctcaagcagttcaccaccgtggtggccgacacgggcgacttccacgccatcgacgagtacaagccccaggatgctaccaccaacccgtccctgatcctggccgcagcacagatgcccgcttaccaggagctggtggaggaggcgattgcctatggccggaagctgggcgggtcacaagaggaccagattaaaaatgctattgataaactttttgtgttgtttggagcagaaatactaaagaagattccgggccgagtatccacagaagtagacgcaaggctctcctttgataaagatgcgatggtggccagagccaggcggctcatcgagctctacaaggaagctgggatcagcaaggaccgaattcttataaagctgtcatcaacctgggaaggaattcaggctggaaaggagctcgaggagcagcacggcatccactgcaacatgacgttactcttctccttcgcccaggctgtggcctgtgccgaggcgggtgtgaccctcatctccccatttgttgggcgcatccttgattggcatgtggcaaacaccgacaagaaatcctatgagcccctggaagaccctggggtaaagagtgtcactaaaatctacaactactacaagaagtttagctacaaaaccattgtcatgggcgcctccttccgcaacacgggcgagatcaaagcactggccggctgtgacttcctcaccatctcacccaagctcctgggagagctgctgcaggacaacgccaagctggtgcctgtgctctcagccaaggcggcccaagccagtgacctggaaaaaatccacctggatgagaagtctttccgttggttgcacaacgaggaccagatggctgtggagaagctctctgacgggatccgcaagtttgccgctgatgcagtgaagctggagcggatgctgacagaacgaatgttcaatgcagagaatggaaagtagcgcatccctgaggctggactccagatctgcaccgccggccagctgggatctgactgcacgtggcttctgatgaatcttgcgttttttacaaattggagcagggacagatcatagatttctgattttatgtaaaattttgcctaatacattaaagcagtcacttttcctgtgctgtttca

SEQ ID NO: 642427 - DNA, 1380 bp, Homo sapiens
tgtgccccgcccccatgtggggggcggaagacgaatgaaaataactacacacccgccccgctctccgggggggggagcaggacaacatagatcaaaacagaaagatacagaatttgttgtggtgtgaaggaagatgaaaaagaaaagcacggggggggtaggatgacctcccctacccgtgggagaggaaggcgcccgtcctaaaccatatctatccgaaccaaagcgtggcgcccgaaccgaggcttgtgaaatgagaggcaaagcacagggaagggcagtagcgtagagaaaacgagggagggaaatgaatgtacgtaaacgtattcaatgaaaagaggctttcgtcctaaccagggaaacacaacggagggtagatagggagggaaggtaggcccccaagccggggaagagggaaccaaaccaggcgacccaaccagagccgcttcgtcccaccggctgtcggaaggaagcagacagcaaccaacaggaaggattaggaaggcgggagcaccgtctcaatgaaggaagtgagggtttgggatatacgagaacatactggggaagcagtttctccttccaggaagcaggaggtgggcggggggggttgtgcggaccacacgaagggagtgagtggaaggacgtcgtcttctggcgcttcaggagcaggaggtagtaagcaggggggggagaaaaagaggaccgccttgatagtccttgctgggaggaaagtaattgttagtgagtattaggagattagttgtaaaaggcttataatttatcgtagaaaggaggatttcggcggcgggcggagaagattggtagaccccacggcgccttcggggagagatttggaagatctccatcacaggggagattagagcttgtaggatatatagagagggggcttcgaagagggagaaagggagagagggggagatagacacacggaagacacacgccggcgcgcacactgggggcggagagagagatgagacctttcttataaggcacacacatatagctggggggctgttatagagaaattctctatttcccactctaatttctctcttaacactaagggcgccttgtttctaaagaatccaaaatttttcacaccacgagatcctctctcccctatagtaattcttcacagacaacacatggcttccctggttttccccacatccttgtcctttccacatgtttcacttaaattcacataattgccccgcgccctagtcccacattttcacacttcctttgaacggctcctagtaagttttgttaaattcttataccccgtaatttttgcttttaattttgataacctctttatgacttaaccaatataaaaggatgtatggtttttatcca

SEQ ID NO: 642428 - DNA, 1260 bp, Homo sapiens
ggacgcgtgggtcgacccacgcgtccggcgtcgccgccgccgccgccgcagacccctcggtcttgctatgtcgagctcacccgtgaagcgtcagaggatggagtccgcgctggaccagctcaagcagttcaccaccgtggtggccgacacgggcgacttccacgccatcgacgagtacaagccccaggatgctaccaccaacccgtccctgatcctggccgcagcacagatgcccgcttaccaggagctggtggaggaggcgattgcctatggccggaagctgggcgggtcacaagaggaccagattaaaaatgctattgataaactttttgtgttgtttggagcagaaatactaaagaagattccgggccgagtatccacagaagtagacgcaaggctctcctttgataaagatgcgatggtggccagagccaggcggctcatcgagctctacaaggaagctgggatcagcaaggaccgaattcttataaagctgtcatcaacctgggaaggaattcaggctggaaaggagctcgaggagcagcacggcatccactgcaacatgacgttactcttctccttcgcccaggctgtggcctgtgccgaggcgggtgtgaccctcatctccccatttgttgggcgcatccttgattggcatgtggcaaacaccgacaagaaatcctatgagcccctggaagaccctggggtaaagagtgtcactaaaatctacaactactacaagaagtttagctacaaaaccattgtcatgggcgcctccttccgcaacacgggcgagatcaaagcactggccggctgtgacttcctcaccatctcacccaagctcctgggagagctgctgcaggacaacgccaagctggtgcctgtgctctcagccaaggcggcccaagccagtgacctggaaaaaatccacctggatgagaagtctttccgttggttgcacaacgaggaccagatggctgtggagaagctctctgacgggatccgcaagtttgccgctgatgcagtgaagctggagcggatgctgacagaacgaatgttcaatgcagagaatggaaagtagcgcatccctgaggctggactccagatctgcaccgccggccagctgggatctgactgcacgtggcttctgatgaatcttgcgttttttacaaattggagcagggacagatcatagatttctgattttatgtaaaattttgcctaatacattaaagcagtcacttttcctgtgctgtttca

SEQ ID NO: 642429 - DNA, 470 bp, Homo sapiens
cgtgtaaggtgatgggtgagtgagccccatggtgtggtggtaaatactgtagagggagtatagggctgtgactagtatgttgagttcaaacaaatatttgatgacatacatggatgaggtaaactaacaatgtaatttggggtacgtgacagactccagagctgtaaccggaagcttgggtggggccggggggcggggagagtggttcagttaggtggtacaagaaaagcccctctaagaaaagaataggctgggcatggtggttccacctgtaatcccagcactatgggaggccgaggcaggaagatggcttgtggtcaggaattcaagatcagcctgggcaacaaggcaagatcctatctctacaaaaaactttgaaaattacccaggcgtgatgactcacagctggggtcccagatctggggaggctaagacaggaggatggcttgagcctgggaggttgaggctgc

SEQ ID NO: 642430 - DNA, 1260 bp, Homo sapiens
  misc_feature (3)..(5): n is a, c, g, or t
  misc_feature (18)..(19): n is a, c, g, or t
agnnngtgggccgtccgnncgcccgtcccgtcgccgccgccgccgccgcagacccctcggtcttgctatgtcgagctcacccgtgaagcgtcagaggatggagtccgcgctggaccagctcaagcagttcaccaccgtggtggccgacacgggcgacttccacgccatcgacgagtacaagccccaggatgctaccaccaacccgtccctgatcctggccgcagcacagatgcccgcttaccaggagctggtggaggaggcgattgcctatggccggaagctgggcgggtcacaagaggaccagattaaaaatgctattgataaactttttgtgttgtttggagcagaaatactaaagaagattccgggccgagtatccacagaagtagacgcaaggctctcctttgataaagatgcgatggtggccagagccaggcggctcatcgagctctacaaggaagctgggatcagcaaggaccgaattcttataaagctgtcatcaacctgggaaggaattcaggctggaaaggagctcgaggagcagcacggcatccactgcaacatgacgttactcttctccttcgcccaggctgtggcctgtgccgaggcgggtgtgaccctcatctccccatttgttgggcgcatccttgattggcatgtggcaaacaccgacaagaaatcctatgagcccctggaagaccctggggtaaagagtgtcactaaaatctacaactactacaagaagtttagctacaaaaccattgtcatgggcgcctccttccgcaacacgggcgagatcaaagcactggccggctgtgacttcctcaccatctcacccaagctcctgggagagctgctgcaggacaacgccaagctggtgcctgtgctctcagccaaggcggcccaagccagtgacctggaaaaaatccacctggatgagaagtctttccgttggttgcacaacgaggaccagatggctgtggagaagctctctgacgggatccgcaagtttgccgctgatgcagtgaagctggagcggatgctgacagaacgaatgttcaatgcagagaatggaaagtagcgcatccctgaggctggactccagatctgcaccgccggccagctgggatctgactgcacgtggcttctgatgaatcttgcgttttttacaaattggagcagggacagatcatagatttctgattttatgtaaaattttgcctaatacattaaagcagtcacttttcctgtgctgtttca

SEQ ID NO: 642431 - DNA, 113 bp, Homo sapiens
gacgctctctgtggggatcttcatgagagtagtcagatcatgtcccggtcagaccaggtgcagacagcaggatggcatgggggagggctataccccgtcgtagatgtggcaca

SEQ ID NO: 642432 - DNA, 132 bp, Homo sapiens
tcgcagcgcacaggcagacagacagcacatagatagtcagacacgggtgacagaggaagacgcagggcgaatcgcattcagtccacggtgaaagatgacgaggagagtaaatgcacgcgagcaggagggacg

SEQ ID NO: 642433 - DNA, 322 bp, Homo sapiens
  misc_feature (22)..(22): n is a, c, g, or t
tcctcaaatatttgggacaatnttctactctgtgctcaagcattgttttaggtcttagagattcagtgaaaagacgagtcacggccgggcatggtggctcactcacgcctgtaattccagcactttgggaggctgaggcgggtggatcactaggtcaggagatcgagaccatcctggccaacgtggtgaaacccgtctctactgaaaacacaaaaaatttggctgggcgtggtggcgcatgctgtggtctcggctactcaggaggctgaggcaggagaagtgcttgaacccgggaggtggaggttgcggtgagcagatcgat

SEQ ID NO: 642434 - DNA, 218 bp, Homo sapiens
tgacgtatataaggactatctcattggctcctactgacatgctaaataacaaatggaaattgctgtgagtgtcatgcagcaatcttaggaatattttattatgtttctgccggaacataattggccgaggcttacgttgaattgaggccacgaaatttggtggtgttgatgggaggttacagggatagagcttatcaacttaatcaacttatctcatg

SEQ ID NO: 642435 - DNA, 1451 bp, Homo sapiens
acgagccacataggctagtggagcctgggtgaatcggacgaggcgcccgtcccgtcgccgccgccgccgccgcagacccctcggtcttgctatgtcgagctcacccgtgaagcgtcagaggatggagtccgcgctggaccagctcaagcagttcaccaccgtggtggccgacacgggcgacttccacgccatcgacgagtacaagccccaggatgctaccaccaacccgtccctgatcctggccgcagcacagatgcccgcttaccaggagctggtggaggaggcgattgcctatggccggaagctgggcgggtcacaagaggaccagattaaaaatgctattgataaactttttgtgttgtttggagcagaaatactaaagaagattccgggccgagtatccacagaagtagacgcaaggctctcctttgataaagatgcgatggtggccagagccaggcggctcatcgagctctacaaggaagctgggatcagcaaggaccgaattcttataaagctgtcatcaacctgggaaggaattcaggctggaaaggagctcgaggagcagcacggcatccactgcaacatgacgttactcttctccttcgcccaggctgtggcctgtgccgaggcgggtgtgaccctcatctccccatttgttgggcgcatccttgattggcatgtggcaaacaccgacaagaaatcctatgagcccctggaagaccctggggtaaagagtgtcactaaaatctacaactactacaagaagtttagctacaaaaccattgtcatgggcgcctccttccgcaacacgggcgagatcaaagcactggccggctgtgacttcctcaccatctcacccaagctcctgggagagctgctgcaggacaacgccaagctggtgcctgtgctctcagccaaggcggcccaagccagtgacctggaaaaaatccacctggatgagaagtctttccgttggttgcacaacgaggaccagatggctgtggagaagctctctgacgggatccgcaagtttgccgctgatgcagtgaagctggagcggatgctgacagaacgaatgttcaatgcagagaatggaaagtagcgcatccctgaggctggactccagatctgcaccgccggccagctgggatctgactgcacgtggcttctgatgaatcttgcgttttttacaaattggagcagggacagatcatagatttctgattttatgtaaaattttgcctaatacattaaagcagtcacttttcctgtgctgtttcaaaccacacacaccaccataaccaccaaaaacaggggcgggagaaaacccgggcccgtcgccccccttggaaagggcccagagaggaaaaagccgggaacacccgaaacccgtctggcaccttgtggcgggcccccatacgaatgggtcccatccgttccacagaccg

SEQ ID NO: 642436 - DNA, 433 bp, Homo sapiens
  misc_feature (2)..(2): n is a, c, g, or t
  misc_feature (16)..(16): n is a, c, g, or t
  misc_feature (184)..(184): n is a, c, g, or t
  misc_feature (425)..(425): n is a, c, g, or t
antttgaacccccacnttttgacccgtttaattatatttaaaatataaccccaataaaataaggttaggaaaatgattgccatattaacctcctgagaggaaagaatgttatcctgttggtagaattaataaagttacctcatttccttataagaagtaaagatatattggcccgggtgccggntgtcgcgcctgtgatccccagcactttggaaggctgaggcaggcggatcacaatgtcaagagattgagaccatccctggctaacacggtgaaaccctatcgctactaaaaatacaaaaaataagacgggcgtggtggcgggcacctgtagtcccagctattcaggaggctgaggtaggaggacagcgtgaacttgggaggcagagcttgcagtgagccgagatcatgtcactgcactccancctgggct

SEQ ID NO: 642437 - DNA, 1451 bp, Homo sapiens
gcccactccaccttactaccagacaagcttagccaaaccatttacccaaatcaaagtcatcaggcgcatagcacaatgcaaacctggcgccaatcagcatcatagtaccgcaagggcaaagcatgcacaacacattcataaccacagcatcaatcatcagccaaggcactaacccctcataccttctgcatcaactgcacattcacactagcacacatcaacatttgcacaggcagcagcccaacagctcaagcaccccacggaacaccagcacgcagctcacctcaagcaaccagcacacaacagcaagccacaccccgtcctcatggtcagccacacacatcagctaggcgcacagcattctcatcagcgtcagcagcgcgcacccacacaccctcaccggcagcacatgcgatgcatcagcctggctctgctccccaaagcatcagcacatcctctccacgtcaccacacctcataacaacaagtttcagtcacaccaaccaagacacacccgcaatcgattaacaacagtcacgcccgatctgggaaacagcatgcatcaaacgatgcgtatcaagaatacccgaacaagacaggggacacacacaggccattccataaaggcgaacaccaccatcaaagcgcacaacccacacacccagctctgaataccaaacggccaggacagggtaaacaagagcaacagtctataaaagcacaaccaccccaacctccgacactacagggccacaattacgagcaaagcacgaaggaccacacacagccacgacgttctaaagagacacacaacggaccggtttaccaacaagcccattccacaaacaccaccgaccccgaagcagtaacccccgttaaacacacacacacaatcacgcaaagaaacaacccaacactttagttagacccgtgggcacacacctcccccatccccaacaacagccccacacatacgggaaacccaaaagcacgtaattccaaccaccctaactcacgccaacgcaaacacctcacacaggctacacagctacactacaaaggctaccagcccgtgccacaacacccaaatctcccaccaccaatcaccgacaataaaaggaacactgaaccgctccaagcaagtttcacacacaccaaccgacgcaccaacctggagcccgaccactcaaacccaagccgcccaaaagtcaataataaaccaagctcaaaaaccacacaacaaagcatcaagttgacagaaacaggcgaatatcagatgggtcaagaaccccacagcaagcaccaaggcccacaatgtccagtacataacaagggcacacacgggcgtcacaaccaacaaacagcgcgaccaacagcgacacccatcccgacaacccacctccactacaccccccacaccctggtcacaacccccaccacacacacacctta

SEQ ID NO: 642438 - DNA, 1050 bp, Homo sapiens
  misc_feature (1010)..(1010): n is a, c, g, or t
acgagccacataggctagtggagcctgggtgaatcggacgaggcgcccgtcccgtcgccgccgccgccgccgcagacccctcggtcttgctatgtcgagctcacccgtgaagcgtcagaggatggagtccgcgctggaccagctcaagcagttcaccaccgtggtggccgacacgggcgacttccacgccatcgacgagtacaagccccaggatgctaccaccaacccgtccctgatcctggccgcagcacagatgcccgcttaccaggagctggtggaggaggcgattgcctatggccggaagctgggcgggtcacaagaggaccagattaaaaatgctattgataaactttttgtgttgtttggagcagaaatactaaagaagattccgggccgagtatccacagaagtagacgcaaggctctcctttgataaagatgcgatggtggccagagccaggcggctcatcgagctctacaaggaagctgggatcagcaaggaccgaattcttataaagctgtcatcaacctgggaaggaattcaggctggaaaggagctcgaggagcagcacggcatccactgcaacatgacgttactcttctccttcgcccaggctgtggcctgtgccgaggcgggtgtgaccctcatctccccatttgttgggcgcatccttgattggcatgtggcaaacaccgacaagaaatcctatgagcccctggaagaccctggggtaaagagtgtcactaaaatctacaactactacaagaagtttagctacaaaaccattgtcatgggcgcctccttccgcaacacgggcgagatcaaagcactggccggctgtgacttcctcaccatctcacccaagctcctgggagagctgctgcaggacaacgccaagctggtgcctgtgctctcagccaagggggccaagccagtgacctggaaaaatccacctggatgagaagtcttccgtgggtggacaacggaggaccagatggtgtggaaacccngacggaccagtggcatccaatggcggttgaaattttggag

SEQ ID NO: 642439 - DNA, 1416 bp, Homo sapiens
acaagctccgggtggataaggcagctgttgcagcaggacggtaactacgagagccatagatctagatagagaaaggcgtgcggttgcgaggtgcaatgaagcctgtggtatggtataggataaggagtagaacggctgctgttgagtagttaatggaatgctagacagacacgcctctgggtgggtgaaatcttggcaggcatgcatcacgcataagaatcctaggcaccctgaataccattgaacgcctcgcaggatgaaagaacacctactaccagatgggatgaatgaagtcctgctggcgatatacaagtctttttaaaattttttgagttgaatttgcccattgagaaaggggttctagagaatcaagtttatggagaccaaggggtatcattttttggaaactaagaagggatcccgttgaacttgactatcatgtgccagggtgtaagcatgaaagacatactttacgaaaaggaacaacatgaggggccaaaatttgacattcaaaggccaccaaaagaaagaaggatggacataggccatggtaattggggagagccattcacaaggggacaaacctggagcggaacaagcaacaacgtggattatcgagacacccggagagccagtggttggatacatcctattccaattcacccagggaaccttggggttaacgcctatattaatttaccgggtgaggttacattccatgggagacctttcagtggtaatacacatgagcacttaccccacgtaaaaaatacgttttgccactttaaggccgcggcgcaccacggggcgggccccacagcagtgaaacagtggggcgttgcacaggcggcgcgcatcagcctaggctatcaagtgggtatccaacattggggtgtcccaaccaggggtggcaaaaagcgcaatatgggccttacgccaagttgcgttaatgttgcgaagatttaggatttttccacgtatggtggctatcgcagaaaagacacacgttcccaggagagccattacccaaagttactcggggagcaattcccgcgataccaggtcacggggggcactttgggggaaatgaacgcgagctcgcagcgagactcatccagattgggggaaaaggtggagatgggtaatgcacagatggatgggtaatacatggtgttgggcaaataggtagctggtagctatatagcggtataacagtgagcacattgggagaaaagagttatggggcgcaatcacgaaaaagcagctaaagcgatagttcaggagaggcgagggggcacattatagtggtaagtgcgggcagcctaagtgtcgtaatgagtggtagtaagccgatgttttgcagacaaggggggagattaaaactttccaaactggggggaccatttaactggttta

SEQ ID NO: 642440 - DNA, 446 bp, Homo sapiens
  misc_feature (35)..(35): n is a, c, g, or t
  misc_feature (60)..(60): n is a, c, g, or t
actggatagcattcagcctcatcacaggaaattcnttctcctgctgcacagaacactggnaaaagcaagacgtgaatttgattccattcatcagaaaaggagcattcgtggcccacttgctacaaactgtggcatctccccagcctcttagcgggaagaagggcagggcaggggctcacagcccttgggtttttgatgacttctcatatttctctgggtgtcctgcacccccacttccagaactttcttcaaatatccttcaggggtccccggggtgggtcctatcccagaaccagccccagctgtcccgagaggagaggataaggcagatgaacagcctcctggcaggttcagttagcctcagcctgtttccttcctttttcagaacaaggacatgttgaccagtgacacggcaatgtgtgcgcaattaaatgtttttacctgtt

SEQ ID NO: 642441 - DNA, 302 bp, Homo sapiens
tttttctggctgagacggattttcgctcggtcacccacacggagtgcaatggcgcgatctcggcccactgcaacctccgactcccgggtccaagcgattctcccgcctcagcctcccgagcagccgggactagaggcacccgtcaccacgcccgctaccttgggcattcctagtagagacggagttccaccacgctggccaggctgatctcaaacccccggcctcaagtgactcacctgccttggcctcccaaagtgctggaatcacaggcccggcctatctttgcaatatgggtctgcaca

SEQ ID NO: 642442 - DNA, 106 bp, Homo sapiens
tatgctctggagacttggttatacaacatgtcagtgtacgtaacactactgaacttaaatgcaagacacttaaatgctaagacaaaatctcactctgcctgcccag

SEQ ID NO: 642443 - DNA, 784 bp, Homo sapiens
  misc_feature (7)..(7): n is a, c, g, or t
  misc_feature (141)..(141): n is a, c, g, or t
  misc_feature (145)..(145): n is a, c, g, or t
  misc_feature (149)..(149): n is a, c, g, or t
  misc_feature (157)..(158): n is a, c, g, or t
  misc_feature (169)..(169): n is a, c, g, or t
  misc_feature (179)..(179): n is a, c, g, or t
  misc_feature (182)..(182): n is a, c, g, or t
  misc_feature (193)..(194): n is a, c, g, or t
  misc_feature (211)..(211): n is a, c, g, or t
  misc_feature (220)..(220): n is a, c, g, or t
  misc_feature (223)..(224): n is a, c, g, or t
  misc_feature (226)..(227): n is a, c, g, or t
  misc_feature (229)..(231): n is a, c, g, or t
  misc_feature (233)..(233): n is a, c, g, or t
  misc_feature (235)..(236): n is a, c, g, or t
  misc_feature (238)..(239): n is a, c, g, or t
  misc_feature (241)..(241): n is a, c, g, or t
  misc_feature (243)..(244): n is a, c, g, or t
  misc_feature (251)..(252): n is a, c, g, or t
  misc_feature (260)..(261): n is a, c, g, or t
  misc_feature (265)..(265): n is a, c, g, or t
  misc_feature (268)..(268): n is a, c, g, or t
  misc_feature (272)..(275): n is a, c, g, or t
  misc_feature (281)..(281): n is a, c, g, or t
  misc_feature (286)..(286): n is a, c, g, or t
  misc_feature (291)..(291): n is a, c, g, or t
  misc_feature (293)..(293): n is a, c, g, or t
  misc_feature (295)..(296): n is a, c, g, or t
  misc_feature (299)..(300): n is a, c, g, or t
  misc_feature (308)..(308): n is a, c, g, or t
  misc_feature (311)..(312): n is a, c, g, or t
  misc_feature (319)..(319): n is a, c, g, or t
  misc_feature (323)..(323): n is a, c, g, or t
  misc_feature (330)..(330): n is a, c, g, or t
  misc_feature (333)..(333): n is a, c, g, or t
  misc_feature (339)..(341): n is a, c, g, or t
  misc_feature (353)..(353): n is a, c, g, or t
  misc_feature (356)..(357): n is a, c, g, or t
  misc_feature (365)..(365): n is a, c, g, or t
  misc_feature (367)..(367): n is a, c, g, or t
  misc_feature (372)..(372): n is a, c, g, or t
  misc_feature (376)..(376): n is a, c, g, or t
  misc_feature (382)..(382): n is a, c, g, or t
  misc_feature (403)..(403): n is a, c, g, or t
  misc_feature (405)..(405): n is a, c, g, or t
  misc_feature (411)..(412): n is a, c, g, or t
  misc_feature (423)..(423): n is a, c, g, or t
  misc_feature (434)..(434): n is a, c, g, or t
  misc_feature (436)..(436): n is a, c, g, or t
  misc_feature (450)..(450): n is a, c, g, or t
  misc_feature (452)..(452): n is a, c, g, or t
  misc_feature (460)..(460): n is a, c, g, or t
  misc_feature (465)..(465): n is a, c, g, or t
  misc_feature (473)..(473): n is a, c, g, or t
  misc_feature (501)..(501): n is a, c, g, or t
  misc_feature (556)..(556): n is a, c, g, or t
  misc_feature (566)..(566): n is a, c, g, or t
  misc_feature (574)..(574): n is a, c, g, or t
  misc_feature (576)..(576): n is a, c, g, or t
  misc_feature (586)..(586): n is a, c, g, or t
  misc_feature (606)..(606): n is a, c, g, or t
  misc_feature (610)..(610): n is a, c, g, or t
  misc_feature (632)..(632): n is a, c, g, or t
  misc_feature (664)..(664): n is a, c, g, or t
  misc_feature (674)..(674): n is a, c, g, or t
  misc_feature (688)..(688): n is a, c, g, or t
  misc_feature (702)..(702): n is a, c, g, or t
  misc_feature (704)..(704): n is a, c, g, or t
  misc_feature (759)..(759): n is a, c, g, or t
gacgagncgatggcggagagtccgactgaggaggcggcaacggcgggcgccggggcggcgggccccggggcgagcagcgttgctggtgttgttggcgttacggcagcgtcggcgggttcgggccgcctttcctgccggatntttnggcngcggcggnngcacgggcggngccgggtgcncgnggatctgcctnnctcctctgcccccggcncccaccctnaannannannnananngnngnannacttaannactagaannccanacncaannnnaaatgnaaaanaaaanananntcnnacaatatntannccaaatnaaanaaaaaanaanataaannnaaaaaaaaaatnatnnaaaaatananataanaccnaaaaanataaaaataaaaaaaaataananattaannaaaaaaacatntaaaactcctnanaaaaaaaatttatnantgttcgtntttcngtgtccgnccgactatcccatccacccacctcgggncaaactgatgacaacggggaataacacagttaggtttaaccccaacttctaccgnaatgggaaantctgcttnantattctaggnacattgactggacctgcctngagnccaccccacagcatctcctcanttctcatctctatccagtccctgatgacttanaacccctatnacaattaaccccgnttttaacaagagananatccatgaagacagcaaaaactataattaatttatcccgcacgagaccatcacantttcagtcttttacattattgaagg

SEQ ID NO: 642444 - DNA, 162 bp, Homo sapiens
acgcaggagggggtattgtgattgtgtgttgtgtgtgtctgtgtatgtaatggtgtgtctctgtggcgggaggggctgtgtgtgattgtgtgtctgtgtgtgtctgtgtatgtatggtgtgtctctgtggcagagagggtgtgtgtgtgattgtgtgtctgt

SEQ ID NO: 642445 - DNA, 462 bp, Homo sapiens
tataaaattattagtataaaaggggaaataggtaggagtaccgtggtaagggcgatgagtgtggggaggaatggggtgggttggtatgtccaacctggtcctattttatttttaactgttggtaagattatgggggagtagtggtgattggaggtgggagtaacattaggctgtaggtagaatgtagaggttaaggaggtgtgatggtgggactgggtccttaagagaaggtgtatagcctggggctagaagacaaggagcatctggcgaggatgtacggaagtgatgctgcagtgctgaccccaataaagtttctgcaagggcgaaaaaaagaggccttcctcagtgggggaccctgggagcaggcaaccatttatgcagaaatccaggttgtgggatgagattttcacatgagtatgctgctaaaaaaatggggcatcgaccataagggacaggtgtgtg

SEQ ID NO: 642446 - DNA, 686 bp, Homo sapiens
gagaaggccggtggtcgccactccgatcgtaggtctggcgtgtattccgagcgttggctgtctgctcgggctttccgaggcgtcggtgtctaggcggttttccgaccgttggtgtctggacgtgtttctcgaggcgttgtgtgtctgggctgcgcgccaacctctcttgcggttggttgcgccatgaccgagtgtatgagcacgaatgaaggcacacaggcaaaagacttgatttcctgagggcacgaagctctccagattcctgcggttgctggacatggaacgtagagtggcagcactaactgagccactgataaaaccaaacggccaagtgcggcatctatatcgcatagtggacactagggtcagcgacagtcgggagccacatccgtcggttagccctgtgcccactcatgcttccaggaggggcccagcgcaggacccccgagtgtgtgatgagtagtttcccacttggttctcgcctgtacagtgtccttgcgtcccatcattgggttgagactaattgactaggtgcaccccggagagaacagttccccgcgtatgtagacattgcacggctgcaacggcgcgcttcgtgtcacatcgagggtccctgcataccgtgcctaaaggccgtgagggaacccttgtactccgtatggccgcgctcctgggcagacactcta

SEQ ID NO: 642447 - DNA, 301 bp, Homo sapiens
tgttttttatttttaatacatttgaaaaaatgtctaaaaaccagatttaattttgtagtattgtatgtagattgatgttttatttaatctattttagaataaggctgtaaatgtaacaaaatgtggataaagtctaggggtctgaatactttcctaaggcactctacatgaaaatataaagagagcagtgctttgaaagatgccatttactgggctgcttttgataccatcgattaccacattcttttgaagagattggaaacccaaattggtttacacggacaagttctggcgtcgacgc

SEQ ID NO: 642448 - DNA, 245 bp, Homo sapiens
  misc_feature (225)..(225): n is a, c, g, or t
catctcacctcagccacctgagtagctgggactatatgtgcatgccactgtacccagcaaaagaaattattaagcagggacatagtggccttgaagtacaaaatatgtgaagaacaaaaatatttctgacatcttattagaggagtgatctttagcaactgactgcaaggaaagtgatacttaatgaggcaggctatttcagttatgctaaagcaactgagagantacttctgtccctgtggaaa

SEQ ID NO: 642449 - DNA, 390 bp, Homo sapiens
  misc_feature (165)..(165): n is a, c, g, or t
  misc_feature (390)..(390): n is a, c, g, or t
ctacaccgtgagtaaaattttactttgtcaatactgaagtctctgctgtaatccttatatatctttctccagagaacataatattgtcaaatagatacacatttttctaatcaggtatttagcaagcacttgaagatattctataatctcatgcagtgtgttacnaatctcagttatttgctgtatgtttgtatagctctaaatgtgacattacatattattttcagagatgtctaatgttgtaattttgtatttttggtggaacctattgtttgtctatgttgcggattctctgtcacttttgatatgtgtaaagcttatatccctgtaattctgtatacttatagagttttctatttctcagacatctctgtgtagacaattgaacgn

SEQ ID NO: 642450 - DNA, 839 bp, Homo sapiens
ggccattttaacagctaaaacttgtcggattgctttctattttcaagctcaaaagacgatagagaaagaatacttgaaggccacgaagcttgagagaagaacaatttcagaaacaattgtctcaatttgactagaatatcaatgaaccaggaaaactgaagcaccttccctaaagaaacacttgggtataccaattactccacagacagagctgagcgcgtatttacccaaatcagtcacttggatttgctgcctgatacgtgaatcttctctggaaatctcctcatgtggatctacggggcatgcttataatggctgctgttgtccaacagaacagacctagtattgaattggctagtacacgtcatggcaggcatgacaccgacaagcttggtgaatccagcctattttctccttgccgtaaattgtgggacccttgtccctggtgctgatattctcactacgttatgccggtctaccctgtgtggcacgagcccaagtgacatgctttcactgacgagttcactggatgtcgctgaagaacagaactccatcagacgatgactgactgaatgacatcacccctttacaagtgaaagctttcttgtcaatgcacggggacttgaacacattctgaaacttattgagggctgctgaggcactccctcaaatatggatgtcactggcattttttctgcatcaaacaccgaatcaataaactatattcagccactgcaacaatacactgttgcggcccagtccccctgtgtcggcacttcatgtgttctgacttgtaaactacggtgagaaatgcgatagggacatactaacaaacacac

SEQ ID NO: 642451 - DNA, 107 bp, Homo sapiens
cctagagcaacacgcttactggacattgaagctttatggccagctgccaaaaagataaatgcaccttaatttctaaattgaattataaagccaaaaatatcctattg

SEQ ID NO: 642452 - DNA, 168 bp, Homo sapiens
cgtatcgggggtcagaggattagagtctcagtcatagcctcttatgtctcagatcaatgattacttacttatataataagaattaatttattttagagacagggtctcactctgtgcccaggctggagtgcagtggtacgatctccactcactgcagcctcgaccttc

SEQ ID NO: 642453 - DNA, 864 bp, Homo sapiens
agcggggtctagcggggcctttgtcccgacagagctccacttcctgtccccgcgtgtctgtgtaccctgctagccgtaggccgtgtgaccctgagggcaaccgggagatccagaagtgaaacgccaggctctctggaggcaggagatggtgtgatttgtccagagaatctttcctaagaggaaatcccaggagaagcaggagcacaagagcacgacaatggctggtgctcacgactctgttgacgttcagcgcatgtggcccatagaaattctccctggaggacgttggccaatggcctggacctcgctcagccagaaatttgtacaggggatgtgactgtagcgcagaactaaccagcaaccttgtttctacacgagagtctcactggtctggtaaaagccaaggactggatacacttgcacttggaaggcaaatgaaaaaagaagagccttgggaacttgttgacggagaacagggaagggcatgtaagaacgtggacaatataccagtcattccggcgagaaacggttttataggctttgtactgagaagtaatacttgggagcacatatggtgaaattaatgggctcggacggtggcaacaattggaagggcgcagccacgcgacttaacttaccattaccacagcaatggccaagcgcatgtgatacataaaccccctattccaaaatataatagaaataataacaagcaagaaaacgctggaagaatcgtggtgattgtgcgcttcgcacacggcgaacacacaagagtgagtagccaaagaaacgcacaacatgacactggtcaagcctcgtacgggcaacatccttcgccatataccgaacaaaacgcttgaggag

SEQ ID NO: 642454 - DNA, 234 bp, Homo sapiens
cattatggcgtttgggcgacacggctcagcaacagtaccgggatgacgcgtcctccgtctggtgctcgtattcagcgaatccaggagcttcctgcttttgccgattccagatttcgtcgcgctcggcgtccacgacctcccgcgctctcaccgcgatcgtttcgacaccggtaggggtcccgatctcgatggacgcgtcgggctgagccttgaggttgaaataccaatccggat

SEQ ID NO: 642455 - DNA, 412 bp, Homo sapiens
  misc_feature (26)..(26): n is a, c, g, or t
  misc_feature (38)..(38): n is a, c, g, or t
  misc_feature (44)..(44): n is a, c, g, or t
  misc_feature (67)..(67): n is a, c, g, or t
agaacgacagatgaggagctaataantatcataccttnaaaggncaagcacccggctgagttgtccnatccactgtgttctaaactccttcccagcttgcgcttgacacagccttgtcttctctccctccgtgcctcgcagtggtagggttccatggaacacgcaggtgaacagtttgacctatggatgagccgatctggagagcctgcctggtgggagcaggttggtccctgcagtccagagtctgcacacagtccttccagtgagtgtctctggaggctgtatttcctgattacaactctatagttttgtctactagagctgacacctttgttttctgtcacttctcaggccaagaagtaactttttttaggaaaatatctttttccagtaaagatgtcctttcatctcg

SEQ ID NO: 642456 - DNA, 472 bp, Homo sapiens
agcactggcagagtttcctgagactcgtcaaaatcatgatgtgctgcacaggcatccctggccactatcctgtccatgagaccaccagctcccgaaaccctcacctatctggtacacacggcaggatgatattctatcctttgaggcagagaagcaagctgtataccatcaggtggaccggccagtctatttccagctgctgaatgtgcttctgcacaaggcccctttcccgatctgatgaggactatggctactggtcctcagacgagaacgagcagttccgaattgaagggtggaacatatcagacacgctcatgtatgtctatgagatgtcgggggccgagctgctcagcaacctctatggcaagctgggtcgtttgctcaccagctcagaggagccctactcctggcagcacacagaggccctcctctacggcttcaatccatcgcagagaccattgacgtcactatt

SEQ ID NO: 642457 - DNA, 420 bp, Homo sapiens
  misc_feature (41)..(41): n is a, c, g, or t
tcagtaatcattcagggtcacacgactggaaaaggctgacnccagatgtaaagccaggctcccagctccttgttcttccactgtgttctaaactccttcccagcttgcgcttgacacagccttgtcttctctccctccgtgcctcgcagtggtagggttccatggaacacgcaggtgaacagtttgacctatggatgagccgatctggagagcctgcctggtgggagcaggttggtccctgcagtccagagtctgcacacagtccttccagtgagtgtctctggaggctgtatttcctgattacaactctatagttttgtctactagagctgacacctttgttttctgtcacttctcaggccaagaagtaactttttttaggaaaatatctttttccagtaaagatgtcctttcatctcg

SEQ ID NO: 642458 - DNA, 429 bp, Homo sapiens
  misc_feature (214)..(214): n is a, c, g, or t
  misc_feature (261)..(261): n is a, c, g, or t
ggagctagtcatctaaggatccaagcgctgatagctccaacctaagggaggtgagtggatgtacctaaaggcagccctcggatctgtgtgatagaacagtctgtggctgtgtcacgtagatctggtgacctgtgatatagtgacacagctctacatggggaaaagaggcacgtgagactctgtattttacttccaaactacacgtgactacacnttatctcaaatgaaaaagtttaatttaaaaagaaaaaactcggctgngcgtggtggctcatgcctataatcctagcactttggaaggccgaggcaggtgggtcacgaggtcaggagatcgagaccatcctggccaacatggtgaaaccctgtctctattaaaaatacaaaagttagctgggtatggtggcgggcgcctataatcccagctactcg

SEQ ID NO: 642459 - DNA, 986 bp, Homo sapiens
tcgttcaatataacgtgttatctgttctccccgaggtattgatatcacagtgttcctttccagaagcgttccaacccgtggagaagtcttccagaagggcggatcggggatcattgccatatccagggttattcggcagtgatctcgatggcactcgtcggacaaacagcaggcccacagatcttggatctctttagctctgttatataagctccggaatcaggaagtaatccacctccagcttgggtcatctcgcagaactgtaggcacctggggttccctgagattcgagtaaatcttaggaatggatactttccagtttccacacacccaataatccgtcgggtattttcgaacgggggggggtacattgaatctgtagctcactctcatgatagtaactgtcatccttgaaccatattaggtcttctcaatccactgtgcgcaagatgtctttccactttttggcattcttaatttcttctgcagccaaattttgtagttttccatatacaagacttttgcctctttggttgtttattcctgagtattttctttatgatgctactgtacagtagaactgtgttcctgaatttcctctggagattgttccacaatggtgggttgttctatttttttaaagcttctatagaaatacatattaattcatattctataacatattagtcattcaaaatctaggccaccaatcttagggggatacaagaagtaaccatcccagttcttcttttcctagaaatgtcacaatgtaatagatctgacattgcatatatttctgatgtgatgaaatggtgatatatcatttctctatcgtgcaactacagctctaaaatttttccaagatagtacatgtattatgctttctataatacttacaccatcattattgcttttaccttttatatctcatattctattttaattatggaatggtattattacatatgccttcccacatattacat

SEQ ID NO: 642460 - DNA, 537 bp, Homo sapiens
  misc_feature (55)..(55): n is a, c, g, or t
  misc_feature (155)..(155): n is a, c, g, or t
  misc_feature (161)..(161): n is a, c, g, or t
  misc_feature (173)..(173): n is a, c, g, or t
  misc_feature (315)..(315): n is a, c, g, or t
  misc_feature (322)..(322): n is a, c, g, or t
  misc_feature (370)..(370): n is a, c, g, or t
  misc_feature (378)..(378): n is a, c, g, or t
  misc_feature (404)..(404): n is a, c, g, or t
  misc_feature (486)..(486): n is a, c, g, or t
ggaaaatcccgcatgaaaaatcagaacccgccaattccagcaggcataagacttnccaccgggaaaccgaaaaacctgagccaacaaaaccgccctcaacctttaaccaagggaaccaagcctgctgggctacatcagcatcgggaagacttccncccccnccaaatccgggnacacatccccaagcaaggaagaaaaaacaaactctgctcagacgcctatgaaacacctgaatgaactttgatgaagtacagtctgagttaccatcatgcacaagtagaactgctcttggacttgtttccctgttgtttgtgnaacctangcgtttgaatggcttgaacgttgcatcttttaaagttattttttaagntttcttgncatttatcctagttgtccgtgtttgncaatgtgctgttaaagtaatagacttttaatctttatgtattttttgttttctctggagtacttggacagatgttatagtgntttcttttaggaaaatctgtcattaaaaaagttatagccttgcaaataacc

SEQ ID NO: 642461 - DNA, 893 bp, Homo sapiens
  misc_feature (37)..(37): n is a, c, g, or t
  misc_feature (556)..(556): n is a, c, g, or t
  misc_feature (579)..(579): n is a, c, g, or t
cagggaggctgaggaatgagaatcgatggaacccagngagcgaggttgcagtgagacgagatcgccccactgcactccagcctgggtgacagagtgagactccctctcaaaaataaaataaataaaatgataaatgatttttggttgtagaattacatataattcaaaagcagttaaatacatcttatatgggacaattaatgggtgtaatttattaaaatattgctttattcaacacatttctaattccataaatatgtgtattcataccctattagatgcaaggatataatagtcaacaatgaatgagtaaattttcatttattataatgctagtaataataatacatatagcaaacctgtctgtctatgtgccaggcattctgagtgttttatgtttatttgtcactctatactttttttcccccagaatccgtattatctttggttcgctgtgttaaaattagactaaatagtctgtgtattttacttgtatccaggtgttctccgcgtcccatcttgcttaccattcacattcacttggatcctcttcatngtccaagtaaatactctgggaanctggtcttaaaaaaatgtcttccttgatgcagtagaggcccagggtgtttatatttatgctttctgaacgcaatgttagagcaaagaaagaagtgacaaccttgagtagagcagtattaacatttcacttggaaactgctatgtctagcctggatagacatttgaaagtctgtttgtagccctactgtttcatatgaagatgactggaactgaagtctgaaatagcaggttacttttcgtggatgtgtaatcatcttcatttagtttgactttttctttaccatgctcaaaatatcagactagttgcaggattt

SEQ ID NO: 642462 - DNA, 243 bp, Homo sapiens
cgaggcacgaaggtatgctggtagcctcaggtaatcaggaggctgaagtggcaggacggattcagatcgggagatggaggttgcagtcagctgagatctcaccaccgcactccagcctggatgacagagtgagaccctatctcaaaaaatagtaataataataataatgattattttggtagagacagtctcactgtgtcgtccagtctggtctcaaactcctggcctcaagcaatcctcctg

SEQ ID NO: 642463 - DNA, 383 bp, Homo sapiens
tgaaagttactaaggccgagtaaaatcctgggcatcaccacagcgatgtggtagggcacgggctccagctcttgtgtaacaagaacaggaatgagaacagctttatattgtagcgccaaggtctcactatgctcacacctgtactcccagctttgagaagaggatctggcaccagcaagggtctggtcacacgcaggtgggcaacggtgaaggacaggaatcttttcctttctgctacacactaaggacagaggcacatgcctccagcaaggggccaaagacggtagcagctacttgggtcttgtgtgggagatgccagacgactccacggcaggtccaactggctttgtccgggagtggactgctggacataagactggaga

SEQ ID NO: 642464 - DNA, 692 bp, Homo sapiens
  misc_feature (37)..(37): n is a, c, g, or t
cagggaggctgaggaatgagaatcgatggaacccagngagcgaggttgcagtgagacgagatcgccccactgcactccagcctgggtgacagagtgagactccctctcaaaaataaaataaataaaatgataaatgatttttggttgtagaattacatataattcaaaagcagttaaatacatcttatatgggacaattaatgggtgtaatttattaaaatattgctttattcaacacatttctaattccataaatatgtgtattcataccctattagatgcaaggatataatagtcaacaatgaatgagtaaattttcatttattataatgctagtaataataatacatatagcaaacctgtctgtctatgtgccaggcattctgagtgttttatgtttatttgtcactctatactttttttcccccagaatccgtattatctttggttcgctgtgttaaaattagactaaatagtctgtgtattttacttgtatccaggtgttctccgcgtcccatcttgcttaccattcacatattttagactggttgatattttcctacaggtttctaagactattcatttttcttcagtcttttttttttctttattctccagatgggatagtttgcgtaattgggcttcagggattttactgactcttctgtcacctctaatctgctataaaacct

SEQ ID NO: 642465 - DNA, 911 bp, Homo sapiens
cggacgcgtgggtccggacttagcacactcctgggcatcctatatgaagacaaagagaggcaggacttcatcttcaccatctatcactggtggcaggccgtggccatctttgtgtgtacctgggctccagcttgcccatgaaggccaagctggcagtgttgctggtgaccctggtagcagcagcagcctcatacctgtggatggaacagaagttgcagcaaggatggtcccgcggcagccgcgcattccgaagccacagcacaaagtccgcggctaccgctacctggaggaggacaactcggatgagagtgacatggagggcgagcagggtcagggggactgcgcagaggacgaagcaccacaggcagggcccctgggtacagagccagctggcccctgccgcaagccctgtccctatgaacaggctctgggtggcgatgggcctgaggagcagtgagagaaccaggtggccagcctggcccttagactcagctttctgccttccagcctcagtttactgtatctcaggttgagggtcccccccccccaaatatgctccacctgcttaaaagggcctttttcttttttccaagaagcctggggtcacctgaacttcctccaggagatagggtcactctcggaaaccccttataccgtgttacaggagtatgccttctgctaaattcaggagatccccttcacgcctgccttggtcaaggtcaacctctggcccctgtgttcaactagacgttgccattttctgcccacagttccttagctcagagggggggttaaatttattttaggggaatatcagtaagattggtttctgcaaaaaacagggggcgtctaagtacccaagggcaatagtcccgtttgcaaggcctagggttagacgacgcgaaggggga

SEQ ID NO: 642466 - DNA, 938 bp, Homo sapiens
gagggaggtgtatgtgaggtgctgcctcctagtactaggagaataagcccgatggtggtgaaaatgacgatctgactggataggtgtggtcagcgatttcggaccacgcggatagtgcattgtaacaatggttggctctatatgattgaaggagcagatggaaataattcgatagtgaaggtttcacgatgtaatatagagtaaagtatggtgatgttaatgtaataaacatcaaagggatgttggagaaatctgttgaatgagtgtctgttggagtagaaatgccaatcagaaaatgtgagttaacagcgtgatgatgtactgaatgtagatgctgattgttagtgggacgtacactgagttcccctgatctctcatgtacctgtggatggctgggagaaaactgcatagggatcaacaggaacaagtggtagacagcaaaatttgcagataggctgccgttgtgctccgatgatgtatgggcaatggctatataatagcttgcagaatgttccgcctctgtgaattggactcataccttgtcccaggaagttatcaagatgatagcaatgttgatgacttgatccatggcaacgtctcgcatattcgagtggaagatcgtggctaagataatggtaatgatagagatttgtgcaaactgaactagacttgggagagtgggaggaccttgttacagaatgttgtgaacttcttctttgtttcaaatatagtgtatccgtggccttctgatttgtttgtagctctatctgttaatagggttctccttatctgccaaattcatgatggtgtttagggaataagaattcattctcacatgtgttgccggaaaataattggttgtcagaaacgatttcagagaggtaagaaatttggcgggggaatctggaaagaaaggtttgattgtaaaaaggggggaa

SEQ ID NO: 642467 - DNA, 852 bp, Homo sapiens
gaacctgggcacacatagagctaccgatttggacaggtcacctgacagccagaggcaggcaaagtggatacattaaggtgcctataagacctcctgtactctgtactccttccctgggagcctggagcaatagcatggtgttcgggaagcgttgcatgtgaaagggaggagggaaaacaggtcggtctagtgcgtcgtggattggactcactgacctagtgaatcccccgtcgaacttatgggaggccaaggccaggtggaatcacgaggtcaggagatcacaggaccatcctggtcgtaatcagcaggtgcatataaacctcgattcgtgctaactatacatataacaaaaaaaattagccaggcgtggtggtagtcgcctgtggtcccagctacttgagaggctgaggcaggagaacggcaatgaacccgggaggtgggaggcttgcagtgagccgagatggcgccgctgtactccagccgtggtgtgacagagcgagacactgtctcaagaataaaataagaggaaatcctgggggaggacacaagggggttccaccaaatctttggctccgtaggggagcctcagcaattttagcgcagtagaaaggtgccgcacgggtaccctggttctcccaaggctcccttaggttgacgaagagcgatatgtcctgtcgattgacaaaacccggggggaccggtatttcgttaggctccaggtccacatagggtgggtgtggttgtgccaactttacccagcggggggtttggaagagcccggggtgctctagcgctcacgttcacgggtccagggccctcttggggctctcgtgatgaaggacccatccctcg

SEQ ID NO: 642468 - DNA, 565 bp, Homo sapiens
  misc_feature (66)..(66): n is a, c, g, or t
  misc_feature (72)..(72): n is a, c, g, or t
  misc_feature (119)..(119): n is a, c, g, or t
  misc_feature (239)..(239): n is a, c, g, or t
  misc_feature (282)..(282): n is a, c, g, or t
  misc_feature (287)..(287): n is a, c, g, or t
  misc_feature (299)..(299): n is a, c, g, or t
  misc_feature (310)..(310): n is a, c, g, or t
  misc_feature (540)..(540): n is a, c, g, or t
  misc_feature (561)..(561): n is a, c, g, or t
ataggagtatcggcgctcatatgactatgacagagatgatgtggagacgctgtgacactgtcctancaccanccagatcagcagacacagacacatggggaaggagacgctgtgctgcngacttggatggaagacggtatcctcaatgaacgggacaactgccagtacgtctacaatgtggaccagagagacactgatatggatggggttggagatcagtgtgacaattgccccttggnacacaatcccggatcagctggactctgactcagaccgcatggnagatnactgtgacaacnatcaggatatngatgaagatggcaccagaacaatctggacaactgtccctatgtgcccaatgccaaccaggctgaccatgacaaagatggcaagggagatgcctgtgaccacgatgatgacaacgatggcattcctgatgacaaggacaactgcagactcgtgccccatcccgaccagaaggactctgacggcgatggtcgaggtgatgcctgcaaagatgattttgaccatgacagtgtngcagacatcgatgacatctgntctg

SEQ ID NO: 642469 - DNA, 313 bp, Homo sapiens
  misc_feature (258)..(258): n is a, c, g, or t
ctagaggatccccctagggctcttataaaaaataattgtatttttactgccttactagtcttctgtttccttactattattctctcttgtttattacagaaagtggagtattgaaattccctactataattgtattgctctctttgtgttatattcagttttgttagtatatgctttatatagctaaaaccccaatatgggacacacacacacaaatatcacacatgtatatacaaatttttaataaggatcccctancctatgggatccttattaaaaatcccaaaatactgccctcctcctttttaatagg

SEQ ID NO: 642470 - DNA, 445 bp, Homo sapiens
gatatatatgttggaaggacactactgtgcctaaaagttactatacctacttaattctcttctctctgatatcttcctctcctagcccactcccttaacagctctcactgttaacagcttctccttctctctctctcttttttttttttttagatggagtctttctctgtcacccaggctggactgcagtggcgtgatcttggctcactgcaacttccacctcccgggttcaagcagttctcctgcctcagcctcccaagtaagctggcattacaaggtgcatgccaccacaatccaagctaatttttgtatttttaagtacaacatggtgaaacccagtctctactaaaactacaaaaaaaatttagcccgggtgtgggtggcgaacaacctgtaatcccaagctactggggcaagaggttgcagtgaaccgagaatcacgcct

SEQ ID NO: 642471 - DNA, 294 bp, Homo sapiens
accatgccgcgcgtatgcggacgactagaacgggtaacctgggggtacatctgaacggaccactgtctaagacaacacttggtctgtgggtctgacactaccacgtagaatttacaggcatgataataacagcaccaagactgatacaataatagcacaaactaacaataaggaaagaagaatacttaggccacggcacagtggctccatgccttgtaagttcccatgcactttgggcaggctgattgtgggacggactgcgttgagccaccaggagtttaaggaccacgcctg

SEQ ID NO: 642472 - DNA, 956 bp, Homo sapiens
  misc_feature (221)..(221): n is a, c, g, or t
  misc_feature (240)..(240): n is a, c, g, or t
  misc_feature (244)..(244): n is a, c, g, or t
  misc_feature (556)..(556): n is a, c, g, or t
  misc_feature (558)..(558): n is a, c, g, or t
  misc_feature (563)..(563): n is a, c, g, or t
  misc_feature (570)..(570): n is a, c, g, or t
  misc_feature (589)..(589): n is a, c, g, or t
  misc_feature (722)..(722): n is a, c, g, or t
gcgggtcgtggtctgtcgggcgctacgcggggcacaagtgctattgcgcgccgccgctcgcggcctgctgcggacgccagccttgcggagtacggcaaccttcgctcaggcgctccagttcgtgccggagacgcaggttagctgctggacaacggcctgcgtgtggctccgagcagtcctctcagcccacttgcacggtgggagtgtggattgatgttggnagccgtctttgagactgangaangaataatggggcaggctactttttggagcatctggctttcaagggaacaaagaatcggcctggcagtgccctggagaaggaggtggagagcatgggggcccatcttaatgcctacagcacccgggagcacacagccttactacatcaaggcgctgtccaaggatctgccgaaagctgtggagctcctgggtgacattgtgcagaactgtagtctggaagactcacagatctgagaaggaacgtgatgtgatcctgcgggagatgcaggagaagtgatgcatctatgcgagatgtggtctttaactacctgcnantgccncagtgangtttccagggcacacctcntagcccaggctgtggaggggcccagtgagaatgtcaggaagctgtctcgtgcagacttgaccgagtacctcagcacacattacaaggcccctcgaatggtgcttggcagcagctggaggagtggagcaccagnaactgttagacctcgcccagaagcacctcggtggcatcccatggacatatgcagaggagctgtgcccactcttactccatgccgcttcactggcagtgagatccgccaccgtgatgatgctctaccttttgcccacgtggcattgcagtagagggtcctggctgggcagccggacaaatgtggcttgcaagtggcaatgccatcatcggcacctatgactgcactttatggtgc

SEQ ID NO: 642473 - DNA, 531 bp, Homo sapiens
  misc_feature (10)..(10): n is a, c, g, or t
  misc_feature (14)..(14): n is a, c, g, or t
  misc_feature (36)..(36): n is a, c, g, or t
  misc_feature (45)..(45): n is a, c, g, or t
  misc_feature (54)..(54): n is a, c, g, or t
  misc_feature (62)..(62): n is a, c, g, or t
  misc_feature (72)..(72): n is a, c, g, or t
  misc_feature (91)..(91): n is a, c, g, or t
  misc_feature (96)..(96): n is a, c, g, or t
  misc_feature (124)..(124): n is a, c, g, or t
  misc_feature (143)..(143): n is a, c, g, or t
  misc_feature (146)..(146): n is a, c, g, or t
  misc_feature (167)..(167): n is a, c, g, or t
  misc_feature (173)..(173): n is a, c, g, or t
  misc_feature (188)..(188): n is a, c, g, or t
  misc_feature (195)..(195): n is a, c, g, or t
  misc_feature (203)..(203): n is a, c, g, or t
  misc_feature (210)..(210): n is a, c, g, or t
  misc_feature (224)..(224): n is a, c, g, or t
  misc_feature (243)..(243): n is a, c, g, or t
  misc_feature (248)..(248): n is a, c, g, or t
  misc_feature (268)..(268): n is a, c, g, or t
  misc_feature (275)..(275): n is a, c, g, or t
  misc_feature (283)..(283): n is a, c, g, or t
  misc_feature (290)..(290): n is a, c, g, or t
  misc_feature (318)..(318): n is a, c, g, or t
  misc_feature (323)..(323): n is a, c, g, or t
  misc_feature (331)..(331): n is a, c, g, or t
  misc_feature (339)..(339): n is a, c, g, or t
  misc_feature (344)..(344): n is a, c, g, or t
  misc_feature (352)..(352): n is a, c, g, or t
  misc_feature (356)..(356): n is a, c, g, or t
  misc_feature (359)..(359): n is a, c, g, or t
  misc_feature (368)..(368): n is a, c, g, or t
  misc_feature (395)..(395): n is a, c, g, or t
  misc_feature (398)..(398): n is a, c, g, or t
  misc_feature (407)..(407): n is a, c, g, or t
  misc_feature (431)..(431): n is a, c, g, or t
  misc_feature (449)..(449): n is a, c, g, or t
  misc_feature (465)..(465): n is a, c, g, or t
  misc_feature (530)..(530): n is a, c, g, or t
taaagaagtnagcntttatttccttgttttgcaaanaaaactggntaagtgggntgcttttnggggattagncaaagagaccaaatcccanatccncgtccgactcccccgactctcccttggnttcaaccttagcggggggngcngcagcagcggggggcggcggngggggnagcggccacaggggnagcagcnacaaaggnagagggntcagccaagaaggncttgaccttttcagcaagnggganggggttatccgtctccacanaaaaggncagggctngtttgtncccgtggaggaaagaatgggggactgangcaanagtggggnagccaatntgcanaaagaaantggnaanattgcgganacccaggatttcaatggggcccctggngantttagtggngaaacctaaagcctgaaaaaaggngggcttctcgggcccganaccagttttctgggcnggcacagtgacttcacatggggcaatggcaccagcgcgggcagcagcgggcaccttattggccanc

SEQ ID NO: 642474 - DNA, 1009 bp, Homo sapiens
  misc_feature (221)..(221): n is a, c, g, or t
  misc_feature (240)..(240): n is a, c, g, or t
  misc_feature (244)..(244): n is a, c, g, or t
  misc_feature (775)..(775): n is a, c, g, or t
gcgggtcgtggtctgtcgggcgctacgcggggcacaagtgctattgcgcgccgccgctcgcggcctgctgcggacgccagccttgcggagtacggcaaccttcgctcaggcgctccagttcgtgccggagacgcaggttagctgctggacaacggcctgcgtgtggctccgagcagtcctctcagcccacttgcacggtgggagtgtggattgatgttggnagccgtctttgagactgangaangaataatggggcaggctactttttggagcatctggctttcaagggaacaaagaatcggcctggcagtgccctggagaaggaggtggagagcatgggggcccatcttaatgcctacagcacccgggagcacacagccttactacatcaaggcgctgtccaaggatctgccgaaagctgtggagctcctgggtgacattgtgcagaactgtagtctggaagactcacagatctgagaaggaacgtgatgtgatcctgcgggagatgcaggagaagtgatgcatctatgccgcaaggaaattgggtggggtccattttttaaaaccttaaacccttgggccaaattggccccaacaaggcaaattttccccagggggggccaacaaccccgttctagcccccaagggcttgtgggaaggggcccagtgagaatgtcaggaagctgtctcgtgcagacttgaccgagtacctcagcacacattacaaggcccctcgaatggtgcttggcagcagctggaggagtggagcaccagnaactgttagacctcgcccagaagcacctcggtggcatcccatggacatatgcagaggagctgtgcccactcttactccatgccgcttcactggcagtgagatccgccaccgtgatgatgctctaccttttgcccacgtggcattgcagtagagggtcctggctgggcagccggacaaatgtggcttgcaagtggcaatgccatcatcggcacctatgactgcactttatggtgc

SEQ ID NO: 642475 - DNA, 207 bp, Homo sapiens
  misc_feature (32)..(32): n is a, c, g, or t
ttcgggagtgggtgcccagggttaggtgtggnaggcatggggcaggaccattcagtaaagacagggccaggtgcagtggctcctgcctgtaaccccagtgctgtgggaggccaaggtggtaggatcgcttgaacccaggagttcaagtccagcctggacaacgtagggagacccttgtctctacaaaaaataaaaaaattagccagg

SEQ ID NO: 642476 - DNA, 924 bp, Homo sapiens
  misc_feature (808)..(808): n is a, c, g, or t
agtcctatgctctgagtgtgagggctgcgtcgcccccgccgtgttggcatgtgtgtggttatccccgcctgtcttggccaggcaacctctcatcgtgaggttccgaattgttgtcaggacgacaaccagtgtgtgggaacatttttaacgaatgggagcccttgtgatcgcccgggagggttttcactgggccgcgtccgcggaaggccttattgaaccgtttagcacttgtaacaccacgcctgttggagcgttctccgtgggtgtgctgtaatgaatatcgggcgaatgcccgcgccgattttttccctgcgcttatgaagggaaacaacagcaaccgcggtaatgtgccgctccgccggcgaagtgtgcccccgttgcctgggaatgagaaaacacaaagggtttcccccgtaataagttaacgcccacacggtgccaatatcctgggaaccttatatttttagaaccgtccctggggcaaaaggccaataccataagttgtttctacaccaaaaggcggatacaccctcttcttcggggtcttacacaggagggcaaccccctggaagcgttttccaagcccgtcgaataacgcttcttcgacccatctcaccgagaaaaggggccttaaacatacttggccgcaaatttttttagagaccgaataaacccaagtctaacccccccccggaagtctcaaattctcaccaaaacacttttgtgttcttataatgggtgcacccaaaacacctaatgttcccctctttctcatttgggaaaaattggtgtgatcaccccaccccgncaaaattaaccttctgctgttctctgtcggctctgtacacaccctctccccccactccgggcccccccccggggaaccattaaaaaagggttaggggccccccccccccaaaaaaa

SEQ ID NO: 642477 - DNA, 211 bp, Homo sapiens
ttccgtttttaaaaaaaaaaaattcccctgtggtagtggccttttaaccatataatattttcttaaccccatgaaataggggatataatgtatgaaccttttgccttggcttgaagccatattatatattgttaaccaaaccccgctctttcctaattaaccttttttactgtttgtatgtattaaataaaggtgctgctttagttttcca

SEQ ID NO: 642478 - DNA, 160 bp, Homo sapiens
gggagcaaggcagcatctgcaaagggatacgcaggaaccggagcgcatcaaagttacgcgaagatgtacctaatcagaaaagtgacccgtctgacaccaaggtcaaagatttcgccacaacccaggtaccgatagaagcatcatcggaaacgaccacgca

SEQ ID NO: 642479 - DNA, 314 bp, Homo sapiens
tagagtgggtctcccggatggtaaagcagatctctagatgtaagggaaatatcaagggagaaaagaatctccagcaaagcaagtacttccacacagcgacaagagttgaaggcggctccgatcgcagtgcttacacatcgcagcttactgaatggacggaggatttatttaatgtctctttatgtaaaaagcagagaggataagtccaagtgtctcccttcctatcttgtggctctatgctagtaacacattttaacctcatctgtcaaagctacagtctaaaaaagaagttttatcaaccttgttcaacactt

SEQ ID NO: 642480 - DNA, 109 bp, Homo sapiens
tcacatacggggagaggcgatcgagcgactatgatgatagtgacgggcaggatagttcagacggtattctatttcctgagcgtctgagatgttagtattagttagtatt

SEQ ID NO: 642481 - DNA, 136 bp, Homo sapiens
ccagtcaacaccagaagagatcatacctacagttaaaatttgccgctgtctctaaggggaagagaaatagtcacatagaaagtattaccaagaaggattaaatatatcagctgtccaaacactttaccgaccacat

SEQ ID NO: 642482 - DNA, 743 bp, Homo sapiens
ccagcgcgtgcgcccacgcgtcggcagtgaggggctgccagaagcccctcaccctgagatgggagccatctttcccaatccaccgttgcccatcgatgggcatgttgttggcctggctgtcctactcgaagttgtggtcatcgtggagctgtggtcgctgctgtgatgtgtaggaggaagagctcaggtggataaggagggagctactctcgaggctgcgtgcagcggacagtggcccagggctctgatgtgtctctcaacagcttgaagaagccgtgagacgagcgtgtgctatgtgagggactgagatgctaggatttcttcacgcctccccttttgtgacttcaaggagcctctggcatctcttgtctgcaaaggcggcctgaatgtgtctgcgttcctgttagtctaatgtgaggaggtggagagacaagtccagaacttgtgttcactgtgaccctcgtgttcccatgctgatctgtgtttcctccccagtcatctttcttgttccagagaggtggggctggatgtctccatctctggctcaactttatgtgcactgaagctgcaacttcttacattgcctgctgaaaataaagaatctgaatatcaatttgttgttctcaaatatttgctatgagaggtgtgatggattaactttaatgaggtcaattcctgggaattgagagagcaaataagaacctgagaaccttcaaaaaaaaaaaagttaaacagacaaaggg

SEQ ID NO: 642483 - DNA, 296 bp, Homo sapiens
  misc_feature (53)..(53): n is a, c, g, or t
cttgatggggggttttttacccccctccccccccccctttaaaaattaaggangggatttttggcatcagggcaccctttgcataatcaccccttggaaaaagggggggtttttcaacccccctgccccaggccctacccagaaaataaaacccccttgggtcctccccagaaatttattttttggaaatttatttattgttaagggaaaaaagggtttatttattttttgggggcccaagggtccccctgggcccaaccccccatggggggggcccaaaaaagccttttcttcca

SEQ ID NO: 642484 - DNA, 933 bp, Homo sapiens
ctatggctgcgccactgcagaccagcgcgttgtgggctcccggcgggttcccccggggggtgggctgcgtctacgccgttgtctccggctttcctgctccgctttgggtctggctccgacctcccccctgcgtccctcgtccgctgtcggtcatttaggataatctgtacacactcatgtgacagatgaggacatcgtcggctatctgctgacgtcagaggcggctgctaggcccttctgccgtcttactggtgactgggatctttttgttctgtagtcctgcagttggaagctacacttagctccaactgggaggaggactccaattcagtggttctttcctttgactccgctggacaaacactaggctcagagtatgatcggttgggcttcctcctgaatctggactctaaactgcctgctgaattagccaccaagtacgcaaacttttcagagggagcttgcaagcctggctatgcttcagccttgatgacggccatcttcccccggttctccaagccagcacccatgttcctggatgactcctttcgcaagtgggctagaatccgggagttcgtgccgcctttttgggatcaaaggtcaagacaatctgatcaaagccatcttgtcagtcaccacagagtaccggctgacccttgccttggaaaagcctccgttgccggcgatgcatcatcgtggggctggaggcgttcttgcccaacaaagtctctgggggtcccgaattgacgactattgacctttgtgggtgagaactgcattcggcaccagttgaaagggcttgagaagggacgttgggccgcaaaacgacacttggcatcaacctaccccgagggcccaatggcgcgggctgacaggtacgagcgcgaatcctcttggccccggccggttcattggcagacttaagtgctgaca

SEQ ID NO: 642485 - DNA, 95 bp, Homo sapiens
ggatttgctggtgcagtacaactaggcttaatagagagggaagtttctgggctgccccactaagtagaataaagaaaaacggttacaaaaaaaaa

SEQ ID NO: 642486 - DNA, 517 bp, Homo sapiens
aatattgatccaggtctccaaatatgtctcttctagcttatatcaataggtttctaaaaccagtttttcatctccactgtgtcagttagctttcttcccagctaaagaaaatattgaccaaagcaagttgcaaaacaggtgaaactggttgtagtaaaagagttactttttgctgggaagataaaagagatgtaactactgtccttgacatgagtatattgctaagctttgtggacaaacattctgagattggtaaaatacttactgcttcaggaaaattacacttatttcctcatctatgattttgcattctcctagttaatcttcttttgggggacagtgagcctcctttgaaggacttacgggcattaataataatatcactgtacaaaaattaataatatgtattgctcttttaaagatacttttgtacaagatattttaataaaacaatcttattcagtgctgcttattgtggttggtgaaaaataaataaataaaaactatcttataactg

SEQ ID NO: 642487 - DNA, 861 bp, Homo sapiens
tgtagtggctgatgcctgtaatctcaacactttgggaggctgaggcaggaggattacttgagaccaggattggagaccagcctgggtaacataaagactcctgtatctactaaaaaaacaaaaaaccttagctgaagtccaaaccactgcttcagaatatgggcattttggacgaactcagtatacacaggggcaaaaccggatcgctgaaagagctgccccaaatttacttgggttgtacgctagaactgaacgtttggcacagtacgaaggatacagaaagggcctaatctcagacaacgggcttatttacaaagtttgtccaaaaaaaaggcagtctgcaagctgaggaactatccacaacctggcgagagccgggaggcgctgggcccaggcatgctgcatgacacaggcagtccttcagccccgaggaggcactggagaagctcaagtgtctctgacgcaaaggaaacggcagtctgtcacatgcattttcacgacaggatcttggcccggctgtggtgggtcacgccttgtaatcccaaaacctttccggagaacttgagcgcaagtggatcacttaagttccaggagttttggaaaaccagtcttgtgccacatggcaaaaaccaacttccactggaaactacaggaaattacccaaggtgttgttggcacgcaccctgttagatcccttgctaattcaagaaactctgagttggcaaacgactcggttgtgaccccaagagggcagaatgcggccagtgcagtctgaagaactggccccacttacacttacagttctgggtaaccaaaatgtagaccccgttcccaacactttattccacaccacacattcca

SEQ ID NO: 642488 - DNA, 496 bp, Homo sapiens
actggccaacatggtgaaatcccgtctctactaaaaatacaaaaattagctgggcgtggtggcgcatgcctataataccagctgcgtgagaggctgaggcatgagaatcgcttgaacccagggggcggaagttgcagtgagctgagatcacaccactgcactccagcctgggtaacagagtgagactccgtctcaaaaaaaataaggaagccggggacggtggctcacgcctgtaatcccagcactttgggaggccgaggagggcgatcacaaggttaggagatcaagaccatcctggctaacacggtgaaacgctgtctctactaaaaatacaaaaagttagctgggcatggtggtgggcacctgtagtcccagctacttgggaggctgaggcaggggaatggcatgaaccccgggggttgaagttgccatgaaccggaaatggccccattccatcccagcccgggtgacagagtgagactcctcaaaaaaaaaa

SEQ ID NO: 642489 - DNA, 313 bp, Homo sapiens
cgttggcttctaaatagaaaatgtcatggtgtcaccagtcgtcacgtcgcaccgcgtgtcaaacaattctcctacctcaacctcccaagtagctgggactgcaggcgtgtccaccatgcctggctaattttggtattttgggtagagacgggtttcaccatgctggcaaggttggtctggaactcctgacctcgtgatctgccaaagtgctgggattacaggcgtgagcaattgtgcccggctatgggtatgttatagggtacgaaggtacagcattatttgtggtagagatgggctcttgctatagtagccc

SEQ ID NO: 642490 - DNA, 464 bp, Homo sapiens
acaaccaattgcaataggatcagggcccctgcggttaatactccgcggcccgacggggacgacgacgacgacgacgactgacgacgacgacgacgacgacgacgacgacgacgacgacgacgacgacgacgacgacgacgacgacgacgacgacgacgacgacgacgacgacgacgacgacgacgactacgactacgactacgacgacgacgacgacgtccgagtgagtcatcagcggtcgtgcatcgtgcgtgctgctgctgcgtggtgtctgtgtttgtgtctgtcatgcatgattgattgatcatcggtcggtcggtcggcgagctcggtgtgtcgtccttcctatctagtactgactttatagattgtttgaatgactcggcttgctaggcaggcagcgcatggcatgactgctaggtagccaccgacgtgataagagtcattcgttgccgatgggtagc

SEQ ID NO: 642491 - DNA, 179 bp, Homo sapiens
aaagaacaccctcagccatctcttaaatgcttctccaatgtgtaataaaatgtcctggtgagcaggctctggttgaacgtcagactgcctttggattactgagccactatctttagttcctataatgccgtattagtgaggcaagttagatgtatagtgagttaagatgtgagatacag

SEQ ID NO: 642492 - DNA, 159 bp, Homo sapiens
gccccccttaggggggcccccctttggggcaaattttgggcccttccttatttgggtcaaattttttttttgttagatgaaaccccttttttccaaaaaatttttaatgtcccttttggcctttttttaataaaggatgttttactgttgggctcccca

SEQ ID NO: 642493 - DNA, 142 bp, Homo sapiens
caaaagataaatagtccttctcatccctttcatggatgaaaggaaaaatggtataatttatcctattagtaaaaaatatttgaatcacttgcatttcttctcatgtatctcaaatcccatcttcattctaccttgctgcttc

SEQ ID NO: 642494 - DNA, 617 bp, Homo sapiens
  misc_feature (7)..(7): n is a, c, g, or t
  misc_feature (112)..(112): n is a, c, g, or t
  misc_feature (141)..(141): n is a, c, g, or t
  misc_feature (143)..(143): n is a, c, g, or t
  misc_feature (215)..(215): n is a, c, g, or t
  misc_feature (217)..(217): n is a, c, g, or t
  misc_feature (222)..(222): n is a, c, g, or t
  misc_feature (231)..(231): n is a, c, g, or t
  misc_feature (292)..(292): n is a, c, g, or t
  misc_feature (332)..(332): n is a, c, g, or t
  misc_feature (342)..(343): n is a, c, g, or t
  misc_feature (393)..(395): n is a, c, g, or t
  misc_feature (397)..(397): n is a, c, g, or t
  misc_feature (399)..(400): n is a, c, g, or t
  misc_feature (402)..(402): n is a, c, g, or t
  misc_feature (426)..(426): n is a, c, g, or t
  misc_feature (485)..(485): n is a, c, g, or t
  misc_feature (503)..(503): n is a, c, g, or t
  misc_feature (514)..(514): n is a, c, g, or t
  misc_feature (567)..(567): n is a, c, g, or t
  misc_feature (606)..(606): n is a, c, g, or t
  misc_feature (614)..(614): n is a, c, g, or t
acactanaaaatattctgagaggttcagggcttcttcttctgtcaatcaatggatactgaaaattcacgagactttctaccaatgttagttgtttcttggctttttttttcntttttaagaaaataggaaagacttataanangtaatccacatttctggtgggagaaacaattaagtgatctaaaaaaaaaaccaagtttttaaaaatgccttntnttcanaagcaaatnaaaccgtaagtttaacttgattaaaggaaaagcaaaatgtttaaatactagatatcttganaatctaagtttacagaagatgcttattcattttcaaaganaagaataagnntttccaatgacaatcttcctaatgttaaagtatttttattttctgttttnnntntnntnctaagctactcaggaacaaatctnctaagaaaaattaggttcacctacaggtttatagccaacttacctctttttgcttttgntgttaagttgtgcataanaagagaaaaanatttatgtttaactgattctaatgtcaatacataatggcttattccataaatncctactcagagttaaggacctcagaactagtcttttaanagatcctntgg

SEQ ID NO: 642495 - DNA, 415 bp, Homo sapiens
  misc_feature (134)..(134): n is a, c, g, or t
  misc_feature (137)..(137): n is a, c, g, or t
  misc_feature (146)..(146): n is a, c, g, or t
  misc_feature (171)..(171): n is a, c, g, or t
  misc_feature (203)..(203): n is a, c, g, or t
  misc_feature (224)..(224): n is a, c, g, or t
  misc_feature (244)..(244): n is a, c, g, or t
  misc_feature (251)..(251): n is a, c, g, or t
  misc_feature (377)..(377): n is a, c, g, or t
  misc_feature (407)..(407): n is a, c, g, or t
aatttacaagcctgtctacctgaaaaaagcatcaccctgggtgcaagagatataaaatcaaacctttatttatttattttttatttttaaaatttcaacttttattttagatatagggggtacatgtgcaggtntgntacctgagnatattttgtgctgcgacgtcatctnccagatagtgagcatagtacccaataggtagnttttcagtccatcctcccttncacttctagtagtcctccgngtctatnggtcctatctctatgtctgtgggtgctcgatgtgtagctcccacttatacgtgacagcatgcacaaacctctatttaaagtatgaataccatgaaaatattcttttacttggcacttggatattanatcacttcggcgactagctctgttaagtantacattga

SEQ ID NO: 642496 - DNA, 564 bp, Homo sapiens
gggtctcattgaactcgcctgcagctcttggagtttttttgtggcttaccttcaggtatatatggagccaggcctacaccccagcaaccatgtccaagggacctgaagtgggtattgatcttggaaccacctactcttgtgtgggtgttttccagtcacggaaaagatcgagtataagtagccaatgatcagggaaaccgaaccactccatagcgtatgtcgccttttacgtaacactgaacggttgatcggcggatgccgctaagaatcatgttgcaatgaaccccagccaacactagtttttgatgccaatacgtctgattggacgcagattggatgatgctgtagtccagtctgatatgaaacatcggccctttatggtggtgaactgatgctggcaggcccaaggtccaagtagaatacaagggagagaccaaaagcttctatccagaggaggtgtcttctatggttctgacaaagatgatggaaattgcaagaagcctaccttggggaaggactgttatccaatgctgtggtcacagtgccagcttactttaatgactc

SEQ ID NO: 642497 - DNA, 111 bp, Homo sapiens
gctgttaattgtcagtcctaatcagtcagagcacaaacaaaacaaagtttgtctttataatttgaggtggaaggtccggcacgtcaggctatattgtcaacatcatctcat

SEQ ID NO: 642498 - DNA, 91 bp, Homo sapiens
aagaaggtggggaggaagaggaggaggaagaagaatgtgatggtgaggaactaggatggatgatgaagatgaggaagctgagtccgctacg

SEQ ID NO: 642499 - DNA, 112 bp, Homo sapiens
gatagactcgagctggtaccatgttggcgtagatgacaggatcaggccggtcacgctggcgcacggtgtatcctgacaccgcctagccttggtgactgacgcccatgtctac

SEQ ID NO: 642500 - DNA, 103 bp, Homo sapiens
ttaccctgaggcgatgtcgcgctgaactacatcgacatccgttcgctgcagcgtcgtctggagattgcgcgctcgaacgtggctctgcatcaggaaacgctgg

SEQ ID NO: 642501 - DNA, 826 bp, Homo sapiens
ggctaggtcgaggctggtgttaattggccgaggggaaagggactccgtgcatcccagagctggacgcctataggcctgtgggactggctctggattatgaggacgtgagtgagctgacggccagtcagagggaggcagcagagcgggccatgcggcagcgtgacctgggaggctggccggggcctgggccgcatgcgccgtgggctcctgtatgacagtcgatgaggaggacgatggagcagccctgcccgcatatgcgccagcctaggtggagcgggccactggaggacggcgaggaggacgatggagatgattgagagcatcgagaacctggaggatctcaagaggccactctgtgcgcgagtggtgtgagcattggcgggcccccggctggatgatccacctacctgcttcaagaacttcctgcgcactcacgtcgacaagtcactggccacaacgtcttcaaggagcgcatcagcgacatgtgcaaagatgaaccgtgagagcctggtggtgaactatgaggacttggcagccagggagcactgtgctggcctacttcctgccttgaggcaccggcggagctgctgcgagatctttgatgaggcttgccctggaggtggtactggccatgtaccccagtacgaccgatcacaaccacatcatgttcgctctccacctgctctggtggaggagctggctcgctgagcagtgcatctgaccagtgatcgacagtgggtgtgccgttgcttgggtctcccagttagttggcgttactggacgggggtcgccgggctttgggccaacacggggactttcttcaggc

SEQ ID NO: 642502 - DNA, 385 bp, Homo sapiens
  misc_feature (44)..(44): n is a, c, g, or t
gtaactttaaaatatcctaaaccaaaatatctatttccattttncttcttaagtaaaataacaacacctcattagtgtgtagaagctattctaatccattaaaattttatttttatatttatttaaatatctactgtacatgacaaaatatatttctgtggctgccttttataattattttccaagtagacataatctatttaaaacatatttttctagtgacaaagaaatacattttatcctgatatatagtttttaaatactaggctatttcttttcatactgcctgattggtttaataaacatgatgtgacaaatattaagtatatatcattttatcatgttgtaactgatccaaaataataaaagaaataattataccttt

SEQ ID NO: 642503 - DNA, 323 bp, Homo sapiens
ctgcggtcgctctacaggatcccgtcgggagctgtatatataggtgaatatgctacaatgaacacagactggaccagttctattccactctttactaaatggaacgatattagttcgattccatctttttctgtttttggttgcttagtttgtgagacagtctctactcttgtcgcccatgctggtgcgcagtggtacgatctctgctcattcgcaagcctctgcacttcccacggttcaatgtgattctcattcctcagcctccgtgggatggattacaggctgtaccacctacgcgctgagtattctcttttcttcttctt

SEQ ID NO: 642504 - DNA, 392 bp, Homo sapiens
cggcctttacacgctgtatgttcccctgcgagcaccctccttttggcctttggccaagtcccccccatttgtgggtaacaagggggggttggtgttcttttcacccttgctaaactgtttgaatcaaggatcccaaactacagcctgcaggccaaatccagcgcccagcctgtgtttgtaaataaagttttattggaacaaagcccccccccttaattgaagatgatttggggctactttccccccccaacagagtcccatggttttgacagagactaggagacccagtttaaatgacttttgacctggccctttactgaaaatcctgccaatcattttgttggcaagaatgatgttttccttttagcaataagaaacaagtaacctttgca

SEQ ID NO: 642505 - DNA, 1153 bp, Homo sapiens
  misc_feature (891)..(891): n is a, c, g, or t
gggtgttcctctcagccccatttctgagaacaggtgaatggcagaacaagccctggacttggacccacgaccaagctctcatgctgttgcgcccttagtagcctctgctgcccatcagttcctgtcctgctcttggcaaattccagaccctttcataaatggccgaagccctaagcctctcctcactctgcactcccaaaaacagaactaatttacaggatgcttctctttcgggtggtggtggttgtcagttacaggaatttagaagaatcattgctccgtaccgaaaagtgacacataaacacacataacgaatgcggggaggcgccactttaagacaattctcctcgtaggagggggtcgccaagagtctcttcatagcgttacctcccgggcttttcttcttaggccacaaggagcggacgccgcatatatagagcggggaggtgtagcttctatctacacccaatagttcgtgggctcgagtggccacgctagtctcacatcgtcccgtccgcaaggattggggtacaaccactctgtgccttcgacagcatgtaggagacacccttggggtgccaaaaagctgggatggcacctgtgatcaattccagtccgcggtgggcggtggtgagccatacatattaagttgtcggcgccaatacgaatcgatacctcggccattggacgatagggcaatctctgatggagcagtgggttcgcccctataacggggcccataacactttccccaaagagaccttatcggcgacaagtgtgttgccatatctgaatgcgcggcgttgttttagcaaacccctgtgtggtgggcgcgggggccataactatctatggcgcgatgtgacggccagtgtcaacttaggcaggcanacaagggctctttgtcgagggaggtcatattacccccggacggagaatgacacgatggagacaggtcacattctctgcgttaagcacaacaataccttgcctttgtatcctacttccaacggggtgtaaagtcccctagcttggtatataccacactacaggcagcatcccccccgttccacagaagaccacgtatgaggaaggtgtacagtaaagatggttgtagtgggtgaaaacaccagcacagtaaacccaccagttt

SEQ ID NO: 642506 - DNA, 636 bp, Homo sapiens
cttcatactgcgggcagaatccctcatcacccagctaaaagtattaaacacatactaccacctacctccctctcctttgcccatataaataaaaaattataacaaaccctgagaaccaaattgaaagaaaatctgttcgcttcattcattgtccccacatttttttgccttggggccgctgcgctgatcattctatttccccctctatctgatccccacctcccactatctcatcaacttccgactttttaccacccaacaatgcctaattaaacgttcttcaggactcctggtggttttgcacatcattaaaggacgatttctgttttttattctagtttctttatttattcttttttgccacatttaaccctgtcgcccgcccgcgtgactcactacccgggccacccactatctgtatgccttgccttgcttctccccttttgatcgtcctctgtctttttacccctctcctcttcggttactctttctttcaccccttttttttcctcggtcccactctacctctaatattacactagctcttccccctaccctctatttattactttaatactattctttcccttcccttattttttacactattccatcctactcaacagaaacaaaaaa

SEQ ID NO: 642507 - DNA, 329 bp, Homo sapiens
  misc_feature (266)..(266): n is a, c, g, or t
gagagggagtctcactctgccacccaggctggagtgcagtggcacgatctcagctcactgcaagctccacctcccgggttcacgccattcgcctgcctcagcctcccaagtagctgggactataggcgcccgccaccacgtctggctaattttttgtatttttagtagagacagggtttcaccatgttagccaggatggtctcgatctcctgacctcgtgatctgcccgcctcagcctcccaaagtgctgggattacaggcgtgancacccgcacctgggccagtcttctaattatttagtgaattcagtacggttgacatgggggctg

SEQ ID NO: 642508 - DNA, 454 bp, Homo sapiens
agaaaaggggatgggagaaggtggagaggtacgaaggggccagatgacataggccattatttccattcagtggggaaactaaggcccagaaatggggtgaggggtgcctcaaatgtcagagctggaattcaaattcaggcttggtatcttgatatgagatgttcctgggcggggtgtgggggctcacgcctgtaatcccagcactttgggaggccgacatgggaggatcacttgaggccaggagttcaagaccagcctggccaatatggtgaaactgactatactaaaaatacaaaaactagctgggcgtggtggtgcttgcctgtaatcctacctatttgggaggctgagtcatgagaatcgcttgaatccgggaggcagagtttgcagtgagccacgattgcgccactgcactccagcctgggtgacacagatttagtttccaaaaaaaaaa

SEQ ID NO: 642509 - DNA, 837 bp, Homo sapiens
aactgctgtgcgccccctcaggagtaccgcttggagatcctagaggtggatgtgtacccgggtctggccctcagtgcaggacaggttcatgctcactgataaggggtcccaagcagaggtgaagatccaattaaatgtacgaacgctgggccactgtaatgctgtatgctgtgctgcgccgagtatgatccatggagctccgtctgatggtgctgtgtctcgtgctgccgcaggaatgcgaagctactagctgtcatgtgcgacccagttgctcggataccactccggtagcctgcactcatttgggtgctcctagtttgcatcggagccgtgtctggtggcactgtcggggtcacagcgccagtggtgagaagtaacggaggccgttgcgtgggtgtgggagcctcttcgtctagcgcccgtctgcgctgccgtcattgtcgtcctggaggttgctcaggaggtgcgtaatcgcctgtgcgcccctggtaccgatgctggcgcccttcctcgaagcgaagcagagtgttgactgggcagtgggccagtgcctctgccaaggtccgaagggacggaggatgaagctggcgggagcgttgcctaggcagcgtgctaggagagtgctgccaaagttagcacgcgcttatgatacggagtactttgcacaggcctgaagcacggggctgctgctgggcgcagccgacatcagctcccttagaccagaagctgcgtctgggcacttcctgtttccaccagcttatcttggcgtctccaagtctacgacgacgagctgggcgattgtgcccgcccaggcctgctcaaccgtgggccctttcg

SEQ ID NO: 642510 - DNA, 735 bp, Homo sapiens
caaagcaggagaaagcctggaaatcccagtcagacaagtcggacggctggctgataaggatcgaggggaagaagatgctgatggcagcgaaacccaggagctattccgcaggggttgcgctccattcctgaataaactgacatcgctccagagtgttccatgcagtctgatgagacgctaacgtgagcgcagctggcgcatcgacaccgaggaacgcctcaaaggggctcattgacctcattttcgacaaggccatttgatgagcccaatattctctgatggcctatgccaacatgtgccgctgcctcatggcgctgaaagtgcccactacggaaaagccaacagtgactgtgaacttccgagaagctgttgttgaatcgatgtcagaaggagtttgagaaagacaaagatgatgattgaggttttggagaagaagcaaaaagagatggatgaagctgctacggcagaggaacgaggacgcctgaaggaagagctggaagaggctcgggacatagcccggcggcgctctttagggaatatcgaagtttatgggagagttgttcaaactgaagatgttaacagaggcaataatgcatgagtgtgtggtcaaacgtgcttaagaaccatgatgaaaggtcccctttgaagtgccttttgtcgtctgtcaccacattgggaaagaactggaatttgaaaaagccaaggcccgaatggatcagtattccaacaggatgg

SEQ ID NO: 642511 - DNA, 106 bp, Homo sapiens
cccagggctgtttctgggtgctccctggccccagggtggcgtttggttaccatggctgtgtgtgtccatgtatgcaaccagtttttcaataaatggcctgcctccc

SEQ ID NO: 642512 - DNA, 252 bp, Homo sapiens
aatctgtcatgtcgtgtgagtagtgcgtcatgtcactcaggcctcctggctgatagcagcatgtctgctgcaaatcacgcacatggtttgtcattgcctgtccagtcaggtgatgcctctatgtttggggaggccacctctgttgtttcttaaccttcccagcctacccacagtagtcccctgtattgctcatagcattcctccatctttaagccccaggtccatgctccgagtccgggagtacactgcttg

SEQ ID NO: 642513 - DNA, 866 bp, Homo sapiens
gttttcctccctgtcgccaccgaggtcgcacgcgtgagattctccgccgagacgccgccggatgggtagtcgctcctacctgtgggtgccctaggggacaatcctcccccagcgccaaggtacatcaagaagatcttggacgagcgtgagttatcgaggcggacaacgaccgatttcaacaaggttatcaggtgcagctgcatggaaaaaaacgatgtgagggcacttcattggcccaggctatgtggccaagctggccgaaggtgtcccatgctggtggggcttgcagcggttctgtcttgccctaggctgctgagcccactgcttgctgtgttcatgccccttgcttgcacaaagagggagaagtagacgttgaggacgagggaagagagcctgacagagtccggagtgacatgaagcaggggattttgcccctttttggattaaattccctgtgctcgttgtaaagtaaatgccttttacacatccgagaagaaatatttgacacgcatgatagacacatcaattgtgttagggagcctgcccgcctgagaacattttttaaaacaattggttggaggcggggcgccctatgggttatgacaacagtttaagagtcaggtcaaggaagaacactcggcgataagctagcatgtgggtgtttcgcccaaataaaatagcgcggagagaaacagcgcggatttaaccatgccagagggggttggagcgacatagggctattgaagggggccacggaatcgttatcggcgcagttgtagaatataacacagttaaacacgtattgtggctattatcttagagacattatcggtttaccgtattgaagacaatttaaaaagagagtg

SEQ ID NO: 642514 - DNA, 223 bp, Homo sapiens
  misc_feature (59)..(59): n is a, c, g, or t
gatttgtgtgttgttgttgaatatttaggatggatttgaattttgattttatattagtntttttaaaaattttttgaattgttgtgttttttatgtaaaaaaagagatgtataaattaataataattatatttttagaaattgtattattaaagatttttagttaaagtagtattatgtaaaggtttaaaatattattttaataaagtaaagtttttaatata

SEQ ID NO: 642515 - DNA, 787 bp, Homo sapiens
agaggaagttagtcaggctgatggcatcttcaaagctgaactgagatgagttgcttagctcgggagctggctgaagatggcatactctggagtttgaggtgcggagttacaccaaccaggacaccgaaatcattatcttagccaccgagtaacacagagtgtactatggtgagaagggccggcggtattcgggaactgcactgctggtcacgtctcaggaacgaggtttggcttgccagaggggcaatgtgtagagcttgatgcttgacatacatggttggcctactagaggtcttgtgtgccattgcccagtgcggcagtctctgcgtttacaacactcctaggagggctctgctgtgcggggggcctgctatggtgtgctgcggtctcatcatggccgcagtggggccgaaggctgcggacggtctgtgcgctgtctggggaaactccggagcggacatgagggctaggtccatgaagttgtggatggcctggtggatccacagcgggagaccctgttagctactacgtatgacactcgctgtgcggtccacgtgttgctcagacagggtgtgctggtgcatcagggtgaacgatcatgctggcctgtggactccaaattggtagggatatgccctaagaagccctgcctgacatgtgagctttgtggaaccataagatgagatagtgccaacacccccatctctagaacagaagggtgggaagcagagcggttgcatgcccagcagtcccagagcttaccgggctcccttggcagtgatcaggg

SEQ ID NO: 642516 - DNA, 265 bp, Homo sapiens
gcagaggtgttctttgatggagtacgggtgccatcggagaacgtgctggggaggttgggagtggcttcaaggatgccatgcacatcctcaacaatggaaggttcaggcatggatgcagccttgtcaggtaccatgagaggcatcattgctaaggcacgtgagtacacctgcccgagtccctaggaaacccaaacagaattcttactgtcctacatgccatgtgtccactgagcacttgcagggactccctacactataatctcct

SEQ ID NO: 642517 - DNA, 183 bp, Homo sapiens
atagtctcgggaacacacgcacatcatagtagtcgtactcagtggcacggtctagcatgttgagccggccgcgctgtgcccccaggccgtggcgcagcataggaggaggctcggatctaggttagtcctcaatcacggtgatgactccatacccaaatgggagggacacttagactttactcc

SEQ ID NO: 642518 - DNA, 344 bp, Homo sapiens
  misc_feature (219)..(219): n is a, c, g, or t
tgactttggcgatttttaacaaaatttttaaagacccagtgagagtctgtagtgattattacacggataatgttttaaatgtctaggttctgtatttttttcttaaatagcaagaaaatacagattgctagtatagtcaacagtatttggctatcaataaagaatctctttaagatctcacccggctgggcattctgtaacagaggggattacctgggngttttaagtatttaatgtcctcatagtgtgggaaatcccctaaattgattaggaaattgtattttatggaaaaataacttgtattccattcttgtgtatttattaccaatatataaatatgggcc

SEQ ID NO: 642519 - DNA, 111 bp, Homo sapiens
gagcggtgtggggccgcgtgcgaagccgcctccgcgccttccccgagcggctggccgcctgcggggctgaggccgcggcgtaagacaggtgcgtgcaggcctccacggccc

SEQ ID NO: 642520 - DNA, 414 bp, Homo sapiens
gctcggcaccctgaaaattatgttgacggggttagggggcgtctataacattcgccccgcttctcaggaacagccactcgctgggtgagacggcaaaagccaagcccttgtggcaaggccggagtcgaaagcttgtaagtctgcgctagcggatggataagcgcccgtagctcagctggatagagcatccgccttctaagcggatggtcgcaggttcgagtcctgccgggtgcgccatttggcggtcaggcaatttgagtaagcaatgcaatatggtgggcgtagctcagttggtagagcacaggattgtggctcctggtgtcgtgggttcgattcccatcgtccaccccatattccaaagcgccaggcccaaagcctggcgtttttgttttaagcttcaaaccacgcggacgt

SEQ ID NO: 642521 - DNA, 97 bp, Homo sapiens
ttatttgggttcagttataacatagcataataaatacaagttcaaatttatgtagactgtataagattataataaaacatgtctgaagtcaaaaaaa

SEQ ID NO: 642522 - DNA, 713 bp, Homo sapiens
tgaaagcttgcctctcaggaaaatgcacacataccaaactttgaggaatgatgcccttgaggcgtgtgcttcaagtgatcctatgatacaatgaaggcccgctttcccgagacatcgcaagaaacctaaagttttactgcatacatgcaattctttgtagctaaacaggtcatcgcgacgtattcttccacagaaggcctggggcagatggcaaataggaggacgaatgaacaacgctcggagcccaacaaggaggcacaacagcatcaacaagcagtcaccccatgaggttatcacgcaggccacaattaaatcccagtggcgcataacgaaggccaactcacaccggacgcactacgaccgtggggcggacaataccaatgaagcaaaacacatataggccatagaaccgtaacaaatccacccgcaggggacattaacacatattatcacagagttaggggactaataatcgtgctatatcctacgagtatcaacggcaagagaaaacacgaggagggagtattccaatcatcccaacctgcctgggattagtcataataaatcgacaacctcactgccggaacatctacaggcctcaattagggggaaagatacaattcggcatgttggatagccgctccttaattgatgatatgaaacgttcacaccaaaccgacacggtgagaccatgttcgggcgtgtcagccagt

SEQ ID NO: 642523 - DNA, 98 bp, Homo sapiens
  misc_feature (67)..(67): n is a, c, g, or t
taagtggtgtacgtggcgtaaggtcttgtgtgaaaaataattttctcataactcactgtcatgctangataataaaataatattgagtaagccaataa

SEQ ID NO: 642524 - DNA, 201 bp, Homo sapiens
tatatatatataatatttacatgatacatctaaagtatactatctcacttaaaggccataggatcaagtatattatctgctatcaaggtcatccgttatgtcctgacacgtcttcaagcagaagaagagcaaaaacagcagcctcagctgctgaagtgacatgaagagagcctctggatgcatgtccatctcgtctcttct

SEQ ID NO: 642525 - DNA, 485 bp, Homo sapiens
atatcagcagtcattgatgtcctgagtgtagccgtcaagaaacgtgtcatgtgtaacctagggatgaaaacctgacagcaaatgaagtttagacaccgtgtgataggacagcaaatgtagcaatcctgtatcctgggggcatcgattccatggttatcgcaccccttactgaccgtcatatacctttacatgcacccaattgcatcttcttactgtagctttcatcagctgaagcaaaagcaccatgccacctcacctttaacagagaagggcaatccacagaacacatacatgtgcaacatcaccttcagcaagcacatctctcaacagcatgttgctgctgctgctgctgcccagtcctccatccaccatgtcagggtcaccagatcgaatcaccaggcaagggcgggcataaaggacactacaagctgttcagcccttcccgaatttggacattttgttgcaaattaatgtttctcatggaa

SEQ ID NO: 642526 - DNA, 448 bp, Homo sapiens
cgctgtgtctcattgtgtattccactatagtgagacatgcggtgttggttttgccttgtgatagtttactggaatgatgatttccaatttcatccatgtcctacaaaggacatgaactcatcccttttttatggctgcatagtattccatggcgtatatgtgccacattttcttaatccagtctatcattgttgggcatttgggttggtccaagtctgtgctattgtgaatagtggcgcaataaacatacgtgtgcatgtgtctttatagcagcatgatttatagtcgtttgggtatatacccagtaatgggatggctgggtcaaatggtatttctagttctagatccctgaggaatcgccacactgacttccacaatggttgaactagtttacagtcccacctacagtgtaaaagtgttcctatttctccacatgcatgcacccagg

SEQ ID NO: 642527 - DNA, 401 bp, Homo sapiens
cgggttcacgccattctcctgcctcagactcccaagtagctgtgactacaggcgcccgccactacgcccgggtaatattttgtatttttagtagagacggggtttcaccggtttaaccgggatggtctcgatctcctgacctcgtgatccgcccgcctcggcctcccaaagtgcgccttttctttttttaattggcacttaaccctggctccttcttgcgataaaacatattcattcatgtggtagtgagaaattggggaaaggaaatcccatacatctgtcaagagatacattttcaataatatttttatttttctatttgagatctatttataaaagtgtgtttcatatttttttttttgtgggggccggggggggggcccacaattttctcttacatc

SEQ ID NO: 642528 - DNA, 772 bp, Homo sapiens
  misc_feature (86)..(86): n is a, c, g, or t
  misc_feature (98)..(98): n is a, c, g, or t
  misc_feature (125)..(125): n is a, c, g, or t
  misc_feature (145)..(146): n is a, c, g, or t
  misc_feature (178)..(178): n is a, c, g, or t
  misc_feature (215)..(215): n is a, c, g, or t
  misc_feature (223)..(223): n is a, c, g, or t
  misc_feature (230)..(230): n is a, c, g, or t
  misc_feature (260)..(260): n is a, c, g, or t
  misc_feature (263)..(263): n is a, c, g, or t
  misc_feature (270)..(270): n is a, c, g, or t
  misc_feature (277)..(277): n is a, c, g, or t
  misc_feature (286)..(286): n is a, c, g, or t
  misc_feature (307)..(308): n is a, c, g, or t
  misc_feature (314)..(315): n is a, c, g, or t
  misc_feature (325)..(325): n is a, c, g, or t
  misc_feature (327)..(327): n is a, c, g, or t
  misc_feature (333)..(333): n is a, c, g, or t
  misc_feature (349)..(349): n is a, c, g, or t
  misc_feature (375)..(375): n is a, c, g, or t
  misc_feature (382)..(382): n is a, c, g, or t
  misc_feature (411)..(411): n is a, c, g, or t
  misc_feature (414)..(414): n is a, c, g, or t
  misc_feature (440)..(440): n is a, c, g, or t
  misc_feature (447)..(447): n is a, c, g, or t
  misc_feature (465)..(465): n is a, c, g, or t
  misc_feature (469)..(469): n is a, c, g, or t
  misc_feature (474)..(474): n is a, c, g, or t
  misc_feature (479)..(479): n is a, c, g, or t
  misc_feature (486)..(486): n is a, c, g, or t
  misc_feature (498)..(498): n is a, c, g, or t
  misc_feature (506)..(506): n is a, c, g, or t
  misc_feature (511)..(511): n is a, c, g, or t
  misc_feature (513)..(513): n is a, c, g, or t
  misc_feature (520)..(520): n is a, c, g, or t
  misc_feature (528)..(528): n is a, c, g, or t
  misc_feature (537)..(537): n is a, c, g, or t
  misc_feature (548)..(548): n is a, c, g, or t
  misc_feature (566)..(566): n is a, c, g, or t
  misc_feature (573)..(573): n is a, c, g, or t
  misc_feature (575)..(576): n is a, c, g, or t
  misc_feature (587)..(587): n is a, c, g, or t
  misc_feature (597)..(597): n is a, c, g, or t
  misc_feature (613)..(613): n is a, c, g, or t
  misc_feature (625)..(625): n is a, c, g, or t
  misc_feature (667)..(667): n is a, c, g, or t
  misc_feature (673)..(673): n is a, c, g, or t
  misc_feature (680)..(680): n is a, c, g, or t
  misc_feature (686)..(686): n is a, c, g, or t
  misc_feature (710)..(710): n is a, c, g, or t
ggcggcacgcccgtgaggctttctcgtggggtggtaaccgctactcccggacaccagaccaccgccttccgtacacaggggcccgnatcccaccctcncggacctaagagcctgggtcccctgtntccggaggtccgcttcccgnnccccagattgtggcattccagccctcagtgtncaagacccaggcagcccgggtccccgcctcccggatncaggcgtncgggatntgcgccaccagaacctagcctcctgcaganctncgccatntgggggnactcaaccncatggagccaagggccccacnntccacnnagagaaactntngtattnccagctcccaaggaanccgggcgctccgaactcccagctttnggacatntggcacacggggcagagcagagaagcctnagngcccagcctggggaatttgaacactncagcttncaagagccaaggaacttnagtnctgtnaactnacaactntaaggagccctncaaagttncagtntncaggtgntgttactnaactcagtnctaggaacgtngggtcctgggaaggagcncaagcgntnncagctagcttncaggcgctangaaaccccggtgcttnccatcatggtgnccgatcctcctcgagactccaaggggctcgcagcggcggagncaccgncaacggnggcctngcgctggcctccatcgaggaccanggcgcggcacaggcggctactgcggttcccgggaccaggtgcgccgctgccttcgagcccac

SEQ ID NO: 642529 - DNA, 154 bp, Homo sapiens
  misc_feature (69)..(69): n is a, c, g, or t
  misc_feature (127)..(127): n is a, c, g, or t
  misc_feature (151)..(151): n is a, c, g, or t
aggtctagcaggcaccaacaggggcaacggcaggggaaaggggcactgagccacacgaaagccctacanggttccctggaatgaccaagcctgatcagcctacacctgttcactttcctgcgcccangatacacataacccttctggaccnggt

SEQ ID NO: 642530 - DNA, 224 bp, Homo sapiens
catcagcttcaatttgccgccgggcgagtcgctgtcacaggccaccgaagccatcagccaggcgatgaacaagctgggcgtgcccgtctcggtgcggggaagttttcagggaacggccagcgcttttcagcagtcgctttcctcccagcccatgctgatcggggcggccatcgtggccatctatctggtgctgggcatgttgtacgaaagcctgattcacccgg

SEQ ID NO: 642531 - DNA, 379 bp, Homo sapiens
ggaaacccaggcggactgctatctattactgtctccagaaaaaacctccagcttgttaaaggtataactttaaaaagcaacaacccgcaaacacgcatagaaacagacacacacatgcaagcacacttctaccctcagtctagacaatacttacctttgttcacttcttgcgtaatgattctgatcattcagtgcctctatttggtatctgtttggtcaaatgatactattgttgctgagtacaagggatagaacagttggattttgcccctttttgtttagtttgttcattgcatttattttgcaccaagctcttacatgacccagcagtaactagagagtgaaattgaataagatcatttggttttagtctaggcca

SEQ ID NO: 642532 - DNA, 1400 bp, Homo sapiens
gaccacgcgtccgatgagtttcatgatatctagaacggtcatatgaaggagaagaagatacaccaaatggggcttctactaggtggcgtcaagtcaacatatatgtttgatctgctgttggagacgagaaagcctgatcaggttttccaatcttataaacctggagaagtgatggtgaaagttcatgttgttgatctaaaggcagaatctgtagctgctcctataactgttcgtgcttacttaaatcagacagttacagaattcaaacaactgatttcaaaggccatccatttacctgctgaaacaatgagaatagtgctggaacgctgctacaatgatttgcgtcttctcagtgtctccagtaaaaccctgaaagctgaaggattttttagaagtaacaaggtgtttgttgaaagctccgagactttggattaccagatggcctttgcagactctcatttatggaaactcctggatcggcatgcaaatacaatcagattatttgttttgctacctgaacaatccccagtatcttattccaaaaggacagcataccagaaagctggaggcgattctggtaatgtggatgatgactgtgaaagagtcaaaggacctgtaggaagcctaaagtctgtggaagctattctagaagaaagcactgaaaaactcaaaagcttgtcactgcagcaacagcaggatggagataatggggacagcagcaaaagtactgagacaagtgactttgaaaacatcgaatcacctctcaatgagagggactcttcagcatcagtggataatagagaacttgaacagcatattcagacttctgatccagaaaattttcagtctgaagaacgatcagactcagatgtgaataatgacaggagtacaagttcagtggacagtgatattcttagctccagtcatagcagtgatactttgtgcaatgcagacaatgctcagatccctttggctaatggacttgactctcacagtatcacaagtagtagaagaacgaaagcaaatgaagggaaaaaagaaacatgggatacagcagaagaagactctggaactgatagtgaatatgatgagagtggcaagagtaggggagaaatgcagtacatgtatttcaaagctgaaccttatgctgcagatgaaggttctggggaaggacataaatgtatgtacttcaaaagaaaaacggtccttgaaacagcatcagtttttctctcagtttatttaaattttcagttaagtgttaggtacttagttctaagatcatttgtaactttctggattataagattattgacgcagttgtaatgaacactgttcttagacctgtgcagtaaattagatggtaattatatcagaactctgagataagaagtaaaaaaaaa

SEQ ID NO: 642533 - DNA, 1694 bp, Homo sapiens
  misc_feature (1535)..(1535): n is a, c, g, or t
  misc_feature (1630)..(1630): n is a, c, g, or t
  misc_feature (1645)..(1645): n is a, c, g, or t
  misc_feature (1668)..(1668): n is a, c, g, or t
gaccacgcgtccgatgagtttcatgatatctagaacggtcatatgaaggagaagaagatacaccaaatggggcttctactaggtggcgtcaagtcaacatatatgtttgatctgctgttggagacgagaaagcctgatcaggttttccaatcttataaacctggagaagtgatggtgaaagttcatgttgttgatctaaaggcagaatctgtagctgctcctataactgttcgtgcttacttaaatcagacagttacagaattcaaacaactgatttcaaaggccatccatttacctgctgaaacaatgagaatagtgctggaacgctgctacaatgatttgcgtcttctcagtgtctccagtaaaaccctgaaagctgaaggattttttagaagtaacaaggtgtttgttgaaagctccgagactttggattaccagatggcctttgcagactctcatttatggaaactcctggatcggcatgcaaatacaatcagattatttgttttgctacctgaacaatccccagtatcttattccaaaaggacagcataccagaaagctggaggcgattctggtaatgtggatgatgactgtgaaagagtcaaaggacctgtaggaagcctaaagtctgtggaagctattctagaagaaagcactgaaaaactcaaaagcttgtcactgcagcaacagcaggatggagataatggggacagcagcaaaagtactgagacaagtgactttgaaaacatcgaatcacctctcaatgagagggactcttcagcatcagtggataatagagaacttgaacagcatattcagacttctgatccagaaaattttcagtctgaagaacgatcagactcagatgtgaataatgacaggagtacaagttcagtggacagtgatattcttagctccagtcatagcagtgatactttgtgcaatgcagacaatgctcagatccctttggctaatggacttgactctcacagtatcacaagtagtagaagaacgaaagcaaatgaagggaaaaaagaaacatgggatacagcagaagaagactctggaactgatagtgaatatgatgagagtggcaagagtaggggagaaatgcagtacatgtatttcaaagctgaaccttatgctgcagatgaaggttctggggaaggacataaatggttgatggtgcatgttgataaaagaattactctggcagctttcaaacaacatttagagccctttgttggagttttgtcctctcacttcaaggtctttcgagtgtatgccagcaatcaagagtttgagagcgtccggctgaatgagacactttcatcattttctgatgacaataagattacaattagactggggagagcacttaaaaaaggagaatacagagttaaagtataccagcttttggtcaatgaacaagagccatgcaagtttctgctagatgctgtgtttgctaaaggaatgactgtacggcaatcaaaagaggaattaattcctcagctcagggagcaatgtggttnagagctcagtattgacaggtttcgtctaaggaaaaaaacatggaagaatcctggcactgtctcaaggattatcatatatatgaaggaagatattnctatttccagcaacngggaaggtttccttgaagttctngatggggctacagaagatccacgtcc

SEQ ID NO: 642534 - DNA, 109 bp, Homo sapiens
tggcggctctggctccagaccagcacgttattcaggtgattcgcgtctggcgctcggcggcgggcgggcggactatcgtcggcagcaggtcggccccctcacggtacaa

SEQ ID NO: 642535 - DNA, 664 bp, Homo sapiens
ggagttaacgagtgcacacacacagcagacacaattatcaaaaaaggagtgtgcgtgtgtgtggaataacacccagccgctgtcaaactgcccataatctccaatggactttttaaaaccaacaaaagccgaaacggtggcccagaggctgctcctttgttatcccatgctttctaattcaagtcgaatgactgctttggtcacacttttttagtcacagtaaaaaatcacgggcgccctctggcatgcatgacatgctattaatcagaaaaggtaccactcccgtgttttttgtttctgaatatgtctgttcacggaccacaagggcatgggtcaccaatccgaagtggatgggactaaaccattgcgccttagaggccctcaattcaactacgaaccctttaacagcaacagcattaatatacgcttttggagctggaattaccgcgggtgctggcaccagacttgtcctccaattgttactcgattttggatgggttaaatatcccccattgaaaacgacaatgaaaagcactgcggctctaatcttttcgctgcctcattataatttgcattgggcaatttgccgcctttccctccgtaaagtgtactatactagctcctctcgaatgaacctaaccccgtccgtaggcatgagccatac

SEQ ID NO: 642536 - DNA, 220 bp, Homo sapiens
ataggacgggaataggtccgggaagactctctggcagctcagccgctgaggacgcagaaaatgggagggccgcggtgtggagcgcgtggcttcataggctaggtagcggcgccttgtgactcacgagtgtccatatgcgtccctagacatgcgcctggctgctttccctggtgccgcagattgtggcctgggctgtctggggaagaggcgctgtgtggac

SEQ ID NO: 642537 - DNA, 709 bp, Homo sapiens
gaagaatgtatttaacaaactgaagatccaggtaatatcgtatgctatgttattacattgaagaacaaattgacatcagtaggagtaggactaagtgatgctcaacctcagatggactgaggtttagtccctagtatgacaagagtagattcacagaaaataaatgggtccatcaactcacgctttcattataaatcagttcgttaatataacacctctagtagaaagcaagcactagttaaggtggcaggaaggcaatctactttcaaggcttttattaaagtttagaaatgatcaggggacttcataagattataaatttcagtctaaactgaaatgcgtttttaattctctgaataagtaacttccagtttacgatgaatgtaagtgatcagttgctctgaccaaagaacgatgccattgcatgtgattggactgacctcttactgtggagactagaaagtgctgaatattctttagtatattctctcatactaaggagttactatggaatgtgattgaaattgcaaattgaataattgaccaggatttggatctatacctcgctaaattagatacttcttgaatctagtgatagatgcagtgatgccagtgatgacagcttttcagtagcatagatagctgacttggcaataagatgacatgaatccatgactgggaataatggggactgactgtgatgccttgt

SEQ ID NO: 642538 - DNA, 278 bp, Homo sapiens
  misc_feature (31)..(31): n is a, c, g, or t
  misc_feature (37)..(37): n is a, c, g, or t
  misc_feature (55)..(55): n is a, c, g, or t
  misc_feature (90)..(90): n is a, c, g, or t
  misc_feature (131)..(131): n is a, c, g, or t
gtgattattgtatattacagtgaacactgtngattantgtattgacctgattganatattatccaagtgtgtctgagagatataaatttntggtaagttagagagtgaagacatctgtattagtttatttncacactgttataaagaactgcctgagactgggtaatttataggggagagaggtttaattgactcacagttctgcatggctggggaggcctcaggaaacttacaatcatggaagatggggaagtaaacacatccttcttcacaaggca

SEQ ID NO: 642539 - DNA, 183 bp, Homo sapiens
acattggatgcacgattttgagaagcagcaaggaggcaattgggtaaatacactaagatacaagaagactttgtctccgtgtattttaggcagcaggagctgtgaccagtggttagcagaggggccacgttgactcaggccgcagcccataggtcaggatagcaggctgcccgctgcctcatt

SEQ ID NO: 642540 - DNA, 166 bp, Homo sapiens
  misc_feature (16)..(17): n is a, c, g, or t
  misc_feature (47)..(47): n is a, c, g, or t
  misc_feature (160)..(160): n is a, c, g, or t
aactgaagaaaactannccttgaaagatgagtaagaattcaccaaanaaaaaaaataattgagacaatttttttttaaagtaaaatatttttataaaagcttttaatgctactttctgacctacaggtgatgaaagggagtatgccagcagatatagccncattac

SEQ ID NO: 642541 - DNA, 1016 bp, Homo sapiens
ggcccctacgtgcctgtcggctggcctggctggcccgatgatgttatctgggaacgaaggctggcagccgcggcggcagtgtgtctgcagctggcagcaaaccgggacggagtgctggccctgtggacagcatgtgctggctccagaagaacggagtctgacgtgtgtgcctgcagcaagacccctgctggtgaccatgtacgggcccatgccctgaggtccgggcctgtgtggagcaaggatggagaggaagaacaggcacaaccacctgtaaagacaacgatgcctcaccgagagagcacatctgaacccacacgagaggtggacacttggacagagacacacagcacggagagagatacacaggaaacggggcaccatcaagagaccagtgaccactagcattggtacagattgacacttgagaggtacttgacgaacctaccacaattgcgaacaaacatgggaaaatacggcaggaataaacatcacagagacggggagacagttacagggaacaccacagggcgaggtgaatggacaaaagggagagagagccagaaaagcgggattacggaaacgataacacatgacataagaattggtgaattaggcacaaagtgccgttattggtagcaaaagagctttcctttcaaggaaacgacacttgaagggatagttaaaaattatacaagagaaaagaacgagtgaagcaccgaaaaacgttgggcacacaaatatagcacaagagaagcacaaacaggcgaaatacacaaacggcaaaagagtgtttactcagcccccacagaaccaacaagaagactcatccagattcgaacaaaggcaacaaacccaaaaaatcaagtaggaaagtggacaactatcaacaagatgaattagggacaaaaaatatgttagagtcacagattagaacaagtaacgacgcggcacagctaccgaggtagagcaacctaataaagaccaaaagaggacatagcgatcacaactataccaga

SEQ ID NO: 642542 - DNA, 107 bp, Homo sapiens
agtgcggtccatcagctccacatgcgagaggatcacaccagtcacctctggaccctgagagctgaacgagggcatcataggccagacaggcccaaggatggatgaat

SEQ ID NO: 642543 - DNA, 173 bp, Homo sapiens
  misc_feature (9)..(9): n is a, c, g, or t
  misc_feature (97)..(97): n is a, c, g, or t
  misc_feature (131)..(131): n is a, c, g, or t
  misc_feature (133)..(133): n is a, c, g, or t
gggtttcanggactggggggaggggataaatggggagatgttggtcaagggtacaaagtttcagttaaacaggagtagtacgttctggagacctgtngtgcagcagggtgactagttaatgtatacttgananttgctaggagtagatctcaccaggggaaatgaatatgtga

SEQ ID NO: 642544 - DNA, 109 bp, Homo sapiens
ctggatgttgtaagctattacaggaatgagtactcccaatattccctgcactgctagaagcctttagggcagggcccttctcgcttgccacctccctatactgcttgga

SEQ ID NO: 642545 - DNA, 305 bp, Homo sapiens
ccttcaaagatctttgagcatcacctaagaaaaatctgtatatcatttaattgaatagtataaaatatttaaaaataattacatggataaaattaatgttaacgcaacaggatgagtcatttttctttttttttggaggcagggtcttgctcctgtcacccagagctggatgtggcacaacacagtggctcagtggctcacagcttcacggcttcaccggcggcagcatttgacctttccaagcctcaagttgatccttcccacgcttcaggctcccgagttagctagagactataggccatgaa

SEQ ID NO: 642546 - DNA, 176 bp, Homo sapiens
agcgcggcggctataaatagaatcggtagaaaaatctgcattcacactaacaagaatttgaaatttggtggttggctgtagagatctggcttatttctgaaggctaatgactgtcagataccatctatatttgaggaaaataataggaattattgattgagcagcagggaaagaca

SEQ ID NO: 642547 - DNA, 200 bp, Homo sapiens
gtggcacacagcgatttccacaggcattgggtgaagaaaaacatgccccagagtcctgcgttgtgtgaacactggctgtttcgacctccgtcgctgcatcacaagtgtgcggagcgaggaccttttgcacaaggactgcgagttcctgatcctagagaaagacaacacacctgccagcaaggagatggagctgctcatca

SEQ ID NO: 642548 - DNA, 654 bp, Homo sapiens
ataagttggaggtctggcaagcgggttccagtcacagtgtctgaacagcaagcaaccgggggtatgggtccggcccccagtgcctgactataagtcacatcacacttcagcatatgcatgaccgactgtctcaacttctcctccttgtatggatccttgaccctgttcccttcaagatcacacacataggtctccactgcgaaccagtcataggcctctggctctttcttcagcaagttctccagctcctgcaggttctggtatgagtagtcagtgacgacgatctccgtaaagtattcacaagcagagaggagctgatagatagtggggccagagccgatgttcataaggtgcttaagaatctggctttctgcagagtgcctagagccaatcttgtaatactcttctaggtaatcgcgagggttaaaatggcttagataggtgtccttggaggtgaagcctgactccattatgtctcacttctgtaccactgaagcactgccctcgttctcgttcctccacaagacagggagtgaccctgcagcagttgtcatcctgagtctcaggctaacagcattccgttcatcagttcagcccctcttttacagcagatgataggttaaacactaacagaggaatagctctcaaatgttc

SEQ ID NO: 642549 - DNA, 81 bp, Homo sapiens
gatgatgagctcggtccattcattgcggtgagcatcatcacaccactgcacacctgctgggcaacaaagcgcaaccctgtc

SEQ ID NO: 642550 - DNA, 979 bp, Homo sapiens
attgatccagaccctcagggagagtcctagcttactagtgcttactgcaaccgactcgccgtcctttgaccctttagtgtgccggctagtatcgtgagttccctacttatatagatatcgagtgcgtgaggcctctatctatgatatcctcgccacgttgcctaacgtcagatatgtacagaaaaataagagttgtactaaacgactatattgctcttgttgatcctttcttgaactgtatttgcgtgtcttaggagcgtgtacacagcggcatctgttatctttgggtttgcgattgtggattgcatatgatggacggagatgcgaatagggcttgctgtgggcatcccaatttaatgttatatgtgatgacttgtttgtaatatagccaaggcagatagtcttgaatagctattaacgtgttaattttggatttgacgaggcaaatactctattgctggaggtgatttgtagactcatactacgctaatgatcccaatttcaataaatagggtgtgctcaagttcgctttaagaaaatagatatacatagtaaagaactatataagggtccttcctcataatatgcgaggaatcatttcaacttacaatgtgggagtggccgctaaacaaaagtacccgagtatcgtagctctaccatgaaacaaaccctcaagttttttttccaacaatagttggcgcaccgcttgcgtgcagtcctttgcactgaaatgagctgcgcatactacctctcaagtatcgtatgatgtgccaatcgagcagtcctcgctcctgtgtaaccacggacccaatcagatccaatttcgcaattagtcaggggaaagcaacaccttccctaaattttaagcctctacacggagatataaaattgcatccaatagacgagatttgcattacactccttttgtttccaggattaaaacgtttgtcctatccaacaaagaatagacctataaatg

SEQ ID NO: 642551 - DNA, 110 bp, Homo sapiens
gggcctgctactacccccgtgtggagtacggcttccaggttaaggttcttccagaaggacagcagatcttctttctcgtctcttttgagaccaagattacaccaagtctc

SEQ ID NO: 642552 - DNA, 295 bp, Homo sapiens
aggcaagatcccatgtcatcatctgactcttcagactcctccttcttctcatctttcttctcctctgactgcagcaggtgcagaaccagcaacaggggttgtaaagtcctggtgtgcagcagagacggctacagccccaccagcatgtacactggtaagcttgccaataccctgtgtgatgttgttttccgtgaagtttccattcagctcactgataaccttgttgagccggtcgtcgtccgcctcgatacccacgctgtccaagatcttcttgatgtccttggcccttatcgag

SEQ ID NO: 642553 - DNA, 196 bp, Homo sapiens
tctagaggtatcccccgcggttatgtcttacgcttccttgtgggctaccctggactacgatgtctctcatcacattctactgaagtgatgggagacaaaccagcatatgttatctcttgcactcgcggatcgtgggcgatggccattctactcactaggaggttcatgcaacaggcaccacatggtgcgcccccag

SEQ ID NO: 642554 - DNA, 873 bp, Homo sapiens
  misc_feature (1)..(1): n is a, c, g, or t
  misc_feature (68)..(68): n is a, c, g, or t
  misc_feature (91)..(91): n is a, c, g, or t
  misc_feature (96)..(96): n is a, c, g, or t
  misc_feature (100)..(100): n is a, c, g, or t
  misc_feature (132)..(132): n is a, c, g, or t
  misc_feature (140)..(140): n is a, c, g, or t
  misc_feature (157)..(157): n is a, c, g, or t
  misc_feature (175)..(175): n is a, c, g, or t
  misc_feature (180)..(180): n is a, c, g, or t
  misc_feature (204)..(205): n is a, c, g, or t
  misc_feature (214)..(214): n is a, c, g, or t
  misc_feature (228)..(228): n is a, c, g, or t
  misc_feature (241)..(241): n is a, c, g, or t
  misc_feature (297)..(299): n is a, c, g, or t
  misc_feature (353)..(353): n is a, c, g, or t
  misc_feature (457)..(457): n is a, c, g, or t
  misc_feature (610)..(610): n is a, c, g, or t
  misc_feature (743)..(743): n is a, c, g, or t
  misc_feature (858)..(858): n is a, c, g, or t
ngggggggggcgaggggccctgccaggggaggctgcgcgcgagatgtgtggtgagcgcagtgagtgcngctgtggcgtggggcgagcggcngcganaggntcgcgtcgcgcgtgatggaatgtgagagtgtnctgcggcnacagcgtgggaggattntgggcggcagtcagctcngaggngaggcagcgtcagtgactcccagnnatgggatgngcggggggcacagngctcgagagagcngagcaggccaggggggagagggagagacagagtaggccagggcatggcggtgaggnnntgaggtccctaaattttggtcccaggggaaaggaagaggccagttggtccagtnttgatggctatggggaagggaatgtattagtaagcatgggggagaggatgccagcaggcacctcagaggtgacaggacaggctgaaccccccaccctgacaganaggagcttgagagctctggggctctctgggaatgtcactgctaaaatatatatctacatatatattaaccattcgtgggagggcaggggcaaggcctggggtgggatcagaggatctggcgtggcatcccgtagccagttatgcctgcctganacgccccgcggttggtgcccatctgtaacccgatcacgttcttgccctcttgcagctggttatccgagaagttccgaggattctccttggatttcttagggaacagttggggatccccagaaaagagcccatnatctcgggctactgccagcccacccagattcatcagcgtccgctgcacacaggccatgttctttccttcccagaggtccacagtttggaagatgttagttgtgttaatgccatancgctcagctgcttgc

SEQ ID NO: 642555 - DNA, 298 bp, Homo sapiens
atcgaccatgtattattcttacgcgtttacatcttcatcagagtctcccccctgctagtaacgtaccacatattcgtcatcacagtctgtcttgtcctttctgtcttcagaagtgttcgtgtttcaatagttgatgtccacaggagaggagcttcttttaagtacttttggtgtatgttgaatatttatttgctatgatattctagaagaaaatatcagacatgttaaatataagaaccatgttaaaatttaaatttgctatttcaaaagttactgaagatgtcttggaataacaatt

SEQ ID NO: 642556 - DNA, 158 bp, Homo sapiens
gatcccacgtagcaagacatggtggatgtgagctgtgatttactcactcatcgcagcgctgtcgactgtcactacatcacctgagctatctatggcttctactcttctgcagagcatatgaaggggagctgcattcaagccttacatgcgtacctgca

SEQ ID NO: 642557 - DNA, 136 bp, Homo sapiens
gtctatctgtctagtgtatgtcatccacgtactttgataaatgacagctactctcattctctatagcactatcattatatctatctgtctgtctctctaacttcattgatttacttggagcgtcagttgatctact

SEQ ID NO: 642558 - DNA, 138 bp, Homo sapiens
tggacacaagtggccatcccagcatcccagcatgccagcagctcctagcaggcatggacacaagcatgcttgcagcagtgcgccatgccagccgacgaaatcaaagccaagcagcccagcaatccagcacagcagtgc

SEQ ID NO: 642559 - DNA, 104 bp, Homo sapiens
ttggtctcctacaagtgagattttagatatgttaatcactgccagtctttctcttcaagccaggtgcatcctcagaaacctactcaacacagcactctaggcag

SEQ ID NO: 642560 - DNA, 354 bp, Homo sapiens
atcttcagacagctcgagcaaaaaaataaatcactacttggaattatacatgataccaaggatgtgatagatctccacaaggaaaactacaaaacactgctaaaagagagtactcagtgacacaaacaaatggtcatggcttgtgtgctagtcagtgctgtgaaacttaccgtactgccaaaagcaatctacagattcactgcaattcccatcaaagtaccatgatcattcttcacagacctaaaaaaatcctaaaaattcatatggaactaaaaaagcagcctgcatagccaaagcaagactaagcaaaaagaacaaatctggcgcatcacattcacctgcaaggagaaatct

SEQ ID NO: 642561 - DNA, 491 bp, Homo sapiens
cccgacctcaggtgatctgcccaccttaacctcccaaagtgctgggattacaggcgtgagccaccgtgcccggccagaaaattattcttctcctttaggacttacagtctaagaattgtcagcatttataaccattagcatttataaccaaagacacaacgtaccagaatctctgggacacagctaaagcagtgtgtagagggaaatttatagcactaaatgcccacgggagaaagcaggaaagatctaaaatcgacatctaacataacaattaaaagaactagagaagcaagagcaaacaaattcataagctagcagaaggcaagaaataactaagatcagagcagaagcgaaggagatagagacatgaaaaacccttcaaaaaaatcaatgaatccaggagctggttttttgaaagattaacaaaatagatggaccattaaccagactagtaaagatgaacaaagaaaacagcaaagaaaaaaaaaaaa

SEQ ID NO: 642562 - DNA, 617 bp, Homo sapiens
gaagacgtacttcgccgaaagtcgtcggggtttcctgcttcaacagtgcttggacggatacccggctgctcgttcctcgatccccgggcgggtccgctccataggcctagcgcctccgtcactctcttcactcgcaaccgctcggatctgccccatggagccccgtctgccgctctcgatgcgcctcgcatctaccgtctgacgcgcgccggcatctcctataatcggcctgccatgacagaatcgacgtccacgcatcgcaggtagtcggccaggaactaccatcgaggatctcagagagccgccatctaaccgcacagtatcagaactggaagctctacgacatcctaacgtttacctgttccatgtgcttactaacttgtgaccgcagatgcatgtgcgctttgacagaacttgtgccaaaatactttcgttcacccaatctcatgcaggagagggaacatgcgtgagaaactgcatgaacgctgcaggaaccaacgaggtggccgatatcttccttcagcgatatcaaggaaaccagtactgtgcatgactggggaagagcgggcctgacatgcaatggaggtgtgcattaccatttggcacaaaaatgtgaa

SEQ ID NO: 642563 - DNA, 105 bp, Homo sapiens
tcgcctctagagtatcccctgttccacgagaagcggagcgagctgcaggagcagcagatgcagctggcacttgccatgagcagagaagtggctgagcaggaagaa

SEQ ID NO: 642564 - DNA, 1025 bp, Homo sapiens
gcttttaaccagctgaaatcgacctgcccgtgacagaggctgggcatgatcgacagtcaagacgtagaaggacccgtatggaggctttaatcttctagttaaatgcagaacagatagccgtaatgcaaaggccacagggtccgtaatgactagccaaatgctgcagttaaaatgatttcggcttggggcgaccctcgggaggctgagaccacaaggcatccggagcacgtagcactgcgtgaacgcacgttccaccgagtccaaagcgacagcgtacctagtactcacattgatcccaagtcaagcgttgtaccagagcggtagacgaaggtgtaccactaggggactaacagcgcgaactcctcattgctatggagtccatatcatagcacatagggtttacgcatcgctcggagtgttcggatcaggagatcccggatgggtgcaggcgcgtattgaaagggtgtcgtttgttacaacgattaaagtcctacgtgatctgagttcagaccggagtaatccaggtcggtttctatctacttcaaattcctccctgtacgaaaggacaagagaaataaggcctacttcacaaagcgccttcccccgtaaatgatatcatctcaacttagtattatacccacaaccaccaagaacagggttggttaaaaaaaaaaaaaaaaaaaaaaaaaaaaaaaaaacaaaaaaaaaaaaaaacgaaggagcaaaacacagaagcaagcgcaaaacacaggccaccagcgggccccgccaacacaaggacaacgcacgccgatatgacaaagagggaaaacaagggagccccacaagaggacgcaaacaaacaagaacggaacccagaaaaaaacgcgcgaacaaacaggacagagcagcacagagcacgaagagcagaaggggacacccaccgaaacaaaacaggggaaacaacaacaacaacaagaaaacgaaaaaagacaaaaaacaaaaacagcacaaaacaaacatacaacagaacacacacaacgcag

SEQ ID NO: 642565 - DNA, 293 bp, Homo sapiens
gccgccacagcttgtctgcctgctactatcctgacttaaccttggtctgtatttgcgcgtacaacaaggagttaagcaaagagagagacgccctcaggctggagtttatacaataacagttcattcctttctctactgcttctggtcataatcgaagcaatgaggacctgaagcaggataaatcagaattggatgagaagcttcaagtcctggtgactgagatgctgtggtggccggagaagctgtgtgcggccggagaagctgtgtcggcgcggagacgctgtggcacgagt

SEQ ID NO: 642566 - DNA, 318 bp, Homo sapiens
caaactgcctaagccctccgccattttcaagccctgcagtcacaggtacacagatcacagcttcagccaggagctgggcagaaggccaaaaggctgttccccccaggctgctcaggggtggttttttaggacccttcccctgagccctttatggtgtggcaaagccttcattgccttaactggagccccatcagctccaactggtttgttttttttgcccccaatgctttgccccttaaacaaaaggaggcctgtcctgacctgtttccccatgtacatagctttataaagggcccataaatattatgttatggttga

SEQ ID NO: 642567 - DNA, 333 bp, Homo sapiens
  misc_feature (134)..(134): n is a, c, g, or t
  misc_feature (141)..(141): n is a, c, g, or t
  misc_feature (144)..(144): n is a, c, g, or t
  misc_feature (149)..(149): n is a, c, g, or t
  misc_feature (230)..(230): n is a, c, g, or t
  misc_feature (246)..(246): n is a, c, g, or t
  misc_feature (307)..(307): n is a, c, g, or t
agtcctgatgctcctgggggtagttgctgtagtcatcgcaagctttttgatcatctgtgcagcccccttcgccagccattttctctacaaagctgggggaggctcatatattgctgcaggcatcctattttcantggtggngangctgnatgcatctgggtccaggcagtggctgacatggaaagctaccgaaacatgtggactggctggatttcaccccttctggctgnatggctggcatttttnctggcccactgggatattttttctttgctagctggaatactaattctgggtggtggaccgnataattagatccttactttcctgtgc

SEQ ID NO: 642568 - DNA, 469 bp, Homo sapiens
gcttcgtaactcctctgtggaggtatcctcactgagttagagaacataatgggaaataagggtgtgaacaagtgctgactgacttcggtgggagatttaacagccttgaatagaaagacacaccagcatcctagtggaggagatcatgtgagcatatcacttgcggtgaacagtgtaattatgttaacatcacaccgccttgaaattgtgtcttagagtactaagtttatcaaatgcttgggggattgcatagatgtatttttcattgtaaccaatatttattgggtccctgtatagagacaaggttttagttcatttccaatacattcagaggacggccgctgtactcagcagcacgaggctaccgtgcgtgtactttccactgctggctaaccgtgcactgagcgatctcagcaagccatgtccttcagccgtcatgtggtctgtcatgctaatgaggagcagggaa

SEQ ID NO: 642569 - DNA, 992 bp, Homo sapiens
ctgggggtgaaagggataggacataggggtgcacacaaggggactcacgcatcgatgggccccgaggctggagccgtggcccccaagcccccagggagaagatgtttaataagggaacaaagaggggtccaagccccgttatagaacaaagggtgtggggaaagccactcccaggaaaaagaggggattataagggagggacacctggggaaatagcgtgttcgcccgaaaccactggggttccaagatgcctaattctcaaggaccaaaccgccccctggtatgttttgctgatactgggcgttggtttattgaatcccatgtatagggcttacaaggggtacacctgtgagatattaagagtctcctgggatcgcagaagatctcataggtctgtctcccgccagatgacagatgggtacacaatagttgtaaaaaatattaggtgtcttgaatttccaaagaagaaaaatgtaccggccaaatgccctcggtggactgtattgatatatacccacgcctagaactcactttaagggcgggacttacaccagagaagacggcgttgcgtgtgtacacttagttggtgtggtgtggcaagatattgcttctgaagctcccgacacacacggctctcgaggcgcgtgccacgagaaatggtggctcacaccacaggctttccacagctataacacggttctatgagaaaaccacgtcttgtcgaattacacgttccccctggccacttccctcgtgaagggtggaaccttaagcacgtagacccccacagcctccacttttaagttgcctataagaacttgcctcggcctcttcctcgtgtagttttctctctgtgaagacaccaagaaaatagaaacacatatcacaagagagattggaagatgaagtttttatgatctgcgaacaccgtttgcctcctgtgtactgggttcataaaccagatggattaactggaaatttgtacctttagg

SEQ ID NO: 642570 - DNA, 272 bp, Homo sapiens
tcctgcttttcatcctgttgggtggctgtctcctctcgacagcactctgccctccccacctgtttctgctggtggtgacatgctattctgccgcggcactccagtccacccagcgtcggttcacggttcctcctgtggtttctgacctcccaccacgctccttcgacacttaagctaaacctctgtaacctctgacgacttaaccctacgaccttgataaacttacgccccacatgaccgacgcatttttacgacctactgtgcactccact

SEQ ID NO: 642571 - DNA, 130 bp, Homo sapiens
gtaacgggactctgccagctcagctcgtgccgtctgtgcggttccgaagtctgcttcaatgatcaccaacttacgagccagctcttcatacttcctatcttgcctcttctgcaattgtggcttaggcttc

SEQ ID NO: 642572 - DNA, 421 bp, Homo sapiens
  misc_feature (402)..(402): n is a, c, g, or t
ccaatccctggccaaacatggtgaaacccccatctcctattacaaattacaaaaattacccaggtgtggtgatggtgcatgtcatttcatttcacacacaaaattgttgtggatgcttcaaccttaaaaatccctgcccaggcgccgtggctcatgcctgtaatcttagcacttcgggaacccgaggtggctggatcacccgaggtcaggacttcgagacccggcctggccaacatggtgaaaccccatctctactaaaaatacaaaaaaattagccgggtatggtggtgcatgcctgtaatccagctacttgggaggtgtagacaggagaatcacttgaacccgggaggcagaggatgcagtgagccaagattcgtgccattgcacttcagcctgagtganaaaagcaaaacttcatctc

SEQ ID NO: 642573 - DNA, 155 bp, Homo sapiens
ctacttttccacaggtctgttttccatgcactggtctgtctgcatacttgcccccctgtctgtatgctactagctgtgtttatctgtgacgtgtgcatcagttgttcatttgtgcatgtcagggctggtgtctctgtacttgcctattcttgcgg

SEQ ID NO: 642574 - DNA, 221 bp, Homo sapiens
cagagtacctacttgcatgactacgggatgtgctgccctggggaaatttgacaagttccgaggggtagagtttgtgtgttggccactggctgaagaaagtgacaatgtggattctgctgatgcggaggaggatgactcggatgtctggtggggcggagcagacacagactatgcagatgggagtgaagaccaagtagtagaagtagcagaggaggaagaag

SEQ ID NO: 642575 - DNA, 174 bp, Homo sapiens
aaaaaatatttggtgtgcctataccaatagttgccttgttaaaggtccctggatatgaccagaatatctgctatatttttgggaaggggaccattgagccagtattctatcatggaagtactttataaccttttctgacttgcttgtatattgtttatcagaaaacttaaatta

SEQ ID NO: 642576 - DNA, 440 bp, Homo sapiens
  misc_feature (231)..(231): n is a, c, g, or t
  misc_feature (323)..(323): n is a, c, g, or t
aaagagacgctcgactggttcattcgacttcaccaaccaacgcggcccatcgttccttattggcaggcgctggccgaattccgggaccttggtcgaaggcacgcggggaccgtcgcccgagcaacgctgacgggcaggcgacccgaccgctacggtcaacgcgtcatcgcgtcgtcgccaggtcgatcaggggcgggcggtagggcagctcggcgcccgtcggaatacgtncggcctcgcgatccagcaggccgcgcgatctttccagctgagatagatgcgctgcgcaaaatgccgaaatcgagtttgcgcccggccccccnccagaagcgaccggccgagaacggatcataatgggcattggcgagcagatagacgctcagccggtccgcctcgatttccgcctggcccatcaagcgaccgtttttgccgatctccgc

SEQ ID NO: 642577 - DNA, 152 bp, Homo sapiens
atataagtcatgcatagtagcataacagtacatacccagattccagacatgaaccaagcactatcaaaatagggatcagacattccatcacactttactatatacttagtgaaccatttgccagagtctcttttttatttctaataacttga

SEQ ID NO: 642578 - DNA, 423 bp, Homo sapiens
  misc_feature (1)..(1): n is a, c, g, or t
nctatccatgctctggattaggggtcccgcgttagccaaccagctgtgtcctcagagcttctcctccatggtgtgaaccatagcctgtcaccagacttgcctttgcctgtgcccagcccttaatatcaaagaagatggtgtcaatggatatctcaaatttgcggccacaattctaaagagtgcttgttaacaaagcttgtgggaagaagaatccagtgatccacaagacagctgggatgccatcttggatccaggcatgcagagagtcacaggcgttacggcaggtccttgacccatgatgccagaggcttgagcgatgggtaggccttggcactccagagctcaggcacagtattgttgcacagtatggcagcatatcagctccattagagagtacatcagtcccatctcttagagtgcttt

SEQ ID NO: 642579 - DNA, 235 bp, Homo sapiens
ggggtcttcagcccgttgcgcaactccacgaactaggatagtgtacgacaaccagctggagcgagtgtcacctgtagataccgaggcctccggggcctgacgcgcctgcggatggccggcaacacccgcatagcccagatagcggcccgaggacctggccggcctggttagccctgcatggagctggatgtgagcaacctaaagcctgcatggcccgtgttcgggctacgtcgga

SEQ ID NO: 642580 - DNA, 106 bp, Homo sapiens
ggcgagcacacgtcattatttagtgcctcctgtagcagctcttggttttggcgtcttttgggtcggcccatgtggtttgagcacccatgggagatggagcacccat

SEQ ID NO: 642581 - DNA, 786 bp, Homo sapiens
acagatacgcagaggtcgcttctgctcctggattgttaaggattccaagtaactcttatttggagagaagacgatctgcacttcgacattctggcattgagcatttaattttagggtgcctttatatagaagggagagtagctacatgaatgtgtaagatcttggaggaagacagcagacagagagagagagagtcagagagtcccagggttaaaagttggacgaaatttcagcaagatacatcatccaaatagaggagtccatgatggaggcacaggtaaacttggagaggacaggaagatgtcacccagaagcgcatagctaaaagaaggtcccccccagcagatgccatccccaatagcaggaacggtgaaggtcctcacgcaggtcccacaggagagaacccggctggtgctgacactagggcagggccgcacgtgggccagctggggccgggtgagaatgtgatggagaggaaagaagccggcccggtatccaaaccggaggctgtgtgcaggcctgaggctgggggcatgcacaccgtgtgtctaaaggcgaaaagtgggccaagggtctattaccattcagggggcaatgatgaggggtgccctgggaagggacgccatcagtggagggcctccgggagaatggtccctggggaaaagctggagctgcccacgagacggggggttccaacggttgtcccgccaggacgaccgttcacagcagggagcctcaccgatgaatgggccggtcttacgctggggctccttccggggacacaca

SEQ ID NO: 642582 - DNA, 841 bp, Homo sapiens
cgtggtggcaggcacctgtagtcccacttactcgggaggctgaggcaggagaatggcgtgaacctaggaggcagaggttgcagtgagctgagatcacaccactgcgctccagcctgggtgaaagagcaagactccaatctcaaaaaaaaaaaaaaaaggaaaaaaggaaaaaatttatgggccttttacaatggaattttatacaaaccgggaaaaaaaaagccccaggtatttttttagggcctcaatcgaaggtcatacttggaattatctattactttttattacaaaaggtatttagcctttcaggctttaatattattaggaatggtgaattaacaaggcaaagatggaaattaatgggggcgcttaagacatatctacgggtattaaatttcccctgtgggtaaactttcttttaactacggggattctacttatgggtaacactagttcctgggctcattttattaaaggtaaaattttcttattggacttttaaacagcggggtttttccttgggaatggttccctcaaattacaaaagaatatgaagcttctcaatttttttataacacgtggtgtcaaatattctggatgtgggcttgggagagttgtgttggagcggaagaacggtaccagtaaatttcctgtggaaatgggctatagtgagggggggcgtgtgcaaactcttattttattaatggaattctgggagacctggttttgaaattccttcaaattactattttcgggttaaggagaacattaattattcaaggacaccgttggggacccgtcgaagggtacccggggcaggggaggagaggaattggtcgag

SEQ ID NO: 642583 - DNA, 127 bp, Homo sapiens
tatgtcagggtctgtgctagccgttttagggaactgcagagagacgaaagggtgaagcgtcagtttctttaaaaactattgcataccagattctgtattagttgcttttgaaacttctaaaactagg

SEQ ID NO: 642584 - DNA, 490 bp, Homo sapiens
gtgacctagatgaggcagagaacccaggagcggaggttgagtgaggcgagatcgtaccactgcactgaagcctggtgacacagcaacactccatttcaagaaaaaacaaaaacgaaaaacaacaacggaaaaacagcacagttccctgtggggaggaaatttgacaatctaacaaaattttatataatacatttatcactatactgaacaatctcacttctatctataataacaaaagaaccaaaacaactctagtgtccatacaaaggcgactagttgaatagagtacaaaaaaagatacagtacattgaagctctatcagtcaatgtctacatactactgtgatcttcagcatatatttttaagagaaaagaaatgtgaagactctataatatgctactggttaccttaataaggaaggaaatacaaatatatagatacatatctacatataataagcaagcagggatgagttaggggttctctgcat

SEQ ID NO: 642585 - DNA, 640 bp, Homo sapiens
atagcagcctccccctatggagcccctcgctatcccgacgtaccgttcccccctgaccgccatactcccgccaccgccgccgaacgccatatccgcacggccgtaaccaccgaggaaaaggaatcgtactcgtatgtccgactatccacgaagcctccactcatatcgacccctttgtttgactgcaagtacagcggtgatgacactgctatcctgctggcaccgtgcggacttactatccagtataagaagttcaaccagacgaaaccgcgcagcgaacgcacccctctacccccttaccccttcgattcctccccaccttgctgcacattccgccccctgccccttgtcacctatactctgaacatacacactactacctcacacatcccttacgcatagtaaccacgcgccgctttctcaacgtcaacagaacaacgaacagccaccaacaacacaatcgggcaaacctcgctcaacttgcacgccatccccaggccacatacactgagccaccaaccgcctaaccaaacacaaccacttcaacacagacggctccaccccacaacagaccaacaggaacaccattactaggccccaagttccccacccaaaaacacgcactatcgcccaccagggc

SEQ ID NO: 642586 - DNA, 526 bp, Homo sapiens
aaatattagcttggtgatagtctatgtaatgtaggcttagtgatcatctttatccactagcgtaaaaataagggcttgtgatctgggtagccagagccttcccgtgagggtgaatgtgtgctatatagtccacacggggaagaccacggaggtgaaagggggtgctgtactattagtattcacgcccgatggatggtcacgcccttttactcttgaaatcgggttgccatttgtaatttgttatttgcagcttttgagtgttaactataataggtgttttggtagtttcaggcacccaagcaaagaatcagaaatacggtaatagaataatctcagatatcaggtattgtttgttcaatgttgacaaacaccttaggtacttgttacaaaacaggtagatagaacaactctaggaaaataaagtgtgttgtacatgtagccatttccaggtcaccgaacacttagaaagacgggttttcaatttattcaatcattcaggctgggcagggtggctgtaatcccagca

SEQ ID NO: 642587 - DNA, 622 bp, Homo sapiens
gtggaaaggattgggatgaactggaggaagaagcccggcggaccgagaaagtagttacgaggaagaagaagaacatagtcgaagtatgagccggaagacgaaggcatctgtgcacagttcggtacgtggctctaaccgtggttgcagacacagctctgcacccatcaagataaagaggaagttacttctgaactttggccctgagctgcattcttcctccagccaacccctgctgccatttgtgtatatgggtttaggggggcatttgcgtggaccaatctactcggggaattacagtgccaccaggacacgtgccaatgggcccattcagatggcaagggaggaggtgcacttgcagacagtaggaggctactgctgataataaatattgcttcattcgtctctcttcctgtcaccttctgccaagacattgatggcttgtgacatcttattcggagtctcacagctggatttccaagacagtggtacatggtgacccttagtacccgtatcaatggtcttgagcaagacattcaatccttcagctacgctactgccatgaccttccgacatctttagtttatctttgcatactcacgttctcggagtttgctggctgttt

SEQ ID NO: 642588 - DNA, 262 bp, Homo sapiens
gtcgttcttcttcccatgagcatcgctacagccttatgctaatgctctccctggggaccaagtgttgacactcacgatgaaatcctggagggcctgaatttcaactcacggagattccggaggctcagattcatgaacgcttccacgaactcctccgtaacctcaaacagtcagagagtcagctccatcttaccaacggtcaatggcctgttcctcacacgatggccttaagctacgtggattagtctttggcggatgttaa

SEQ ID NO: 642589 - DNA, 398 bp, Homo sapiens
tggtcattgttaattcatataagagaatcagctcattagtgaaatgaactactgaaacatgtaacaacatagaggcatctcaaaattatcatgctgagtaaaagaagctttctataaaagagtacatactgtatgattccatttatatgaagttctacaataggcaaaactaatctatagtggaaacaactccagcagcaatggttgcccatggggcaggcaaggggcagaggcactgcagtggagcagggcaaatgcgagcaagtctgggatgatggtcatgttctatcaactattaagcataggggttcaggttaagcaggcaagataggggtttaggttaagcatttgtcaacacctcgcttcagatttgcgtacatttgaggtatttaaccttt

SEQ ID NO: 642590 - DNA, 402 bp, Homo sapiens
ttagtatactactaactaaatgtcgggccgcgttgagacattctttgcttcgctgatgatttccaagtaaaaagttgatactttcttgctgtaaatacttagaaatcattgtgcttcacaatcactgaatccaaaagcttcatagctcgacttccttcctcgagaatcttccaaatgtgcataaaaacttcatttcttcatcattcgtgatacctggttacatatacatacacaatacgcatcttttgcacttttgcaacagttatgagtaaatatagccgattatcatgcacaaaaccaacaataacgctattaaaaacatgttcattttaggcgttatcaaattcccccacacttaagttatactcgccctcgagtagggtcgacgcggccgcgaattta

SEQ ID NO: 642591 - DNA, 254 bp, Homo sapiens
actgtgtgggcaattgtatttaaagccacaggattgggcttacctagagaggataatgtccacagcgtgatagggagagatgctgagaaagggtggtcagtgacttgaagagacccatagctgtacgatgtgtttcctgcctgcctgagtataaggtcatcgcggtaagatgagagcagcctctcttaccaatcgaccttggacgcatgtaatcgggtggataatgttctacgtgattattcccagctggagta

SEQ ID NO: 642592 - DNA, 214 bp, Homo sapiens
gtggagcaacactcaacgaatgtaatcagtgttttaaagtcttcagcacaaaatcttcccttacacggcacaggaagattcatactggagaaagaccctattgctccagttaattttgggaatccctcaagcagtaagatcttaccctgcttttcaaaagagatcccaattggagagacccccattgatccatgccttgggaaccctcagcagc

SEQ ID NO: 642593 - DNA, 427 bp, Homo sapiens
gggccccccccggcttcccccttttttccccgcccgtttttttgggggaatgggggggggggcacccttttcccccggggaccggttttgccgggttttgggttttttaccccccccccaaggggatttggcccccccggccccaaatttggccccggggttttttttccgaagggggggccccccaaaaggggtttttttttttttgggttggggggggggcccccccgaaaaaaaaacccccccttgggggggtggacccccccccccggaaattttttttttgggggcccgcccccgggggggttttggggtttcccccccccccccgggggccttttccccgggggccgtttttttttttgcccccccccccccccggaaagcccggggtttttttttttattaaatttttttttttccccca

SEQ ID NO: 642594 - DNA, 108 bp, Homo sapiens
agtcggccggaccgacttttccatacttacttcactgttaatacatcactgattatgttcaaatcgtgatgagaaacctaatactgtaatttgacttgagccataaaa

SEQ ID NO: 642595 - DNA, 571 bp, Homo sapiens
  misc_feature (4)..(4): n is a, c, g, or t
  misc_feature (8)..(8): n is a, c, g, or t
  misc_feature (51)..(51): n is a, c, g, or t
  misc_feature (118)..(118): n is a, c, g, or t
aggnccgngacccggtttggccaatttttcccattgcaacgggcgtttttncccaataccctgggcctccatggacctaggaaataactaactgctttttattttacaggctcataancagaagagacttgcttgtctcagatgaaactttggactgtggacttttgagttaatgctgaaataagactttgggggactgttggggaggcatgattggttttgaaatgtgaggacatgagatttgggagggaccaggggcaaaatgatatggtttggctgtgtccccaccaaatctcatcttgaattgcagctcccatgatccccacatgtgggagggacccggggggaggtaactgaatcatgggggtgggattttcccatgctgttctcatgatagtgaataaatctcatgagatcttatggttttataaagggcagtttccctgcacgggctctctcttgcccgccaccacgtaagacatgtgtttgctcctccttcaccttctgccatgattgtgaggtctctctagccgtgtgaaactgtgagtccattaaacttctttttctttat

SEQ ID NO: 642596 - DNA, 278 bp, Homo sapiens
gagaaatccatttatatacttaatattggtttctagggaatttttttcgagacagagtttcactctcattgcccaggctggagttgcaatggcacaatcttggctcaccacaacctccacctcccgggttcaagcaattctcctgccttcactactcagaagctgaggcaggggaatggcttgaacctgggaggcagaggttgcagtgagccaagatcggaccattacactccagcctgggcgacaaagcgacactccatctcaaatttaaaaaaata

SEQ ID NO: 642597 - DNA, 923 bp, Homo sapiens
ggggccgccactttcctctttctcttccggcgaagccgctccccttgctaagaactggtggcctcccgggaggagagatgggctttgccttgcaaacccgtggcatcgccaggggcgctcccgacaagtgggggtcctccgtggactgggcaacgcccacggctgggtggtgctccagggcgtcctttctccctcgctttcttacctcacgcatcggcctggtcgccgtttcctcgcatgcgccctagttgcgtgaccttgatcttcggtcggccgcgcttgtcccatctcatgcgcctccacgccacgagatccccgtgggcgctcgagtctccgggggcctcgtgtagagtagcattcccgggaacttgcccagtagcgggcgcactcatgctgcatggggctgccactaccagggggccctttggggggtgccccttggccggcccttcgggaagggtgcgcggaacctaactggggctctatgggtgctaggagtgatcggccgtgcccttgggattcattcctcggtctctttctttcctcacgagtctgaaacccggagacgagtaatgcaacttgtgctccagggcatttccgatcgtgctcgccccctaccccaggggttggtaattgggtgcatccgacgtccctatgccccaggtactgggggcgtcaggtggccgggaacccaaccggacatatgtcccgcacggcacaaggtgtgtcctccatgtatagcccctttgcagcacccaggaggccaagactgggccagatggtcgcaggggggacaccatcaacacacaggtgtctggtccaagtgaacacgggtggcgtgtacctgcacacattgtgggcactgagggacagcacccaagcagtggggtgggcccccccgttgagggtttggttgtcagccg

SEQ ID NO: 642598 - DNA, 344 bp, Homo sapiens
agccatcactagagtatcacccggcgaagaacaacggcacgatagccagacagcgcacccggagatactgcaatcatagattcacatatttgtactgtcagttgtgaaggagcagaaggcatctttttcactgttgctgcaaatcttaatatcctttacaatacggactcctgtgtatatgttatactgattctactctgcttttactcctttggagcctgggagactccccaaaaaggctaatgctatcaagagtagaacttagtatctctagactagttatgtataaaacgcctactttcccttcttgcttctttgggatatccccatgtatttagtgatgt

SEQ ID NO: 642599 - DNA, 334 bp, Homo sapiens
aagaatgcgctattgaactccagcctcagtggcagagccagacagtatcaaaaaaaaaaagagtaccaataacaaaagctaatatttaaatagcttgatgtgtcgggcactataatgagtatcttatacttttaacctcattttaatatttacaacaacttcttattgaagtaggcacttacaatttactctgaatttttacaaattgaggaaacttgaggtttaagttaatttggcctgcagttcacacaacctagttaattggtaaaggctagaattatgaatctccaaaccgctctgccctcctgagatagcttgtgggggtcaccgagcc

SEQ ID NO: 642600 - DNA, 190 bp, Homo sapiens
  misc_feature (12)..(12): n is a, c, g, or t
  misc_feature (14)..(14): n is a, c, g, or t
  misc_feature (39)..(39): n is a, c, g, or t
  misc_feature (107)..(107): n is a, c, g, or t
  misc_feature (139)..(139): n is a, c, g, or t
tctgagtctttntnataagcgaactttttaaaggaaagnttataccatgaagtaggaactcaggaaatgtgccaatggttaaaccctattagcttggtactcctagnattccatggaaaaacgctttacaggacttctngcttaccttttctcagaatcaccagccttcttcagcaccacctttttgggg

SEQ ID NO: 642601 - DNA, 388 bp, Homo sapiens
ataggtgagcacaacataattataaaaatgatgccatgaaacaatccaccgcatcagttcagttgtatagttgtccaaagtacatatgtgatcatcaatgcaagaaatatttgtagacatgtaaacacgttatttctagtttcttcacaacagtatagttcagtgggctcattcaaacttggatttttcatttttattcaatgcagatatgttctcttttcattcacagtatgaacttgttgcagcaacactcatagtacatcatgcatttttcaagcagatttatgttctcacttcaacaatgtgcaattgtcacttctgtttcgcatgtggttgttccacttgcgggggcatccgtctcagcagtcgcacctgcaaggcaatgcaa

SEQ ID NO: 642602 - DNA, 244 bp, Homo sapiens
atgggctgatctaatgtaatcacagaggccagtatgtacagacaagtggggaggtttaattactgggcctctccctcctgtgaataaggtctggatgatctcctcctttctggtgccgggaggctgctcttcagggtggctggcgttggcttcctgtggtctaacgattcaggcggggccttcatgcctgggttcagccagggatgcttcttggcggggccataattatggcgggggtcccgga

SEQ ID NO: 642603 - DNA, 1193 bp, Homo sapiens
  misc_feature (1168)..(1168): n is a, c, g, or t
agcgggtagcctgggttccagaaggcctgcttgggaccggaagcgcggaactctcagcccagcagctccttgttggcggcggtccgcgcccccgcccccaactgcttggggttctgcgccttctgccagcaatccggcccctaccgagggccgaagacgccaggaaaagcgtcatgatttgggctcgtaaaatgccacatgccttggggcctgtttctcttcccattccttttgtccactgctgcttgcttcagctcttgtacatctggtcctgttcccgccagctgattttaatgctcagatcctcctcctcttccaggtctccgtctaccttccactacagtcaacttctgagctagcgcattgctgccttgccctgctctggcgctcccacttggatctcgactgacttcgtagtcgtctcgttaatctgtcacactttagtattccgaggatcgtatttagatgccctttgagaaagactttgttcctgaactgctcccttctcttttagggttggactactataatacaattctcttgtgtacattctagagacccttcaagttacaacatttaataatgtataattgctattactttgtacgtgtattcaggctgttggtgtgattattttcgattacttatctttgaagttatggacagtttcctttttccttgagaacagggtctcctcctggcggcccagggcttgggagtgcaagggatcataagttcccgggcagcgtttcccaacttccctcagtgaagggcgccaagcgaatccttcttgacgctcaagcgttccccgagttaattaggagtaagaggggatttggcgccacaatttcgggttagaaaaccgaagtttgttttgaaaccacttttggagacgacgagcgacttgtgggcggggtgtttgtgacacccaagcgacgcggttcgaggataaaacctcgtggacgctcaaagagcacacccacttggagaccttgatttcccacggaggtgtggtgaactgtgcacgcgaaggtttgagaccacctgtccggggtccatgtgaggtggctctagtcaatgaccactttcagagaggagcatatccacgctagattttgcaggctgtagaccatcgaacttgtggtgcaacgctgtcggggtcgaccanacggagtggaggtacactcaacata

SEQ ID NO: 642604 - DNA, 1477 bp, Homo sapiens
  misc_feature (110)..(110): n is a, c, g, or t
  misc_feature (651)..(651): n is a, c, g, or t
agagtggatatgtaagacttccttatggtgctagacgggaaaggtgaagatatctgtcgcgggaaagagattggtgctccagtctctgtggaataacgacgccatgaccnggaagtgaactcgtcgaactagtctcactcacaaggcattacgcggcctctagattgactgattcgcacattaagatacggttgttcgacgtcactatgcgtattgtcgtgatctaaaaattatagagtgtgcgtttaatatagtgcttagctcgttagctcatggttgagtggcacagtatgcttgtgtatggatcgtagaggattcgtttgcatacacgaaagcacactgaggtaactaggggtagtggtaccaactcaattaggacattctcaaagttacaaaacagatcaaggcgtatatagaggcaaaggctcaatatattacatcggttgccggaagatagttgacaagcgaagaatgagttatcgcgcatccttgttaaggtttgcaatagaattcgtgtttaattgtgggcggatccatagttgttagtgcgtcaacgttcaatcggccgcttctaaacgtagagtgtgggtgtgtctatgcttctgaacatgacgatggagattgcaacgactctgtttggcgtcaaacagnccgtttatggacttcgcggatgatactgacgcaatttactcaatcattgcaatccccaaattcaaaagaagtggcgcccaacagttcttcaagagccacttcgtggccactactaccttacaatcgactttttccaccaggagtctcggcaatactaactctcctatggctacaaccacaaatgttcaaccatatggggaacaccgaaaaaaaaatgctcaagacatcgtccttgggggtggagggctaaaattgccctccaagcccctcggactccattggtgctggcatcacgggccccctaaaacgatccggagtcggttcggaccccattttggtgacaacctatgttcaactagcttggcttgggtccctcggccaaagtccatggttacccttgggggcactctccagttggtgtctgtaactcctcgcggcttggccttatctgtggaattcaccaaaaaaacgccccttgttgtacaaacagcatttgcgaggttgccctttaaaaccacttggcacttttggcaaactcgtgtttacctgtgtgtgtctgtggaaccgctcgttacagttgagccttccatcttcaggggcggatggccaccatatactttcgggaataaaatgccctttgtgtgttctacagaaccgtatggccatcaaatgtaatgtcctttgacatgtcccgaacattaaagggccactctacacatacgcagggcataatcttaatttcacacaaggcaccttattgcgcgtggtgatacctatgcaaatatgaagagcacttaagactttggccgcgccttcactttctatg

SEQ ID NO: 642605 - DNA, 337 bp, Homo sapiens
tccataagatggggccataagatctatttcattaattcattcaacagatatttaccaagtgtgtgtgatgtgccaggtgccgggtcaagccctggaagtgaacaaaaccagacacagaccctgcctaaatggcaccgtgtggtctcgtgggaagccagttaccagtcaaagaatcatgtaactaggggcacagctgtgaccatggtcgatgtggtgctgggagtgtgcaagtcaggagacccagaaggcttcccctgggaggtgatgactgagcgaagggatgaaggaaaggtcaaaagtaagtaggcaaagggggtcaagagatttccagccagag

SEQ ID NO: 642606 - DNA, 906 bp, Homo sapiens
  misc_feature (881)..(881): n is a, c, g, or t
gagccgcgggtgatcgtagctcggaatggcgggtctccgtctaccttccactacagtcaacttctgagctagcgcattgctgccttgccctgctctggcgctcccacttggatctcgactgacttcgtagtcgtctcgttaatctgtcacactttagtattccgaggatcgtatttagatgccctttgagaaagactttgttcctgaactgctcccttctcttttagggttggactactataatacaattctcttgtgtacattctagagacccttcaagttacaacatttaataatgtataattgctattactttgtacgtgtattcaggctgttggtgtgattattttcgattacttatctttgaagttatggacagtttcctttttccttgagaacagggtctcctcctggcggcccagggcttgggagtgcaagggatcataagttcccgggcagcgtttcccaacttccctcagtgaagggcgccaagcgaatccttcttgacgctcaagcgttccccgagttaattaggagtaagaggggatttggcgccacaatttcgggttagaaaaccgaagtttgttttgaaaccacttttggagacgacgagcgacttgtgggcggggtgtttgtgacacccaagcgacgcggttcgaggataaaacctcgtggacgctcaaagagcacacccacttggagaccttgatttcccacggaggtgtggtgaactgtgcacgcgaaggtttgagaccacctgtccggggtccatgtgaggtggctctagtcaatgaccactttcagagaggagcatatccacgctagattttgcaggctgtagaccatcgaacttgtggtgcaacgctgtcggggtcgaccanacggagtggaggtacactcaacata

SEQ ID NO: 642607 - DNA, 1112 bp, Homo sapiens
  misc_feature (212)..(212): n is a, c, g, or t
  misc_feature (322)..(322): n is a, c, g, or t
  misc_feature (324)..(324): n is a, c, g, or t
  misc_feature (365)..(365): n is a, c, g, or t
  misc_feature (412)..(412): n is a, c, g, or t
  misc_feature (476)..(476): n is a, c, g, or t
  misc_feature (489)..(490): n is a, c, g, or t
  misc_feature (528)..(529): n is a, c, g, or t
  misc_feature (583)..(583): n is a, c, g, or t
  misc_feature (598)..(598): n is a, c, g, or t
  misc_feature (603)..(603): n is a, c, g, or t
  misc_feature (610)..(610): n is a, c, g, or t
  misc_feature (627)..(628): n is a, c, g, or t
  misc_feature (646)..(646): n is a, c, g, or t
  misc_feature (653)..(653): n is a, c, g, or t
  misc_feature (692)..(693): n is a, c, g, or t
  misc_feature (700)..(700): n is a, c, g, or t
  misc_feature (703)..(703): n is a, c, g, or t
  misc_feature (730)..(730): n is a, c, g, or t
  misc_feature (748)..(749): n is a, c, g, or t
  misc_feature (753)..(753): n is a, c, g, or t
  misc_feature (765)..(765): n is a, c, g, or t
  misc_feature (779)..(779): n is a, c, g, or t
  misc_feature (792)..(792): n is a, c, g, or t
  misc_feature (805)..(805): n is a, c, g, or t
  misc_feature (809)..(809): n is a, c, g, or t
  misc_feature (823)..(823): n is a, c, g, or t
  misc_feature (849)..(849): n is a, c, g, or t
  misc_feature (858)..(858): n is a, c, g, or t
  misc_feature (865)..(867): n is a, c, g, or t
  misc_feature (869)..(869): n is a, c, g, or t
  misc_feature (876)..(879): n is a, c, g, or t
  misc_feature (883)..(886): n is a, c, g, or t
  misc_feature (925)..(925): n is a, c, g, or t
  misc_feature (934)..(934): n is a, c, g, or t
  misc_feature (937)..(937): n is a, c, g, or t
  misc_feature (942)..(942): n is a, c, g, or t
  misc_feature (956)..(958): n is a, c, g, or t
  misc_feature (972)..(972): n is a, c, g, or t
  misc_feature (975)..(975): n is a, c, g, or t
  misc_feature (1018)..(1018): n is a, c, g, or t
  misc_feature (1022)..(1022): n is a, c, g, or t
  misc_feature (1027)..(1027): n is a, c, g, or t
  misc_feature (1029)..(1029): n is a, c, g, or t
  misc_feature (1111)..(1111): n is a, c, g, or t
cgcggagtccgcccagtgcgcgttccctgcggcctgcagcctcggcgaccgggacccgccggcctctctagccgccgccgccgccgcctcgatggtgggcagtcgcacgcagcctccagcgccaggagggggcgccaggcagggcctgtcccgcctggggagactgcgcccgggataataggagcgcttggcctctgagactacccggcagnagggacgtccccaaatgacactcggaggccgcctccctgggctccggtgctcggtgccgggaggagcggcacggctttctacacaccgcactcaaggtgcgccaccgttntnttcatgggcaagcaatcatgtgtgttaggcagacaaggcgnggtgggttccatttataagggaaataaagaaaaacatgaaaacatgncattccaaacatgcaaggcaagaaaggaaagcaagtgggtcaattgcatgggagggttaaaaanatagttcatggannaggcgcagcaagtgcgcatcacagccatggtcatttcnnaagcacattttgggggaggcatggaggcagagcaagtatcacagaaagtcaagnggagtatcaaagacnaatcnatgcgcnaaacaaagggtgaaacnnacaggcatcatacataanaaaatanaaaaaaattaagcatggggcagtgggtgggcgcagcgcnnggaaagntcncaagcatacatatggggaagggatganggcaagaaagaaatcagnnttgnaaaaacaggggnaggcagggagggtntgcagggtggagnaagaagaatcagngcanaatttgcaacatcnaagcacatgggcagacatcaagcagnagtacatcnagctcannnanatcatcnnnnagcnnnnaaaagaaaaaaaatcatgctttcaaggtggggggaggcngacaaaagnganagggnggcattttcaagcnnnagaacatggggggntcnccaaggggaaagaaaattcaaaagaatgggcaggtgtttttanggangcacntnagcatccatttggacaaaaattaagataaaaaatggtttagctcatttaggggggaaagaaacaggaaaaagggcctcatcna

SEQ ID NO: 642608 - DNA, 209 bp, Homo sapiens
caaacttatactaattcaggcaagatgatgaagggcagaacaatctgtgagtggtctctttctccagcaaactttctattttagaagagctaaattgtagggttcatgtctaaaattctcccttggggtgggagtaggtgagtacagaaacaagtaaatacaactctgcattgccatgtgggggagaaagctaggatacagtagggaga

SEQ ID NO: 642609 - DNA, 364 bp, Homo sapiens
aaattaactggggaaaatgtttttctgttctccatttcccttaagtttgtttttagataccccgcattgcaagtatgtgtgggacagtaaaatgttgctaattgtatttgcgctgataacatgccatttgctgtaggtcagtttcctaccccctcccccaactattcctagccagtgggagcatgcttcttacttccaaaagggtgggggggtgtgtgtgtgcgtgtgtgtgtgtgtgtgtgcgcgcctgtgtggatcaacaatgtgatcctaaaataaaaaaatgacatatatttgacattatttacatactaaatatgggagcccataaatcaattacagaataaaatcaatttttcaagga

SEQ ID NO: 642610 - DNA, 242 bp, Homo sapiens
  misc_feature (35)..(35): n is a, c, g, or t
  misc_feature (43)..(43): n is a, c, g, or t
  misc_feature (235)..(235): n is a, c, g, or t
  misc_feature (238)..(238): n is a, c, g, or t
tctggtccacacgccaccggagaaggggaatggtnaatatgangacatcatcataagatttagagcagtttcagtgctgagacaaacgtaagataaaattgggtacattccattgccaaggtaaaaggaagggaaaccaaattccaataaagcccacagcacagcatacctggggaggggacaggagagaacgaaagccttcttagaagtgtgttgatggaagccttctccggtngcntggt

SEQ ID NO: 642611 - DNA, 213 bp, Homo sapiens
  misc_feature (11)..(11): n is a, c, g, or t
  misc_feature (20)..(20): n is a, c, g, or t
  misc_feature (67)..(67): n is a, c, g, or t
  misc_feature (132)..(132): n is a, c, g, or t
  misc_feature (142)..(142): n is a, c, g, or t
  misc_feature (151)..(151): n is a, c, g, or t
  misc_feature (158)..(158): n is a, c, g, or t
  misc_feature (168)..(168): n is a, c, g, or t
  misc_feature (173)..(173): n is a, c, g, or t
  misc_feature (207)..(207): n is a, c, g, or t
  misc_feature (211)..(211): n is a, c, g, or t
ctttggagccngccccaggnagcgtgtgtcggtcgcctaggctggagaactagtcctcgactcacgngcaaggatgatgctgaaaggaataacaaggcttatctctaggatccataagttggaccctggggngtttttttanaaatggggncccaggntcgccaaagnatttnctgctcacctagataaccaggttccagttggggntccngg

SEQ ID NO: 642612 - DNA, 452 bp, Homo sapiens
ttgtaatccagaaagggtgggtgtgtggataggcgtggtgcagtgtgtggatagaccgtggtgcggtgtgtggatagaccgtggttgcagtgtgtggataggccgtggttacagcgtgtggatagaccgtggttacagtgcctggataggccgtggttacagtgtgtggataggccgtggttacagtgtgtggatagaccgtggttacagcgtgtggataggccgtggttacagcgtgtggataggccgtggtaacaagcgtgtggaataggccgtgataacagcgtgtggatagcgcgtggtaacagcgtgtggataggccgtgtttacagcacttgtcggatgggccgtaggttacagcgtgtaggatagggccgtggttacagcttgtggatagcgcgtgttcacagcgtagtggattgcaccgttggtcacagcattgtggaataaga

SEQ ID NO: 642613 - DNA, 1421 bp, Homo sapiens
tttttgtggggcgttccttcgttcgttgggtggtcgttacttactcttgtgttgttgtgcagctgtgttttgtttttttgtcctcctccctcctcgatgagattgttggctcttttgtctgttaattgctgttttgttttgtttgtccgctctatttgttgtttgtggtgtacttttgtgtgtttgtgtggtggagggttgcgccgacgtagtttgctctctctgtctcgtggttgtcgtgttgttgggtacgtcgtctgcttcgtttcgtgcttcgctgtgtgtttgtttcttttctctttgtttgttctcttacttgtttgttggtcctccactcctcttcgtcttcctgttgtgtagttttatacttattactcgtttgcgctgctctgcactgctgcccgtcacccgccgcgtggcgggggtggggtggtggagcactcacacgactctgcgcgtcttcgtgtgtggtgtccttcgctcctcctctgctggttctggctctgttttgtggtggggaggtgcgtctctactcgtcgctccgtcccacctgcgctgtggtttgtttcttcttctgtgtagtatgacccggctccgcacacgtccgcgccgtcgtgtggggtctccgcacgcgtgtggtgcgctcggcgaggtgggtgcggctgcttcgctgccgcttgcgtcgtctgcatgtgcttcactccggcactggatcgtcttcgcggcgtcttgtcttcgttatcttcccatctacctcgtcgtcttctacgtccgtcgtctgcattctcttccccttctcggctgcgtgctcgtttgtggtgtgtgtgtttgcgtcggtggggagtgtgtggttgtgtgtcgttgaggagaacgcgcgcggtcacgctcgcgcgcgcgctgttgtgtcttgggtgtgtctgtatagatgagatagctgtgggtgtgaggtctctctctctcctccctcgctcgtcgcgaggcgagagtttcgcggcgctcctcctgctgcgtgccgctcctctctctctctctcaggcccctcgtccgctgctcgtctcccgactcgcagagtgtcgctccgctccctcctcccactcccgacttatcagtaagcgaggctgtgagggatgctcgccgcgcgcgtggtgggtattcgcgctgttaaggtcgctcatgctgtgtcgaaggagatagtggtggtgcggtggttgtatataagtagagtagaacagatcgactacaaaatatagatcgtgttggttgtgttttgtttttcccagctctaggagttgtttgagatatagagaacaacatctgatagcccagccggtgataacttgtgttgtggtgcacacacaacctccccacaatttcacaactctggttgtatttttataaaaaaaaataaaagatataaataa

SEQ ID NO: 642614 - DNA, 804 bp, Homo sapiens
gaagataatgagaaagttagacagctgcttctggagggtgtgcctgtggaatgtacgcatagtgtttatctggaacgcatagatatctgtatagagtgtcatcagtagcaatacaatggtctcgggatcacggatttcaaagccggaatgaggagtgaattgctggtgccatgggtcagagcttaattttagggtccccatgaatccatatgatacctatacttttcgattcatgcagccgagggaaaatgtgacgtggtggaaagatcggacgtaggctggggaagtggcgtgggatgtcgcgtactcccaaagggctggtggctatggctttctggattccattgatttatcgaggtgtgagagtcggaggggtggaaacgagtactgggaggtgcacttcgtcagatactaagaggtcgcgctaagtgtcccaggcgaattcctccaggactggcccatgtacggcgcatgcctgatcttgcaggaaagcagcagagtctagagtaaatcgttcctattcaatacaggtacaaacagatcgacctcatccatgggaaaaatcgggccgagcgtacgattcaagcgttggcgactctggtcgaccttggtcatggtgtccctggggagtcaagtgtaacgcaggactgggagtcaagagtccaggcttacgaagaaccttctgtaggttcatctccaaaatggtaaggagagtgacctaagaagatctgaggtgccttgtgctcccatgcctagaaaaaactcatcagcatctgatgaagtgggcacatccataagagcacc

SEQ ID NO: 642615 - DNA, 655 bp, Homo sapiens
tcctaatgattgcgtaacgtactatgagaaagcacataccaagggcagcatacacgacctgtccaaaaaggccttcgatgcagggttatcctatcaattacgtcataagcagtgacttgcccaagacttttctgagcactttaccactcgagaatagcaactattgacgaattgggagggcactggactgacaacagacctcagccggctccatcgcttagaagtaccactcctaaacacatgcgtgttactcgcattaagagtatagatcacctgagctcactcataggctaatagataacaaccgatgccaactagttcaagcactgctaattagcaatgaactggatcaatatcatacccttctacaatccgtacacatctacgagtgtgcctataccatttgcgacggcgtctactgctcaacatgttatgaatgcacaggctttcacggacttcacgatgatatcggctcaactttacttactatgtgcgtcatccgacgacttatatttcacgatccactgatcatcactttaggtatggacacgtcgtctgaactgacattatatagatgaggggtgcctattggagctgtcatcatataatgtgggcccattcgattgtagcattcagcaacttgataaatgggccg

SEQ ID NO: 642616 - DNA, 160 bp, Homo sapiens
aagctataccaccctacttgtcgcatacttagttccacaccgatgattttatatacggggctatcaccctctatggccggactttccattccgttctattatcaaagatgctaaatcatgcaggctcttcccatttcgctcgccactactttgggaatct

SEQ ID NO: 642617 - DNA, 1351 bp, Homo sapiens
  misc_feature (1061)..(1061): n is a, c, g, or t
ggggtgccctggcccccgttccaggagcgctagagagtgctacggggggccggagaccttgcccgggtcgctgacccaccgtcacctgtgattcaggggctggaactgcacgcaatgcagagggcgctgatgtacccacaatggctccccgtgcgctcgagtcacggcggagcaccaccggacagtggagctgaggctaccgctacaatggaacggtgatgaagtgacacgtatccggatcatagcgacccatggtgagtgcaagctgttgtccctcagagagagtgcatctcgtcaaggcattatttgaagacgaccctagatggaatggacgagagttcccgggcttgacgtgaacagaagatttgtcacactggtgataacagagttgttaaggggcgagcctgttttggcaacgaggttcccaaggactgcgaagctcgaatctcaaggactccggagaaatgaaacgggcgggaatggaagcaatagctgcacaggggatcacatcgggatggcatagcattcgccaatcgcaaatcttctgtgctttccccttcccattgttggtctatcactttttcgcaaccacacacttggaccattgtatgcattctacaagtgtacaaggaacctcagaaacttggtccaacaaaggcaattctttccaacaagcgatgtctcatccctttgtcaagttggccccccgagggtttggaaccaaaaggcccgagggcaaacaccaaggttccgcaaggaaaagaggcctttcccaaagtctccaaggtttgcggcgagcgccattcccgttctttgtaagagttttgcacaaccgctggggatcaagccgtcccccttagaacgagggaagccaagtgaaaaatttccaagccccaaaagaaggggaaggccaatggcaaatgtgcgccaaattggccccaaaatttggccaggacttaggggagcggccttaggagggacgccacccacattggacccccccaggattcggagaaagtggaaaccggggcagaaaagccttagaaatttgctcccctcgnccctcggccaaaggccggccccatttggtggaaggaaagccaagcgaggccttggagaggttggttagagtgagtaggccaggagaagagagaaaggcccagggagacacaagaagagggagcaaaagagagttccagttgtgcagaacacacaagccccatttgggggggacctggaaaattgagagacgcaccttgagaaaggtttcgcaaagagcccaggaagacgtatggggggaaatttctcccaagaagtgaggttggccaacgcaagaaagaaaaatttggag

SEQ ID NO: 642618 - DNA, 271 bp, Homo sapiens
cctccgtctcagaccatatagggtaacttcttgaatcttgtcgtgacatgtataaccccgtcgtggttctggtacgagtgcacaggcacgatgatgcggattgtcacatcttgtctctattatggttacggtgggtttaggccagctcctatcactgcaacctgtatgatcaccaacgtctttctgactggtattttgtgctgaccttctatgtcatcctgtgacttacaatgccttaaccatcaggaaatgcaggccactgcttcagagt

SEQ ID NO: 642619 - DNA, 106 bp, Homo sapiens
agaggatcttcgctctcaccacccagctaggcagatgtaacacttcactctgaagaagcgccaggatatggtgggggtactagcacttgggatagatgggtccgtg

SEQ ID NO: 642620 - DNA, 166 bp, Homo sapiens
tgggatggacgtacgtgtacacaggcagagtagttgatctcacgcaatgggtgatctcacaaaaatggtaagtttcttatgctcatgagccctccatttttttttttaaatttggtgcctgacatggacttaaaaattattatactccctgggcacatataaggag

SEQ ID NO: 642621 - DNA, 324 bp, Homo sapiens
  misc_feature (4)..(4): n is a, c, g, or t
  misc_feature (161)..(161): n is a, c, g, or t
  misc_feature (303)..(303): n is a, c, g, or t
ccgngagtgtgccactgcactccaccttggtgacagagtgagactccgtctccaaaaacaaaaaaaacaaagttgaactataaactgaattcctcccaaggttagttcagcctatgccctggaatgaacaaggacagcttggaggttagaagcaagatggngtcaggccagatctctttcactgttaacattttctcagttataatttttgcaaatgtggtttcagtccctgcatccataatacctagaaattttgataaatacttgttaaacaaccaaaaataaaacatccacagcaaggantcgactataaggcgttggtgg

SEQ ID NO: 642622 - DNA, 647 bp, Homo sapiens
ggaacctacccacctcctcaagggtacccctaccaatgatacccacacgtacggctggcagggtggacctcaggagcctcctaaataccacagtgtatgtggtagaagacctaaagaaagagatgagctaggaccatcgcacctgtcctcaccagtcctgctggacggctctctgattgcgtgcatgtctctggtgacatgctcagcactgaccatggaccagacccagtccgatcctgtgcctgaccaggctctagctgccacctctgacaggtgttggctggccccatctcttctgattgctgttaccaaatgactagctttgctccgacacctctaccttcagcactatgggattctagatctaatgggggttgctactgtttacatctcagtgacttgatcgtttttacatgtccaaacatcctattctcgttataagatctttagaagatgtgctaaatgactttgtgggccacaaggcttagttgtgaagaagatatcatttgtacattcatacattcgaaggtcatggggcacaatgtggacacatcgaatcatggcaatgcattctctctgctaacagccgcctgtatgtttcaatgacaatttgtccgagagtctcacacaagccttacagaatgtgg

SEQ ID NO: 642623 - DNA, 898 bp, Homo sapiens
gcaaagagtgtgagatgtgagattgtatagagatgaagtgtcatcacatcatgtgcatggtgcggaacctgctgttttatctatttattgtgccgtgtttacagttttttgtacactgtaccttcattggttcctgtgctgtagtaaatgtgttaggtagctgtggactccttggtattttgtaaatggtataacataacttggttcccctctgggtccttgagttttctgtgtatcatgtgaaaaaaaatggtgacatacatacagaattttacaaaaaaaaaaaagggcttcagtttttttaaaattggggattgtcctattaagggggatctcccgggtctactatcatttaggaccaggtaccaggctaaaattgagtctcttgaattcttccatccccaattggcccacaaagcggggggggggtttcgggtactaaaagcactaatataatgtggctgctctgagaacagcccagtagtccccatttccttccacaccaaaaggtgtcaattcagtatgcaatggagtccttacaagtggagttaatgtgggtctggccctttttttagcacaaaaaaatgggtcctttttatggccgaatgtttaacaagacttcatccttaactggttcttacgaaaagggatatacgggagaagcaatgcaggaattgcttgcagggtttcatcatcccggtttctacaaaaggcaaggcaggttttccctttgagagattctccagagggtggaaggcgaaaccccaattcgggtgctcccttggaatttggccctctttgtggaagagtgttttacaagcacacataggttgtagacaattgaagccgcaaggaataacttagggttaccccggatgtggagtccaaaccggtattg

SEQ ID NO: 642624 - DNA, 168 bp, Homo sapiens
tggtgcagcggaactgctgcaagctttcttcctgagggcagatgacatcatcggattcaggcccttacccgccgacgacagatctgctcgtatcagaagccgggcgtgtttttggatgccatcaatgatgctaacctcctggaagcatgtatctaccgcccgctgaag

SEQ ID NO: 642625 - DNA, 502 bp, Homo sapiens
cgcagggggtttctgtgagggggcaggcggaggttgaggaacccgcagataagttttttcctcttgggaagatagagcttaatacaactacttcaaaaatatagtcaataggttactaagatatggcttagcgtcaagttttacacgtaattttaatagcttaagatttcaggagaacatatgaaagacttagaagagtacgcatgaggaaggacacagactaaagtgttcctacaaaacatgacggaggttgagactgaacgcttcttcagtggcgtacaacacgtgttttaacagacaaccttgagagacgggactacaagagccccgaattaataccaatagaagggcaaggctttaagattaacaatgaaggtgacttaaacggtcttaaaagttacgttcaacaagtggtaggtgattaaacataattggaaggcgatcttttaaaaaggagattaaacggaaggtgttaaaaagaccttgaaatccatgaggcagg

SEQ ID NO: 642626 - DNA, 320 bp, Homo sapiens
aagctgattgcaaatcaaactctcactgagaatccatcatatcttcagcctcacttttgtttattttcacaaccttaagctagtagcttccaaattctattctgtaatactcttgagctccaactctgatctttcagggaaatctatttttattcagtttgtttcttgggatcacaggtaagagttctttgggaaaggattctcactggagaagaaattgaaaataacattaaaaaaaaataaataaaatactttctgcagttaaagaaaactctaaaaagctaaaaatagttaaattcagaagaaatgatttacaacgt

SEQ ID NO: 642627 - DNA, 968 bp, Homo sapiens
gcgccatagagctgcgtgctcgggcggtgccgccctgcggcggaccggcccgattctcggcccccggtgtggcaatgctccccggtgggcgcgggtatgacgccagccgatcctgaactgtgtaccatgctcgcactagtgactcgtgccggtccgggtcatgggagaactccagtggcgggtcatcagtgggtctcggcgggccaaattgagcgtgcgtgacattttcgcttccaattgtaggcctacggtggagcgccatgaatgaatgaaccttggccgatctgggatcaatgcctttgtgacggcctggagtcatcccgggatggtgagtcgcatggctttcctgtactaggtggctggaccactgtggacaaacgaaaacttgatgtgcaaaagaatgcccaaactgccgtgcaccgaaggcgttgctccggtgcatttgggtagggcctgcccgaccctggggcccgacgggttggttgggccctttccagaggcagcagcatgatgtaaggtgccataggacatcccgtttccatgggctggctagctggacaaagcagttgaggacaccgctatcagtcacggcttgggtgcccggagttgggaggcctgaggtggtggcccagagaagggcttggctccaattggtaattgagagaaacttgaagctggaaccttgtagttgcctcgcagccaaaaagaaaacggaccgaaccaggaacgccggttgggggttagacttggttggcccctttaccattgggaaacgaggtagggggcggccagggcatcaatagtagacagacacactaaacccattatggggagaccattgcacattatggcaccccccaaagagggcacgttcagatgacgccacagtagtagaacagcagagaggaatgaaattaggagaaagcagagagaccgcttgcacgattggcataggacagacgaccagg

SEQ ID NO: 642628 - DNA, 220 bp, Homo sapiens
ggggggggcccccccgggcccccccccggggggggggcctttccccctttttccccctgggggggggggcccccttttttttccccctggggcccccctaaaaggggggggggggggccccccgggggggttttttggcccccccttttcttgggggggccccccccttgggggggggggggggttttttttctttttaattccccccggggccccccca

SEQ ID NO: 642629 - DNA, 156 bp, Homo sapiens
cacgaggtgcactctcattgacacgtttgatgaacatgacggcccattgagatgcattgacttccataatcaccacccactgttcgtctctggaggagatgacaataccactaaggtttggaattacaagcttcggcgctgtcttttcacattgct

SEQ ID NO: 642630 - DNA, 116 bp, Homo sapiens
gcgcataacatcttttatcgaaactttttctgcagtcgaatgcgttctctctctttctgtttggcactcttaggcaggatctgcaggttgaactgcaacatgttccgacgatcttt

SEQ ID NO: 642631 - DNA, 188 bp, Homo sapiens
ttatcgatgccacctaggattcatatttaaactatgtaaaatcaaacatgaacaaatttggaaagaagccagaaaaaacctcccaacaccaacacctgtgcctggtagctggaaccaatgatagagaatgacatccacctctctctcagagaaccatgtgtctggagagaaggtggcatcgataaaca

SEQ ID NO: 642632 - DNA, 131 bp, Homo sapiens
  misc_feature (9)..(9): n is a, c, g, or t
  misc_feature (19)..(19): n is a, c, g, or t
  misc_feature (44)..(44): n is a, c, g, or t
  misc_feature (70)..(70): n is a, c, g, or t
  misc_feature (106)..(106): n is a, c, g, or t
cactccagncctgttcccncaactggggaggtaggctgggagcnaaaggagagggtgggccccagttttncgtggttggtttttattaattatctggataacagcnaaaaaactgaaaataaagagagaga

SEQ ID NO: 642633 - DNA, 159 bp, Homo sapiens
gttacgtagggtatctgcgtagtgaactacctgtggccagaaataccgtggcggctttcatgatttcaccatcatggtgcgactggcattcacgtgttccctgcgcctcgtagctggcctgcgcatctgcggtggttataacctgtcacaacgtatgag

SEQ ID NO: 642634 - DNA, 427 bp, Homo sapiens
aattagctggagtaggagtctgggagtggagacccagggaaacagcatgagttcacaggtgcttactcaggaagtcaggacatttttggcctttggcttaacttccagatgctcagtcggcttggggaaggactgaagggcagctgccaagacctcagttacctcctgacctgagggtggagagtggcaggaagcaagcatgtttgctgtgcacttaggaaaggctggtgagccagagggactgatcaggccccattcactctctactcattaaaaggtcctgagccacgaagcgcttcccattttgaactttctgtcctcacagattctgtttgacagaatctaagggccatcagggaactcttttcatcttgcaaagagaaaaagccagtctttccagaataaatattcatctgtttgaaataaa

SEQ ID NO: 642635 - DNA, 528 bp, Homo sapiens
tcggaccgtccttcatcatacctaccaagggagaggatttcggagtaccagaaaatggaaacctggccgggcgtggtggctcacgcgtgtaatccgagcacttcgggaggctgaggcggggcggatcacctgaggtcaggagttcgagaccagcctgaccaacatggagaaaccctgtctctactggaaatacaaaatattagccggtgtggtggtgcatgcttataatcccagctactcaggaggctgaggcaagaaaatcacttgaaccccgtccttcatcatacctacctatcttcttcttagttcttcctttcttcttccttcttctttcttcctcttcttccttctttacttcttttctttttcttcttcttccttattcttcttcctctttcttcatctttttctttcttctttccttctactttttcttcttcttctttcctctgtcttcttcttccttctcctcctttcttcttcttattcttctccttcttccttctccttctttttcttcttccgtct

SEQ ID NO: 642636 - DNA, 941 bp, Homo sapiens
ggaagaagccgagcggactgtggggcctgctcagcgtgcgggagtgaggcgatagctgcggtggcgacagcgcgggctgggatgaaccgctgatggctgagtgcagcgtgaggtgccggctgcgcgggcccagtgagactccctcgaatgcggcatgccacctgttctggggctttgcctctgagccagagccctgcccccgcgagcctcccggaccctttgtgcggccggaggctggggctgggaacggcatggctggcaaatgtacctgggtgggagattacgtctatttttgagaactcttccagcaatccttacctggttagacggctcgcggagctcaacaatgactgcacaatggcacaatgtggaggcaaaggtcgtctgtcttttccggcgcagggacatacctagtagcctcaacagcctggctgatagtaatgccagtgagtttcgacgcggcactccaagcagccaggggtgtcctgaggcagcagcgccatcaactgaagcaccggcgaactttgctttctcggccagtttgaatcattaccagccacccacataccgggggaccatgcagtgtgaccgtcttgaatgagacagatatcttgagccaggtactggaaaaggaggactgctatgtctatcagatggtgtttgaccccgtgcacgaggacagttctcgcttgatcagggcgaagattagagttgttttgaagataccgaggcgtgagattcgcgagattcggactacgtagacgggaagaactcttgaattaatgtggaaacacggacgaacgactggacgaatgagaggagtctgtgtaaccaaggaagaagatgtgctaaaggaacggagaaaaatggcaacaggatatgttgagtgaggggcactgacgattatggcggaaacatttggacagagagcttagatttga

SEQ ID NO: 642637 - DNA, 548 bp, Homo sapiens
gatggccacatagtctcgtgggacattgtattcttcagctaatctataaaatgatgtttatttttaactgagctgtgtttgccacactcatcactgcacaaactgtgagcgcatggcttgggaattttgccagcaagtgcatgtgacaacatggccaggatgttgacgccaccgagggaggcacagcctttcgcccacccaacccctaccccccagatcgctagtccttcttcctccatggctccgttttaagcgggcacatttcacagattaaagactacatttcccagcctcccttgcagtgaggtgggtcgtatgactacgttctagccaatgggatgtgagcagctgtggcaacacaacttttgggaggcatccttgaagaagaggccctgcctcctttctgctggctggagtgcagatgtgatggctggatctggggtgccattttgagccatgtgaacgaaaagcctatccatgaagtctggggctccctggccacccatcccagcttcattgggctgagaagtacactgtgttttgacacc

SEQ ID NO: 642638 - DNA, 385 bp, Homo sapiens
  misc_feature (13)..(13): n is a, c, g, or t
  misc_feature (385)..(385): n is a, c, g, or t
cacaatggatatnataaaactacacggagggactccagccaactttcttgatgttggtggaggcgccacagtccagcaagtaacagaagcgtttaaactcatcacttcagataaaaaggtgcaggctattctggtcaacatttttggaggaatcatgagatgtgatgttattgcacaaggaatagtcatggcagtaaaggatttagaaatcagaatacctgttgtggtgcggttacaaggtacacgagttgatgatgctaaggcactaatagcagacagtggtcttaaaatccttgcttgtgatgatttggatgaagctgctaaaatggttgtaaagctctctgaaatagtgaccttagccaaagaagccccatgtggatggtgn

SEQ ID NO: 642639 - DNA, 234 bp, Homo sapiens
gactctacaggatcttagtacatggcccgtgggtggggttcttttaatgccttctcctataaatgggggttagtattgatagttagctggtgtgtgtcgtggtgtgttattattctgaactttgggggaggttatatgggtgtaatagttcttttaatttatttagtggggaatgatggtcgtctctatggatatactacagctcatggctcattgagtgcagtatcctgcagg

SEQ ID NO: 642640 - DNA, 845 bp, Homo sapiens
gctcccctctcttctgtgccgagttgatggtgctcgtgcgaacaaagtggccgtgctcaacccatcccccccggggtgttccagaccatattaggcttttatcagccccccgcgtaaagcctgtcaggacacgctgaagcgttttcccttaggtcaacccgacgggaaaaataccctgtgcccccctatgcgaacaccgtagttggagcgcgctcccggttacctcggcccactaattgggaacaaggagcccatgtatcgtccctgtcgacgaagtacagaggcaccccttatggtatgggcaccgctgaagcatttccccccccgtattttggccccaggagcccaattcgcgccacagctgtccccccagaataccccagattagacccggaccccatgtgccaggaaacgtcctgccactgtcacccaataactgtacaacgggagaatttaaacccattcaccccattgtcgccactatgccacttaatataaagcatatggaatatcttatataggagttaactcttaccccaaaggagggaggaaaatgggtgtacacccccccaaacaccgcctggtggagtgaaaattatcggaagatatttaatacatggaacaaataacaccccgtttttcactggagttgtgaaaactaaacagttggtagatattcaccttcttccccaagggaaacttaacagcgatgccactccctattcgaacactttcgcaaaaccctttctttgtctgcaggaagattacatacaaagtaatcctcaaactacagtggggtaatcgtccaatgaagccccccaacattcaccaaaccattttgagaa

SEQ ID NO: 642641 - DNA, 457 bp, Homo sapiens
tcttatcactctttttgctctgttctttgcagtagtatgtcccctgagcacttgctttggcctcaccatgtcttctattagttcacaggtgcttactcaggaagtcaggacatttttggcctttggcttaacttccagatgctcagtcggcttggggaaggactgaagggcagctgccaagacctcagttacctcctgacctgagggtggagagtggcaggaagcaagcatgtttgctgtgcacttaggaaaggctggtgagccagagggactgatcaggccccattcactctctactcattaaaaggtcctgagccacgaagcgcttcccattttgaactttctgtcctcacagattctgtttgacagaatctaagggccatcagggaactcttttcatcttgcaaagagaaaaagccagtctttccagaataaatattcatctgtttgaaataaa

SEQ ID NO: 642642 - DNA, 151 bp, Homo sapiens
cccttgccctttttcccttttatttggggggaatggggggaaatgggaaccgggaggtgggaggtggattttggttatttttttagcccatttcccggggggggaatttttttttaatatgtgtcctgaataaagttttttttggaaatta

SEQ ID NO: 642643 - DNA, 386 bp, Homo sapiens
tatttatgtttttaactttaagtcaggagtacatatgtaagatgtgttagtttgttgcataagtaaacatgtgtcatgggtgtttgttgtacagattatttcatcccccaggtattaagcctagtatccattaggtttttcctggtcctctccctcttcccacctttcaccctccagtaggccccagtgtgcactgttcccctctatgtgtccatatgttctcatcatttagctcctacatataagtgagaacatgcagtatttggtttcctgttcctgcattactttgctaaggataatggcctccagctccatccatgtccctgcaaaagacatgatctcattcttttttgatggctgcatagtattccatggtagaaccgact

SEQ ID NO: 642644 - DNA, 655 bp, Homo sapiens
agcggagtcgccgccgacgcggttcctcgcctgcctggccactcttcctccatcagcctggctggcagcagccttggactccgcccgtggagccctgggcctgttgacccaccagcttaggagcacccaccaagctctgggtcaacgtggaggtaccaggccaccatgctcagtctcaagctgccccaacttcttcaagtccaccaggtcccccgggtgttctgggaagatggcagtcatggtctgtgctaccgccgctcccacacagctcgtgctttggactgtgtcctcagtctccttccagagtgaccaatcgagacggtcaacaatctggagctcacttcctgcgccaacctggtgacggggacgagctccgccaccagtgtccgcggtccttgaggctcagagcggggtatcccagcgcgggcaagggaccggtccaaggtgccccacggggcctgcacgccgtgcatgtcgccgggggtcctgcggctggccttgatgcaacgctgcccagccagcaggtacttcctgtggcaggctcctgggcgctaggccgaggcggcccctggctatccgtagcggagcacgtaccactaggccagctgctaggtctttcctgcttgcccgccttgcctcgtaccccttcgacgtc

SEQ ID NO: 642645 - DNA, 258 bp, Homo sapiens
gtggctatgtataagcagatattatctagtaaatgtaaagtgaacccaatcgatagacccaaaaagtgttttaactggaaaacaccttatgaggtttattttgatgaagtgttgcagttggtttgataattcaaggcattaaggcaatatctcaatcaccgcattttccacaaccggccacaaaacagctcgtctatttcgaggtcagttacggcgtccagtctttgagcagatgatttgccccgagtgatcgtcggc

SEQ ID NO: 642646 - DNA, 119 bp, Homo sapiens
gctcgaattcaagcttctaacgatgtacggggacatgatgtcctttcttttctgactttccagttgactgaacctggaaaaaagccgcccacaccagataaagaaatttcggaaaaaaa

SEQ ID NO: 642647 - DNA, 405 bp, Homo sapiens
  misc_feature (34)..(34): n is a, c, g, or t
  misc_feature (362)..(363): n is a, c, g, or t
  misc_feature (398)..(399): n is a, c, g, or t
  misc_feature (401)..(402): n is a, c, g, or t
cggttaccccctggcagaagaagaagcctagttnagtgtatttcaggatagggcccaagggaagctgtcatttctcctactaagtcctcattgtggaaaagcccacaaatgtcccctagtacagtaataaggaaaaaaaggctgagcgtggtggctcacacctgtagtccccaggactttcggaaggattgcttgagccccaggagttgcagatcggcccaggacaatataagaaaaccccatgtattagaaaaaaagaattagccaggcgtgatggtgtgggtctgtagtctcagcttgggaggctgaggtggcaggatcgcatatagcccaggagttcgaggctgcagtgagccatgatnncatcactgcaccctagtctgggcaacagagtctcnnannatt

SEQ ID NO: 642648 - DNA, 344 bp, Homo sapiens
gacagagctcagcattcatcagaccgagatgcgcggtatctgccttccggtagacaccgtagggcatcaagttactaatagtccaggtacctcgagacgtccatcttggctcgagcttgcattaacacttggcaatggtccataaacagcgcgtccttaccagtaggataaaaggatcgtcggaattcttgtgcaaggcatgagccttaatgatgttgggcacggccgagatgtcatcagatcaatacgtcaatgcgggcctaagaatggcccagggtggtatgagaagggatctgcgcctggtgtcagtcccagagttcgtctctaagtttgcggcagtccac

SEQ ID NO: 642649 - DNA, 150 bp, Homo sapiens
agctttgtgctagtcctctctggtgctgtgtccggcctggctgtagggcgacgggcaccatggatgcattgtgtctggggctgagcaggacttgcggttgcctgggccctttgagcctggatgcctcctggaggtgtgactcctgcgtct

SEQ ID NO: 642650 - DNA, 293 bp, Homo sapiens
  misc_feature (109)..(109): n is a, c, g, or t
  misc_feature (184)..(184): n is a, c, g, or t
gtaagtattaaggctagtcttatctactgtgcaaaggttcttataagtttgaaaatctagctcttgcaggccgggcacggtggcccacacctgtaatcccagcactttnggaagccaagccgggaggatcacctgaggtcgggagtttgagaccagcctgatcaacatggagaaagcccatctntactaaaaaaaaaatacaaaattagccagtcgtggtggtgcatgcctgtaatcccagctactcaggaggctgaggcaggagaatcgcttgaacctgggaggcggaggtt

SEQ ID NO: 642651 - DNA, 1050 bp, Homo sapiens
  misc_feature (288)..(288): n is a, c, g, or t
gacggagctcgtagtttcccggacgggcgctcccggctcgtggctcgcttccccaatacaatcccacgggcagcgggcgcggtccccgtaccccaccagtgccgggcagggcacgccacctttcgcggtcgggcccgcgggggggggaacccggcgccgaccgggccggaaacgcatggcggaacgtgtccggggctaacaagaccaacggggcgggggagcagcgggctcaaatattcggctgcctcttaattcccgcatccgggtcaactcatgcaggaagcttcnccccagaagggtggttccagcaatcaacgtcaggaaggcgtgggtgcacacggcccaagggccacacggacgcctctgggtccaagtgcctttaggccaaccttattttccgtacaggacaacggggaacggtggggacacgcggcaacacggaacccgctcgtggcaccttaacagggggtttgtacgctaaaaccaagtgggccacagcacagcacacggacaccgttttcccagtgtttgtggcaagattattattcacccaaacggacagaatttagcgtaacgtgaacattaccctgtgacaacttgcttaagcggcggaccacacggggggcaacgaacggattgacggcagcttggccagtggtttatttgacaggtggaccattgcatgacaacctgactcctctacacaccacagatggtgctttaccacacactgctgggaggagtaccgtctggaccaatctcccagtggttctatagtacacaacgcaatggccggtttagggatttagttctcaacaggaggtccagggggggaatctagcaggggtactaccagccgagattggatactattgtccatgcactgaatggcgaggataagctccagaaggtgcttcttgaaggtcacccgtagtatgatacgagaacagcgattgcgctctggatcacaggacgagcaataaatatttacagattcacgtaaatgcggcgaatcatatggcatctacgcccgacgtcaattctacgtca

SEQ ID NO: 642652 - DNA, 295 bp, Homo sapiens
gtggcaacagctcagcccattcaaagagcaaggattcaggaaaggcacactgatggtggggagcctcttagagcctctaatgttctccaaaacagagttgagagtcggagtccagtcgtcgggcccactattcctgaataaggacatgcagggccagagtagcttgactctcgcctaaatatctgtgcctttgctgtctttctccactctactgaaccggacagatcccgcttgcttctgatgaggaggtagtaagaggttggaggaaaagcacagagcagctcgggtagagagg

SEQ ID NO: 642653 - DNA, 364 bp, Homo sapiens
tagttcttacataacagccttttattttattttgttttatttatttatttatttatttttgagacagagtttcgctcttgttgcccaggctggagtgcaatggcgtgatcacggttcactgcaacctccgcctcccggttcaagcgattctcctgcctcagcctcccgagtagctgggattacaggcgcccagcaccacgcctggctaattttgtattcttagtagagatagggtttcttcatgttggtcaggctggtctcgaactcctgacctcaggtgatccgcctgccttggctcccaaagtgctgggattacaggcatgagcactgcacccagcctacataacagcttaatcaactgttc

SEQ ID NO: 642654 - DNA, 244 bp, Homo sapiens
tctgatagacttacgggcgggtatggactaagtaaagtttctatactgttaggaatgggcaaaacattcagatattggataactgaagatgggtttaagaaacccagatatcggctgggtgcagtggctcatgcctgtaatcccagcagttggggaggctgaggcaggaggatcacctgaggtcagcagatcaagatcagcctggccaacatggtgaaaccccatgtctactaaaaatacagaa

SEQ ID NO: 642655 - DNA, 1199 bp, Homo sapiens
gttgtgtactgtgtttgagtcgaatatatgttttgtattaacggttggtgtgcttgtattttttgtgttcgattgatgttgagtgttgttaagatgatgtcttgtagcgttgattgtgagttttatgtttttttgtatgtggatgttgtgtataatattggttgtatgtttctgtagaggagtgagagagatggttagtagaagagtgatactatcagaatgtcttttggtttagctatttgttatagtagtattgtgtgtaggaagatggttttatgagtattgttgtgcagtgggtgggtgttgtgttgccttttaggtggttctgtttaccgcggatggttttggagatcctaaggttgctgatgggcagtcttactagtgtggctaagcgggtggttattgcttgcaagctgcttcaacaggatatattactagtacttagacctctcgaggaagtacaccgcttgcgagatgtatgttcttagaggtttggcattagctcgcactagcaattatgttcgttcaccagactttaaatggattaacgttcttatggctctttaagcagtccactcatctactcattcttcgagtctacacttattgaatgcctgctaagatctgaagtatcacgatttatttgtctttggatcaccacctatgacatagtaaacttgaagaatataaactaccctcagaaatatttttaaaagaagtagcaaattatcttcagtataatccatggtaatgtatgcagtaattcaaattgatctctctctcaataggtttcttaacaatctaaacttgaaacatcaatgttaattctcttggaactattgggatttgtgacgctctcgtctgctagtttaccgcataccaagtatttgaaaatatagtagtaatcaactgaaatgtttcacattcgcgttgttagtagtgtaatcatcaatgaatggacttgcttaagctgattacgcccacctgtgggaacacaaagttaggattcgctacgtttgttggactctctttcctgacttttaacaatattaccatcccattctctgccctgtgattttttcttaaaagcttattcaatgtgtctgcagcattgtgattgtatgctggaaatcacctgcttttagaatgctctttctcatgatgacggcgcataattgttgaaattccgcggggggttt

SEQ ID NO: 642656 - DNA, 370 bp, Homo sapiens
gaggtacccgagcccccggggtataggtgacagtgcctcccagctgcgtccaggttacggataaggctagctagagcgcctagtacatatggcactgctggatcagctaggccaggttctcctacactacacaccattccgaaggagagatagtacgagcagcatgacccggatcttgtcgtcggcagagcaccgcacgacgtccaggagcaccggaacgatcgagctacatggagtccttgatctatctccccctctgcgtcggaacccatggccaggtacctgctccacactacacagattactaccaccgagcccttgaagtgcttcatacaatacatctgctagatgacaggtgcggtaacatact

SEQ ID NO: 642657 - DNA, 640 bp, Homo sapiens
cgcggatggatcacggcctggtaatcccagctctcagggaggctaagaggcgggaggatagcttgagcccagagagttgcgagacctgccgtgggcaatatagcgagaccccagttcctccgaaagaaagagaaaaaagaaacagaaaataagaacaaaacttgtgtggagggcgcgcgtccttgggaggcttccggaaaaaaggtgttcttaaacacaccatatgtgcggttgagggggcgaggggggccccaatttgaggagtaaaggagcaccaccgtgggcgccgcatacacgcggggtcaccccaacaagagagagagaacacgcggggggacacagagagaccagaagagcgcgcggggggggatgtctcccacacccatatactcaaaaaaaaaagcgcgccggggggggggcaccaccgacgaagagcgttctcgtagcaaaccaaactttctcacaagagattgggagagcagctctcaatgggaaagggtcacaatttagccgggggggccctctctattttcaaccacagggggaggagtcttacacagagggcgagaaacactgaagagaattttttcaacattttatacgcgccccgagagtcgatgggggtggggagcacgagaac

SEQ ID NO: 642658 - DNA, 938 bp, Homo sapiens
  misc_feature (1)..(1): n is a, c, g, or t
  misc_feature (194)..(194): n is a, c, g, or t
  misc_feature (196)..(196): n is a, c, g, or t
  misc_feature (233)..(233): n is a, c, g, or t
  misc_feature (236)..(236): n is a, c, g, or t
  misc_feature (239)..(239): n is a, c, g, or t
  misc_feature (298)..(298): n is a, c, g, or t
  misc_feature (611)..(611): n is a, c, g, or t
  misc_feature (620)..(620): n is a, c, g, or t
  misc_feature (631)..(631): n is a, c, g, or t
  misc_feature (645)..(645): n is a, c, g, or t
  misc_feature (676)..(676): n is a, c, g, or t
  misc_feature (830)..(830): n is a, c, g, or t
  misc_feature (877)..(877): n is a, c, g, or t
  misc_feature (924)..(924): n is a, c, g, or t
ntagtgattcttcatcttacataggagcacaataaaatacaccacaatctgaagaaactccagaattacgggagtaggggtggggaaaattcaaatgggctacaatatccattaccttaaactgcaagagacaaggttgcgacccgaggttaacatttatgtatttatgactggctacatttatgacttaaaantnacagggatcggggattggatatgggggggggtggggnggngcngttttgtgggggggggggttcgtcagtaaggggggaaaattactgggttccaaattggngggtaagacgggctcccacggcggatactgggggggtgggggcgggggtcattagctgggggcttggtactctcgggggggtgggcctttctggtggcgcgcgggctgggtggttggggtctgctcgtcgggtttgtggggggggctcgcgagtgcctcggcgggtcccgggtggtcgggtcggtgtttcttggcgcgcgtggggggttgcgggtggggttttcgggtggggccggggggggtgtcgtggcccgggttttgggcggggggtgtggcgcggctgtgggggtcctgcgtgtcggtcgcggctgcngtctttgcngtggctttccngtgcggtggttttngggcgttgtggcggggcgccggtgatcgtcnggtcggacaacacaaacacatttatttcaaattcctagaaggttaaaaaaaggtcagatactgatgctttatgcatgctcagggccagtttataaatactccattcagtactatcttaacacaaatctgcatcagtgaaaagaaactggcaaantccacctcttgccattcaatttgtcagatggtgaagaccaagaaagnatgttccatcagtttcattttttaaatacgattgtcaattggggaantgaatgaacacagt

SEQ ID NO: 642659 - DNA, 274 bp, Homo sapiens
tctcagaaggctaccttactttcttgaacacacatgcattatgcagcagtaagaggacacggcgagaggcaggacggctgttgccgtgggcacggtttctggtcctggcccttccgtgctcctgaggccccttcctatgggtgccagcgaacttctttctagggtggcctttcccactgtggagtggcagagcccacacagtgctggatcacacagtagaaatgtgaaggccaggattgggcaagggtcattttcaaagtgctaggataagtag

SEQ ID NO: 642660 - DNA, 326 bp, Homo sapiens
agaggaccaactctttaatttttagtaaaacctggaggtgatgggccgggcgcagtggctcacgcctgtaatcccaacaccttaggagtccgaggtgggtggatcacgaggtcaggagatccagcccatcctggccaacatggtgaaaccccatctctactaaaaatacaaaaattagccgggcgtggtgacacgtgcctgtagtcccagctactcgggaggctgaggcaggagaatcacttgaacctgggaggcggaggttgcagtgagctaagatcacgccactgcactccagcctgcggacagaccaagacttcatccccccc

SEQ ID NO: 642661 - DNA, 394 bp, Homo sapiens
  misc_feature (382)..(382): n is a, c, g, or t
gatattttgttggattctgttagccagtattttgttaaggattttagcatctatgttcagcaaggatatcagtctgtagttttcttttttggttatgtcctttcctggttttggtattagggtgaggctagcttcatagaatgaattagggaggctttcttctttctctgtcttgtggaatagcgtcgaattctgctgtgaatccatctggtcctggacttcttttgttggtaatttttaaattaagatttcaatcacactgcttgttattggtctgttcagggtatctaattcttcctgatttaagctaggaggattgtatttttccaggaatttatccatgtcttctaggttttctagtttatgtgtgtaaaaggtgttncatagtagcctt

SEQ ID NO: 642662 - DNA, 407 bp, Homo sapiens
gggtccccggaaattcggccattatggccggttggttttaaaggtttttgccaggtttttggaatttaaacctggattagccggatttaaggtttttattaaaacggggcattccgatttatgcattcccattccattggtggttcccgagggtcctagggaagggcacttttttgaagctggggggttaatcctatgtattaaagggttaactttaaaaggaggctgttgccatcctttggggaggctgtttttggttaggggcagtagggcctccgtttcctagggataaggctccaggtttatgaccggttaaatcagcattcattttaggaaaggcacctttagtttcaaggatccttttaagcttttaaatggaccatttaacctattcctttaaataggac

SEQ ID NO: 642663 - DNA, 109 bp, Homo sapiens
aatgccccgatatttatatccgccagattcgagtacctcccatcctccccctcctctttctgtctaatcaatcctctcttaattaaatggctattcctaatctctttct

SEQ ID NO: 642664 - DNA, 177 bp, Homo sapiens
agataaacgtcctctatcaccatttggagtctcccttttctccaggatcttgatcctggtccccaaaaccagagtgaatcaaaagagcttcctcccctgaggcaaagtggatttgtaagcagttctgaaacatcacttactcaaaagagggaacgatgtattttgatgagtgcaaat

SEQ ID NO: 642665 - DNA, 611 bp, Homo sapiens
tttggggcaaaatcctggcaatcgagagctttccttcaaaccaaaccggtcctggccaatcttgccccgaggccccaaggtgggcacccccccccaagggctcccccgtgttctatgttacgcccacgcccccggaccctgttaggcttgtaggcaccacaccctctgcgtgtttgcgcccaactcacaaaataggccctgacaatttctttggaggcccctctgatcccgcctttggggcccgcgatctcgcgacagcctcgccccaagagtaccccctctggtcgagtcgcgggacacacactcttgagaaaaacttttgacactttgctgttttcatgttgtcttacacgacgccaccgtctcacacttcctctctgctagtgctctctcagggagaccgtcacccccgcccacacccgccttcttgttgtgcaccacctgacgacctccaaatatcttgcggttcttccggcccatgttccctctgtggcggcgcccaagtgtttgtcactctttgttcccctccaccaccacggatgttgggtgtgccagagagagttaatatttcataggaatatatagcggaataatacaaaaacagaacaaat

SEQ ID NO: 642666 - DNA, 114 bp, Homo sapiens
cggggtctcattactgagtatttttctcgggaaatcctggtaatcttgaaggaagggacctcaaaattatgggcatcgtcaaagcatggtgggtggtctttttttactggcggc

SEQ ID NO: 642667 - DNA, 139 bp, Homo sapiens
actcacgcctgtatccaacactattggaaggctgaggcaggaggatcacttaagcccaggagtacaagaccaggctggggaacatagggagacctcatctctagaaactcacaggtcgcatagcgcctgtggtctcaga

SEQ ID NO: 642668 - DNA, 707 bp, Homo sapiens
  misc_feature (33)..(33): n is a, c, g, or t
  misc_feature (37)..(37): n is a, c, g, or t
  misc_feature (103)..(103): n is a, c, g, or t
  misc_feature (115)..(115): n is a, c, g, or t
  misc_feature (489)..(489): n is a, c, g, or t
  misc_feature (567)..(567): n is a, c, g, or t
ccgggtaagaaatgggggtggagtctcacggangtcncccagactcgaggtggttgctacacaggcttgatcattagtaccccacagcttaaacccccggggnttcagtgatccntcctgcctcagcctcagaaccacaggaacatgccacattgcccagctttgattttaatccaaaattatcccttaacttcccacaactaaaggtactctaaataaacatcagttcctgccctgatatgaccccaaatgaacctctatcagacactgctgatgctgtagagtgcgctgtccaaagctagaggtgcactagccacatgcagaccttgcctgtgtgaggcccacagtactgcatatgaccctggctgccagcaacttgccaggttggctggggagggtagacaagttaaaagcccatgtttaggactctggtaattaataactagaaactattacaggaaaacatgatggggatgctctcctggcttnggggtgggtcaatgaggtttctacaggaagtgatgtagaatgcgacctagaagatgagttaggcttagcaacgaaaanggggttggaagaagagtggatcatgcaaagacagaatattggcaaaggccttcaggcaaaagacaggtgcttgctcctggaattgaaaaaaaggtaaatgtacttgaagaatagtatgaggagtgacaaaaaccaaggtt

SEQ ID NO: 642669 - DNA, 360 bp, Homo sapiens
cgtgctcgaggggagcgaggccgctccaggaggtgggtgcccgcagaggggcggcgagggctgccgggacggttcacgcagcggccagcagactggctgcgtgttgcaatgtctggtggcgtttgcagcatcctgtccgtgtgtgcagctggggtaacctcgggccggcggaggagcgcgtgtggctcgtaggccctgcggccggaggctgctggcaccttgcatctcatttacagctccgggttcagccacaggtcagcggcgcccgtgacatcacggcgtctgtttacccgacgggtctgggcaagaagcggacggtcccggagcgggagggggaccccagcagctcgcccctgagtt

SEQ ID NO: 642670 - DNA, 208 bp, Homo sapiens
aggagcagctgctagacaaactatcccactgaaatggaagggtgaggagcacccggtcctatgtattcaaaatgtgagagggatggcacgtgctcccctaaatgtctgtgagtaacagaggatatgtggaattcagccatttccaccacacaacaccttgctgccaagcacagccagctggtctgtgttccccaaagtgatccttctg

SEQ ID NO: 642671 - DNA, 1375 bp, Homo sapiens
tgggtgttgtttttagtgtgttgttgctgacgtagatggattttggtgcttcctgtattgtctgtggtttctttgtgtctgccttttggtctggtttgtgtgtggtcctttttgttcctggttttgctggtttgtctcattccttttatggttgtctttgtcgtgggggtgttttgttgctgatctgtttgtgttgtccttgctcctctttttggtcttgttgtgttttgtgcttagtgctttgtggtttcatttcaatctctggtgcctgtgggccgcatgtgggtcttgcttgcttcgcagtcctggtggtcctcttgctctggccggttgttcatatgtgttctggttgtgtggtgtccatctgggaccggtgaatgggccgcttagttgtgtgggtcgtgtgccatttgtggggtgttagtgcaccaggctgttcatgcgttatagatgtatgtgtcctttcgcccgtgggtcattggccgggcttgtcgtggtctcttcgtgaggctatcgttgtggtcgtcgtgtgtagggctatgtccactggttgtgtgtatgatcccgtatgggttgtggcgccttatggtgcattgtgggctctgtttggctgcatgctgtgggggccccgtcgtaggggcttgtgtgtcatgttcgtggtgggcatctggatacgtgctgtcctttgctcgcgtggtggtatggtgtggtgccctgggtcatggcccgggacgtgggcatgcgccgtgatggcgcggtactgtgctccttgtgtgccggtggctgcccgtggcaggtgtccgccatggcagcagggttgttagccctgtctcgctgcgtgcggcggcggtgctccatgttgacctctgtgtaggctgttcccgcgctgtgcctacaggatatcgcttcgctgaggcgcgtggggtatcgtgtatcggggcagtgtgccagcctggtactcctatgtctgctaggcccctcccttgacttcgcgtgcagctctccgtctaagtatctgtttgtctgtgtcggctggtaccgccagtgtcggcccgttggtttggtgcagtcgtggcctctgggaaagggtgtacgtgcagctgtttgatctcctagaaatagctcccagaaacccacagttttgatcaagcaaacccaggatgtaatagccctgtcttacggtctggtagttcatacagccagcagactcagctcttggctgcgggcgatgcccagggcacagtgaaggtgtggcagctgagcacagagttcacggatatcatagggtccccgggaagactgaggacctggactgcctggctagcagtagtgtgcggcctgaggggtcccggtaaactgcggtgggagccttgcg

SEQ ID NO: 642672 - DNA, 314 bp, Homo sapiens
acaaactgcccccactgtcaccttgtgttaccatttactcgctatatgagggagcctttatgcaattatagttttctttacgtagagcctatacatttatagatttgatattctttgttacttatagcttttttgttagctattgaaacgtgaccttccattataagtcgcatattatctgcatataaaaagtgattgacttcacatactttgtaaatggcagccttaagtgaatttactgtgtttttggaacagcattttagtattttttccgaagatggccatagtatctgcaggtaatgaagactttctca

SEQ ID NO: 642673 - DNA, 445 bp, Homo sapiens
cagatgatgactgcaaagcgaaggcctaccgggcagctggcgatgcccgttctcttgatctctctcttatcgcgcgcgcactctctctgaaacactcccctgcgtacccgggttctggcaaacaccaattgattgactgataatctgataaagcaacaaaagatttgtcccaagctgcatgattgctctttctccttctctcctgagcctctctccatgcccctcatctcttccttttgtcctcgcgtctctcatccacgtcttccaaggcctgatgcattcataaattgaaaccctccccatatccccttggggagcctatgcccttcttcagcccggatggcttctccttcatttagggttgaaaccatcttgtttgtcatctttatttcggctgctagggtgggttccaatccctttccccgggaccttcttgggagggaca

SEQ ID NO: 642674 - DNA, 264 bp, Homo sapiens
  misc_feature (79)..(79): n is a, c, g, or t
  misc_feature (97)..(97): n is a, c, g, or t
  misc_feature (107)..(107): n is a, c, g, or t
tactactacattcgcggccgcgtcgaccagaatttgagtgatgtgtttgattggttctctcaaatgtatggatatgaanaatccaacagtagtaatnggaagggggncggagctcggggcctgtgtggttgtccataagtcagaaagacatggaggagaaccaaccagtaaaatcacagacttccttcattataaacacatcgtgctgacaacatcaaagagccactccaagctctaacatccgaaggaggactttgagagtta

SEQ ID NO: 642675 - DNA, 701 bp, Homo sapiens
ctgtgagaaaggatataggtccccaatgcccccccaaccaccttagggcctcgtcgtatctatatatgtccccccgctcccgttaaacttggggttaaccccccccctctcttggagaaatgcggggtgagaaatttccgacagacaaccgcggcgggctaatatcgtctgaaaaagatatgtttgtatcacgtgagacagtatctcacatctacatgtgtgcgagaaacacaatacaaatttgtatataaacaaaccaccatcactaaaaatgtatactcttctgctatataactccccaccctcctcttattaggatgtgtgtataaaaaataatatgttgcctgcacccgccgtaatacacacaccatcttgttttataagagaagggagacagagaaaacacaccacatggggttccgaattgacccacatataccactcgatacacatcttctttcaaagatttttccaccactacttttgttttttacgcctctctccctcatttctctaccactcttggtgataatggcgaaacttatagttgcactctctaaggtatgtaacaggtagagccgctattgaagccgcaccacacacactacaactttttccctcggactgcgtctctcagaagaaagctgcaatgttcccacgttagccccccttcgctgaaaataaaaatccaccaaaatcca

SEQ ID NO: 642676 - DNA, 137 bp, Homo sapiens
actagcactaatacaaaaagggacacagcatcaagcagcagcaatgcagccccaaacgcttagcctagccacacccttacctgcccattttactaccccaggcagcaatgtgctattgaaacttctaacaactcagg

SEQ ID NO: 642677 - DNA, 1523 bp, Homo sapiens
  misc_feature (77)..(77): n is a, c, g, or t
ctgagtcattctatcaagtaaacttggtaatccatcgtccgcagtagcgtcgactcggatctagatcgagatactcntgctcgaccattaagtggcgagttgtcaattcgaagcgcgcttagaagcccaccgcacttgttatgctagccctttagcgtcatgtgacctttcctagttactacactagtccatctattgtctaattcaggtcgtagttcacacgtcaaagaccaacagtagcgtcaggtctctgaacgcactcgcgtacattaccttctactgcagagtcgatcttgctaaatgtacgtgagttcctgaagaaaaattgggccctgggaggtaatgtacttctgtaaatagctagagctcacgggctacagcacaacggctcgttatcacatcctcttattaattcgctagcatcgaagtaggctgcccgtgtttggatgggatacactctcgctcagtggcctgccgtgaagtacactgcctagttcacattcgttccataaatataaccctggatctattcaactctaggtaggcaatgttagaagcaaggacactaacatagttacctctacttaaacagtaatcatagccagaaaaaagacaaaaagtaaagtttagccctaacaccttactatgaacccatccaattaggtttcaaaccaaatccggtagggaactggacctggagtatacgacccaccgtcacggaagagatgcgatcccatacacctgtgtactcctagcgacgcgtaatctcctccgatgtgtcatcctggcgcctagatcacggatccaagacgctcgaaacaagtacagcttcacccggggtgtaacttcgcattcattcatgtccccccacgactgcatttcaccaagtgggtcactgtacaggccctataccagtttcgcggaacttcttgccgcaaaaaagcactgaaccaactcacattgaagtgtaagacccaaatgcgagacacgagaacaggccccatggaagtcatggccaaaccaaaagaggagcgatccgcaacccacaaagatggcccgcgagaccaagacgttgacagaggaacaattacaccaacactcataaaaaccacgtaacccagtaagaccggacatagcctggaaaaggcgataccataaggccaacccaaactaacaattagcgtaatgtgggcaacaccaggagccgccacacgcccacaacgacgatacagaggagccacgagggaactacaaacgctgcgcgcggtaagagtcagagcacaagggagtacccacgatgccagcacgacagagccccagagatactagggagaaactttcgacggatggagacgagaacgcgagatggggaagtggggggcaagctcgcgactgagctagttggtcaggacgacagaccgcagtagggtgtgtggcccacttatgagacagagggtctgctcgacagaggacgggctactcaagcttgcgggatgtggaagtcagaagcaggaagttcttaa

SEQ ID NO: 642678 - DNA, 187 bp, Homo sapiens
cgctcttgcactctccctccctccctgtctttgttagcttgttgaagtcgatgacatacagtcttcagtttccctcgagtccatgtggctctagtggtgtgatagcatctgtccttgttcccaggattgattttaaaaccttgatggccatgtctgttcgtattattcttgcatctagtttcatagt

SEQ ID NO: 642679 - DNA, 373 bp, Homo sapiens
gatgcccagtgcacaggaagtggtgcagggctaggagtaggcactcctgactttggaggtcatgaagtgagtgacgtagaaaagcctttggtttttgttttgatttctgttttgtttttaaaactaatagttttgggctggggaatcagaatcaacctatggtgaaagtgctggcctatgtaaaatttgatgcgcaccccacccccctttttttttttaaaagaattgggtttagctatgggtcaggtcattttgctaagagttgtgattccactgggtcatcagacttcccatccccctgcaggtaggagtagagctgagctcacaaggaagttattaagtgtcctgctgatgagcaggtgtatcatacgcg

SEQ ID NO: 642680 - DNA, 665 bp, Homo sapiens
cagctacctgctgagcaggagaaaatcagcttcctgtttggatacccactagacatttgaagttctacaatgaacccatcagagatgcaaatgaaagtgcctccgcagagacagaaaacctgcaatcgagcatcatcgactcgcagggtgaacagaatggtgatatcagaagaacagatgaagttaccatccaccaagaaaacggcacacgtggagagccagggagagaaagagaaagaaaaagagacagagatcagagagagacacagaaagtgagactggggagagagatagtgtaagagagagagagagagaccgtaagagaagggagacaaagagataaaaggtgcgagtgagcaggtgaggagaaagactgaaaacgatgagaaacagcaactaagacacaaaggaagtgggagactgcccgggtgccgcagcacccacaccgtcctcttgcccccgtcacttgggttaaaaccaccggaaactccactattgcaaattttgtattaatccttgtatgtctgtcctttctattgttagtctacaggtgtatccagcagctccagagagacagccaccagcgagaagaggccatgatgatggtggtggtttgtgaaaacgaaaagggggatatgtagggaacagaaagagagtgcagactg

SEQ ID NO: 642681 - DNA, 192 bp, Homo sapiens
tcaacgaccacgtatatgacgatgtcacatgtagcagcatcaggctgaggctgctgagttggcagttgttgaattagtcctagactgcatactgcggactgtgataggcataggttaagtctttcttcctctggctgagcacacatttagtccatatctgtggtacgactcgaatcgaatcagtctactgtt

SEQ ID NO: 642682 - DNA, 273 bp, Homo sapiens
tttaagaaacatccctttaattttttcattcctttttcataacctcttcatccataagcattgagcacgtcgcctattcccgaaggtggcagcatctgaccggttccacaaggtaccgcatctaacccttgctttgtcgctctggccccctactgcgctccaaagttaatgaggtctgttttcctggttgataccgtagcccaggtacctcggcgcaacgtgttgttcacgctttctttgtatccaggcttagtatttgctgttgtcgtagac

SEQ ID NO: 642683 - DNA, 1409 bp, Homo sapiens
  misc_feature (352)..(352): n is a, c, g, or t
  misc_feature (377)..(377): n is a, c, g, or t
ggagccctacaatgccacggctctccgtgcatcagtggttacgatgaatactgatgatacctatgtgttgagaaggaggcggagagctgtgactggtcctcgcaaggacttcgagtggatccattcactggggcgggggcacaggcattcgggcaagtgggcacgtcatcctgtatttacacaagatgtccgagaaagaactacacatgattcagcatgtcatgttgaaatagctgtgttcagatgtggttgcctatcaggccaagagatggtctgacacctggggttgcagatggcccgtaacgagtgactcctgaatcccataacttgctctcaaactatccatgtgagntgggtcgtcaacacgacttcatggncctcgcgatgtgtcccagtggtccctagtgtcgaactggctgcatcatccgccaataacgtaggggcgaagtccaaacgatggggtcgcccagtgtcaccagacgtctcctattttccttgtgatgccctggacgtattggcccgcatctctacccagcgcagttggtaaggacccatgtcgagtcattccgaggcttcttctagcaggttgccgagaagaactacaacctcaggccagtgttctttctgattgaccaaagaagcattgatgtgacttggcttgtgaccccacgggcacggagctggatatccgtcatcgttgggttgcgtgtcttgccgggggtcgggatggtcccatggaacggacgggtcgaatggagccggatgtcttaatcggtgccaggaaacaacgaaggcagccaggctaacttctgctgggaacctggtatcccgcaaaagattgttcaacgcatcagaccggtactcggtggaagaattcccaacctccgttggggcgtcaagcaagggcaggtgcgaccctttcgagtttgggcaagggtgaagccaacagaccaattcccccatggaagccatacctctcaaaggccgcagatccttcgggaggccaggttctaacagccttgcccaatgtgttccattggctgggaacaggggccttgcccttccaagcgtggttaacccacacgcgggcagaaacggtccagtggacccgacaggatgagcaggttaccaacgggaaagggcttgaagaaggcaaccgtgtggaacccgagagctgccgactcctggagaagtaattaacacgctgggtacaccccagggatcgccaacaccggtggaaaacaaggagggagagcacaaacgggttgaaagggaagggccgacaaaaggacaggcgtgagagggaaaagaacacaagaaaggaaaggcaacgaggacagatagagggacaccgtgacacaagctgggtagagcacattgagcgacacatacagtttgggcgcagaaga

SEQ ID NO: 642684 - DNA, 321 bp, Homo sapiens
tcataggaatcatcgcgcacaatacatgataaaaagtgatttcctagcaagcagacagtaattcttgctgactcaccgagcctagaaaatcctagtttaccaggcagtgtcctgcctttgagtcagctattattgactatggactcctctagttctgccagtaagcaggtatggaaaaggttatagctactgtatgtacaagtgcagataatatttaaatttgctcttcattgagaacaaccaaatatatacttgatcaattcacaatacaaatgctttatagtgttgaagacacatcttatgggggaaagggatggatcg

SEQ ID NO: 642685 - DNA, 1348 bp, Homo sapiens
cctgtttgttgctgcttttgttgctttgttatgtactggttgatctgcttgcattcatgtgtttgttgtgctgctgtgttctgtctgtgttgcttgctagtcgcattacactacatgaccaatgtacggtctccttgtgacacgcggttgcgccctccattattcgtgtaggagcgcctgggtgtgttcctcgaaggccctaccccctttttggtctcccgctgtttctttagggggttttttccctgttggggccccgttggtcctccctcttatgggggggggtttcccttagggtctcctgtcgccgggggccccccttttgggggccccactctggacttcacaggggccacagcacttcttttgtaaaggaaaattgttgtgcatattttataattcccgtaattgtcccagaggccccttggggagtaagcgtttttttctggccgagcttcggcgccaagtggggtccccctttggaataccccgcctgaaatgtccaagtggttaatatcgcccccccacggggaaatatcttgcgcccagaagggccgttgtgcctttaagtttgtcctgcctgcccccctgggagccccctcccccattggctgggccgcctgtgcaacttcctggggacccttcgctcttgtccccgagtccacggctatcctttccgggggctcaccggctttcttgtggttactgagcccccacgggcttgacaccccacgcctttcccggaggccttcttatggttaacctatcctaccctgtgccctgtgtaaataccgagttttcccttctgccctattttggacacttggccactcccactgccacccacccagggagtctcacctccacatgggtttaaatttggctggaatgctggctccgggaaattttgcccactgcgtggcaccccatttccccctgaaccaccccactgggaggttcactgccctgatctgtaactttctaccacgagatcctgaagagattgaaaaagaagacccggctgcttctgagaagcgccagtgacccaggaggatatttccagggtgaatggactgctccccgctcctgagttccctcgcgtactccagcctgaggttcccagactggtctgtaaggtgtaccggtgccctctgtgcctattccacgccaattccctactgaagactggagccgctcagcctgccccggaagactggtttcccagcgtccccctgctccaggcccctgaatgggtaggacccacccctgactggtcttaacccgtttttgcataggctcttaacccgcctggaaaaatggttgatggaaaattaacctccgtttttta

SEQ ID NO: 642686 - DNA, 110 bp, Homo sapiens
gatggaacatctccaggtggtgaaaattatggccttgccggcaggggaagacctcaacgctggtcaagtatgcagagaagtggtctcagagcaggtttctgtatgtgaca

SEQ ID NO: 642687 - DNA, 142 bp, Homo sapiens
agggtgatctcaaaactcttgatctacaagcagtcctcccaattcggcctccagagtgctgggattacaggcatgagccaccaccccagcttgggacatgacatttttgagagaacaatatgtgcaaagacaaagggaaaca

SEQ ID NO: 642688 - DNA, 1202 bp, Homo sapiens
cgcggggcgacagcttgcggctgcggggagctcccgtggtgcgctccggctggctgtgcaaggcggccatgggattgccttgcaggaacaatgtcgtgagtctcaggtcgcgaatgctgggcgcagggcgctgtgcgtgggctactgcgcatcctcgttatcgtgaccccgggagagcggcggaagcaggaaatgctaaaggagatgccactgcaggacccaaggacgcagggaggaggactggctcaggacccaggcatcgtattgcgtgagccgactctgtcagcgaggactagccgagcacgcaggagaaacgtgggcctaggaggacagaactggactgtgttggcgagtgaatggcgtgtgccagcgggaggtcaccgtgagaccggatttgcctccgatgggcgccggaccttggattgggcgcaggaatccgaggcagcctttctccttcgtgggcccagcaggagagtccggaccgagatagcaatgccaggactctcctggggtcctgtgagctagccgtcgggtgagcacgtttcccccaaacctggaatgactgcttaaggtccgcaaggcgaggcagggccgagacgcgagatcggatgtggtgaactgaaggaaaccataaactcatgtgccttacaaccagaagtgagccctgcaggtcgagaccataacaatggttgagagaacgcgatggaccggagcggggggcgcggactggagctgtagacaggtccgaagcccaacagaagaggatgatccggatgggaatcgtggccaaatatggcagaagcaacgaacgagagcggaacacaggaccaaggagtgaatcaggacagaaaacacgacacatgacacggcacgggaacaagaatcacggacacagaacacgaaccagaaaccaaggagcgacgaaccagacaacgagtagaaagagaggagcagaggagaaaaggtaagaacaacaagagaacggaacgcaaacgagggagaaaacagacacgcacaggaacaagaaaggaatgaagaacgagagaaagagaagagcgaggaaagaaacgggaacagagaatgaaactcgtcgcatagtagagaaagaaaggagaagagaaagagaggacagaagaagaaagaagagagagaaaagaagagagaaagaaaaaaaagagaaagaaacaggaagagcgagagaa

SEQ ID NO: 642689 - DNA, 692 bp, Homo sapiens
acactgccctgagcatggacctggaccttgagaggggcccaccgggcccgcgacggccccctcgaggaccccccctctcctcttccataggccttgctctccttctcctgctcttggcgctactgttttggctgtacatcattatgagtaactggactggaggagccctccttgtcctctatgcctttgctctcatgcttgtgattatcattttgatcatctttatcttcagaagagaccttctctgtccacttggagccctttgtctactcctactgatgatcaccctcctgctcatcgctctctggaatttgcacggacaggcattgtaccttggaattgtgctgttcatcttcgggtgcttacttgtcttaggtctctggatctacttattggagattctctggcgacttggtgccaccatctggcagcttttggccttcttcctagccttcttcctagacatcatcctgctcattattgctctctatctacaacaaaactggtggactctattggttgatctcctttggctcctcctgtttctggcgattttaatctggatgtattaccatggacaacgacacagtgatgaacaccaccacgatgactccctcccgcaccctcaacaagctaccgatgattctagcaatcaatctgactctaactccaacgagggcagacacctcctg

SEQ ID NO: 642690 - DNA, 380 bp, Homo sapiens
gaacgcagagtgagcaccagtgactgcgtgcgtggaggtgactgcactgcagtggtcgtgtgtagttctctaacttccaaccatgtcttgtgcgtctccagaagcaagaaaagttgtcttctctcccctccttcccaccctttttgcataggcaccacaagtattgacaggagcactacatcaaatctttttgtgacactagtagaaaccagtacacttttagattagacagtatcttcttttaatatttcgactttgttccccttcactgtgaaaagttgtataatacttaactgactgtagcagagtcggatatgtggtagcgtacctttaatatatcctattacagcactgttctggattttctttcggtttttaaa

SEQ ID NO: 642691 - DNA, 953 bp, Homo sapiens
  misc_feature (45)..(45): n is a, c, g, or t
  misc_feature (74)..(74): n is a, c, g, or t
  misc_feature (266)..(266): n is a, c, g, or t
  misc_feature (574)..(575): n is a, c, g, or t
  misc_feature (580)..(580): n is a, c, g, or t
  misc_feature (583)..(583): n is a, c, g, or t
  misc_feature (634)..(634): n is a, c, g, or t
  misc_feature (636)..(637): n is a, c, g, or t
  misc_feature (646)..(647): n is a, c, g, or t
  misc_feature (652)..(652): n is a, c, g, or t
  misc_feature (656)..(656): n is a, c, g, or t
  misc_feature (686)..(686): n is a, c, g, or t
  misc_feature (692)..(692): n is a, c, g, or t
  misc_feature (695)..(695): n is a, c, g, or t
  misc_feature (718)..(718): n is a, c, g, or t
  misc_feature (726)..(726): n is a, c, g, or t
  misc_feature (781)..(781): n is a, c, g, or t
  misc_feature (812)..(812): n is a, c, g, or t
  misc_feature (814)..(814): n is a, c, g, or t
  misc_feature (831)..(831): n is a, c, g, or t
  misc_feature (873)..(873): n is a, c, g, or t
  misc_feature (883)..(883): n is a, c, g, or t
  misc_feature (952)..(952): n is a, c, g, or t
atgtatatttggttgtgattaaacactaaaaattaggcgagagantggaggggataaggataagagaacagganaaggagagcagaaagacgctcagagagagtagaaagacactgaggagagaacaagagatcctagcccattcttattatgaggatgaacgatggctacaggacatgagtagcgccaatcagatctaactaaaataccagcctctccaaaaaagttttccaaataaagaatcccctaacaattatttactgganaaaaaaggttgatatttctagaaagagatgatctctttgacacaaaagacccaacttaggacccaacttaatacatagatagcaccatgacagagctgggatccattaagacatgatgtagacaataccatctctaggacacactgtcacatcacacatggatgtttgttttatggcctaaagatgttgtagacggttgtcacaaaatttctcggggggggcttcttcttgctgccaggttcaggaatctcttaattgtagggatattacttagttatcactgtgtattccatggaggaaaaggaaanncaganaanaaaaaaaaaaaattttctcttctagagctaaaatggtttggagtaaaatgnannctgacaggnntcaangaanaccaacaagaaagctttgtccgtaaacacnaaaaanctnttacaaacacaggaaagtatctnattatagncttctgggccatgttaaccacttccttttgctgatcatctggttttaagaaaggntgcatgataagcagtaccagcagaaccagtntnccctccacgtacatgtnaatcagggttctctccttgaggttcttgccaaagagattgtncttgtctgcnatgtagtggagaatgcttcgggtctgtaccaacttcatccgtcaatttcaccatgggcacttgtgggana

SEQ ID NO: 642692 - DNA, 634 bp, Homo sapiens
accaagagaactagcctgcagagttcagttgctctccctagactccattaggctactgagtcttatgacacctgctatcctgggattccccgccagctgcaggtcagacctccattgctactatgtgcgctcatagcattggctgcgtacttagcacattctaggcagtagatcctgtacaacgtctatgcaaacaccggatgtactgtgctcaatacgaattatgaatgcgacatcctgatatcgactagaacagatatgtaccgacggatgatagttaccagatagttgcaactaattccttaatgagacttactacactgtcagagatcttgagtacgcctttgagacagcatccggaagctattcttgacatacatagtgaatttagcttacactttggcaagagaaccacctttgactatacctgctgcatagatgctttaacgtcttctacagaactaggacctatcggcgcttgagacaggattacctgcacacagatggattcttgtacttatgaacatggcgctaatgataggagatgaactatggccatacaggttcgacgtgagggcatttatgagttggagtaatccaggaagcttgcattcactggcccatttttcgttct

SEQ ID NO: 642693 - DNA, 987 bp, Homo sapiens
ttgaaacgatgctatgattattggtcttatctattatgttagtgtgctaattatatgtaatactttggattgaacacgcagtgcacgcgatagtacttatagctgtgacctcgcatcactctggttcttctgatactcgtgctaaggtgttaggtctggtgctctcggttagtcagagatatgttcgctttgtggcacgatagcgacttatatcgctgtggggggagaaaggacgattatttggatggtgccccatatagcgaggctgtgaagccacgactaaggtgttatgttagggacgcttgtgttaaaccagtgtgtttcccgcgcggtctgccccgacatttctggggtgaaacgccctttgcccggcctcttagtcccgtgtttattcggccgcgctccccccgaggtgttttgtgttaagccgtcccccctcatatgggccgctttctcgtaccccccagtcgaacaacgcggggcggcgtcgcgagttcccctgcgtgtggcgaggaacacgcggcggcgcacaaaattcttcctcgttgggcgcgctcccatcctacatgagcaatgtgttaccacacgtcgctgcgcgcctacccacgcaaacaatttccccttgggtgatttttcttcgccactcaccgccccggcgggagttcaattactccacagggggaccaccacccacacactgtggggaaggaacaaaggagggtgcgcttagaggcgggtcacaccccacggtctccgccgccccaacagacggtccggccccccaccgggggtcatgacattctaggcaggccgccgccccaccgacagtgaacagcttccacgcgcagaggctggaggaggagcgagttgggcgaaggaacgaagagagaatggggcgaataaaaacactataccggaacacccaaccgaggagaatccaacaacccccgccggggacccccaaaaaaacccccccggacaaaaaca

SEQ ID NO: 642694 - DNA, 1313 bp, Homo sapiens
gccgcggctgggggcggggaggggggcgcaggaccccaaagatgggggtaccggcagccagaagggccaagttccgtgtccccaccagcagcatggcatcgtgtgctgaaccctctgcagccctctagccccacatgccctgccgggcgtcccgaccggctcgcaggcacctctcgcacggctaaccctggccactggccgcgcttcggcaccccggcacctgccccacgcaaccgcgctgaccgaagcgcaaccaccgcacgcgaggcaacgcacggcacggacagcacggcacttgaacccatcgcaaggttgaaccgccgtcgcccaagccccgggccttcggcgccacgcggcacccacttgcgggcgaacccacagccccacgccactggcggcctgcggcaacgcggaacgccgccctctgcaaccgccacaacgcccccactcggcccaggcgaccccccccatggcgcccccccccgccaaccgcaacgcataatcccccaccttcgtggcccacttgggcccccacacgtggccgcaaccggcccccccccggaaccggcgtaccctcctcggacacacacccacacaaaggaccacacaccccagcgaggctctaccacccccacccgcacaacgctcaacgccacgggccccaatgcccgcccaccccgaccttcccacgccatggcggcctcgccctcaacccaccccgcccatgcgccccccatggcccccccgcccacccccgccaccacccgcgcacgagcccaagcccgcgcccctccgccgccccccccgccccccacccgcgcccccctcgttcccccccccgtcggcccgcaccccgcacgccgtgcccaccctcccccccccctcccgcccctccccccccctcgtcggtccgtccccccccacacgcccgcccctgggcgcccccctccctctccctcccgccggccccccccccccccacctctaccctctgactcccccctcgcccacccccgccgtcctccccggcgcgcccctcgcgcccgccccccccacccccccccccgccgcgccccgtcccccccaccccgcccacgcccccccctgtcccccccctcgcgtctgcacacgcctgcgcccccgcgccccccccgcgtcgtccccgccgccccccgccgcgcccgcccctgcgccattttccccgcacccccccccctcccccctctcggccgcccccacttgtctgcagcccccactctctggccaccctccccacactacctgcgcgttctcccacgcctctctccccaccc

SEQ ID NO: 642695 - DNA, 518 bp, Homo sapiens
gtgcccagccatctgcaggcttcatgctgcggagacgctatactcagaacgatgctgctggacgtcccagctgaggagaggcatactgtcaacatggactatcctgggaaagagctcggaagtacatgctgaggtcccatccaaacagcaagctaggcaaaagcctgccttgaacatatttctagacatcaaagataacttacaacccaaagtgaataataagtaaatagtctgatgaccctcttaatagcattgcaattgtattgaatcacctactgattcataagtaactagggaaccaactgagttttgctaagcagtcttccccttataacaccacaggcccttctgacacacaaaaaaatgaaagttaatcctgggtacagcatacagttttacatgtaaacgcacagtcttacgtggaccaatgcaagcacaagcctaaagcaaggtcgagcagatggcaaaaccgaagttgcctgccaagaaatctatttaactgaatcagctccaaatct

SEQ ID NO: 642696 - DNA, 516 bp, Homo sapiens
  misc_feature (113)..(113): n is a, c, g, or t
gtagggcgcgttaaactggatctgtaactatggtcatgggtggaagaggagtcatcagttcaaagatcagactctgtatcaaaagtaccttgcccttaggaagagtgagtatnggagtcatctatatctattactccaaaactccctttatatttcttgagcctggctaggaacttggcattccgtatgaattccttctaactggaacataagtgtagtatctgtaacactggcactgaaataaagaccacacggttaaagaaatcttaccatatagtactttatggtgttggagtgaagccttgtagcttccatacccctatgtcagaggaggtcttacggacaccatagggtaggaatagcctttcctcagtctgagaaatcggtctcttttaaaagacgaatctcatgaatattcacatcaaagacttgagctttttaaactcgtgagagtgccaagtgctttttagaaaggacccatatgttatcacactttgcaatcgagttgctggaatg

SEQ ID NO: 642697 - DNA, 192 bp, Homo sapiens
  misc_feature (51)..(51): n is a, c, g, or t
  misc_feature (72)..(72): n is a, c, g, or t
acactcaactagctgtatgatggataagattgagagagtgaggagaagctnacgtcacgtgagggagagatntgcgatatgattgagatggcggctagttttgtcatgtgagaagaagcaggccggatgtcagagtgggtgcttgagtaaccctctgtgactcagaatgtgaaagggggctattcctagttt

SEQ ID NO: 642698 - DNA, 381 bp, Homo sapiens
gctataagtctaagtcctcaacaaaagtcatgtatgacaattagatccctaaatgtggcatgtatgggaggtggggcctaatggaaggtgtttgggtcatgagggcagatacctcatgattggctctggtgacattctcatggtagtgagtgagttctccctctttcaaaactggattcattcccttaggactgaattagttacccacaagagtcggattttataaagccaggatgcccctaaggttttggctcttcacatgtgtatcactataccctttgaacttctctgacatgttatgatgtgtcaagaaagctccggccaggcacagtggctcatgcctgtaattcccgtacttagggaggccgaggcaggcggatc

SEQ ID NO: 642699 - DNA, 1618 bp, Homo sapiens
tccctgggagctgcccgttgccctttgccctgtccgtccccggaaaagttggggagccggccctcagctatgacccaccgaaaacttttattttacaacacgaaggcgtggagtataagaagggggtgggagtgggaggaacagcagcgagggccgacgaggacccttactttcgtgcctcccgccttccagaacgaagtcaccagtgccgcgtggggtctcacacgtggagaggccaagaaaggctctctctcgttcgcaagttgtgaaacgcgtgaacatatcaaaacgccacgaggtgtgccactgtggtgcgccctgtgcaaagcgtgtgtgtgtgacacaagcaagcgtcgcgaggggtctcccctctgcgtgtgtgtctcttcaacacaccgcttgtgtagagagacaagacaaacttgtgtttgagagggcacaagccattgtggagtgaagccagaggtggagggacactccgcggggccctctcgggggggtgtgcacccccgaggacacgcgggggcgtgaagaaagtgctgtgggctcacacaggagggtcctccccctctttctttgttgcccaccacacacaaaaagagccgctttgtgcggtcttttggcgctccagaaggctatctccccctgtggtgtggggcccatatttattcaaacagcagaggaggaaaagaggaagaaagagaccaatacgtgttgccggcaagggggggtcaaaataccacccccgtggctcactaaagagaggtcctgggccaaaaactgttgtggtgcgcgcccaggagtgtttctgcgcgaaacccaaaaaaaaaagacgccggggtgctgaaacaccacaaaaagggcggcggggggcccccccgagggggggcctctcacaacactctatttttaacgacgcaaaacagagggtcttactattaacaaaacgcgggccgcccctgtgggggggtcacacacgcagcatttttttccacaagacgacggcgtgaaacaaccaaaaggggcggcgctgtgtgttgtttgctcgagcaggggggaaagataatatttcggggccccataattataatttcgccgccccccgtaggggaaaacaaaagagggtcgtcgcccgggacacaccaaaagagatatatcgcggcaggggggtttataccggttttccacgcggcgccattttttgtgtgtagttagaaagaggacgaaaaaattcccgaggaaagagaaggggccggccaagtttaacaagaagagaggggtttatttcctccccatacattagatcgacgtgcttgtgccgagggagagagcggagaggggcaccaactagaacaacaacagggggtggtagcagagacaccaccaattattatgttgtgttcccccctcggaaagaggggatcgctccacagctctgtgtggagattcacacgaggggaaagcaaatcttcttcgtgaggatggataagataatcccttgggcaacacttatagaggagagaacatgttcgttgtgcaagactttttggggggaaatttcagtggagggttgtcttgttcccaaaccctcttcgggggtttcactcacggacgttaa

SEQ ID NO: 642700 - DNA, 725 bp, Homo sapiens
  misc_feature (441)..(441): n is a, c, g, or t
  misc_feature (497)..(499): n is a, c, g, or t
  misc_feature (501)..(503): n is a, c, g, or t
  misc_feature (528)..(528): n is a, c, g, or t
  misc_feature (536)..(536): n is a, c, g, or t
  misc_feature (540)..(540): n is a, c, g, or t
  misc_feature (547)..(547): n is a, c, g, or t
  misc_feature (556)..(556): n is a, c, g, or t
  misc_feature (558)..(559): n is a, c, g, or t
  misc_feature (561)..(561): n is a, c, g, or t
  misc_feature (563)..(563): n is a, c, g, or t
  misc_feature (572)..(572): n is a, c, g, or t
  misc_feature (574)..(574): n is a, c, g, or t
  misc_feature (577)..(577): n is a, c, g, or t
  misc_feature (580)..(580): n is a, c, g, or t
  misc_feature (584)..(584): n is a, c, g, or t
gtaacagatccacagcgctctcgatgctgtctccgggacccgcagcgcgtgctggagtactgcagacagatgtacccggagctgcagattgcacgtgtggagcaggctacgcaggccatccccatggagcgctggtgcgggggttccctggagcggcagctggcccaaccccaccagcaggttgtgcccttcctgtgcctgctgggtgaatttgtgagtgaggcccttgctggttgcctgaagggctggccggtttcttgcaccaggagcgcatggaccaatgtgagagttcaacccggaggcatcaggaggcacaaggaggcctgcagctcccagggctcatcctgcaacggctcgggcatgctcttaccctgtggctcggatcggttccgtggtgtggagtatgtgtgctgtccccctccaggacccccgaccatctgngacagcagttggtgacccctccacccggtcctggccccggggagcagagtagaggnnncnnnaggacgaggaagaggaggaatcctncccacagncagnagatgantacttcgtngnncntncgcagctgnangangangagnccacggtcccacccccaagtcccatacacttgcagggtcggcaagtcactcccaccccgaggcccacagacgggtggatattacattggcatgctggggacatcagtgagccgagggttcgtgaggccaaaggacctggcg

SEQ ID NO: 642701 - DNA, 150 bp, Homo sapiens
tgatcagctcggtacagggtgttggttgggagggttcgtccctaaccttggagcatcactacgccccgaaatttcacggcagacttaccattggcgcggacgacgacacggccacaaactacctggagctcagcagcctgagatttgagg

SEQ ID NO: 642702 - DNA, 268 bp, Homo sapiens
  misc_feature (32)..(32): n is a, c, g, or t
  misc_feature (55)..(55): n is a, c, g, or t
  misc_feature (62)..(62): n is a, c, g, or t
  misc_feature (124)..(124): n is a, c, g, or t
  misc_feature (148)..(149): n is a, c, g, or t
  misc_feature (226)..(226): n is a, c, g, or t
  misc_feature (248)..(248): n is a, c, g, or t
gatttatctattctggatatttcatataagtntaatcatgtaatatgcgtctggnttctttngttctgacttctcagtgtaatgtttttaaggttcatccacattctgtatcagtacttaattngtttttttgggcagatattatttnnttgtatggatataccatatttaattcatccattcgtttgctgatggacatttgggtttctacttttaagctattgtnaatagtgctatggacatttgtnaacaagtacttgttttcagg

SEQ ID NO: 642703 - DNA, 932 bp, Homo sapiens
  misc_feature (1)..(1): n is a, c, g, or t
naaactatgccagccatgtcatattcccgcggtattttccaccgggtgacttttcccaacttgtgggaacccccctctttagagtctattcccccggttccggtggtcgcaccccccgtgggcaaggtctcctccaacagccctccgatttccgctgggaccaccgacttgccaaagaagcgtccgccaagtgttgttgaccccggccgcccctgtgttggccaattgagcccgtgaccccgacaccaatgtggtcccttaacagggccaccaccatttaccttggggttccccaaaggcgatttataaacactcttctcccctaataagggtcttccaaaggcggtggccgaaacaaaaaaacgccgccgggaaaaatggctaaattcgccctcctggccccttgggtcggtccccccccctgggggcgcacgagagaaccccccttgtggggcccgccaaaaggagcgcaaaaacatcgtggttgcgcagcccagagaggctcccacccgaccgtggcgagagcaagtgaaataacactcttgtgggcatagacgcaacaacagagaagtgtgttgttcccccccccgccccgccaattgaccacccagggggcggagcggaaaacaccccacggtctaggaaacacaacgcccccaattcattcatgcgacgcccgcccccccccctgtcttaggaactaacaggaccctcggctgcaaccacacgtaatgggggcaccccacaaggagccacagaggaggctcactaggcccactccgccctcattcaacgtgaaatgccaacgtaagacactccaccgccctccctggaacctggggcgcaacaggtaaacatgcatcccctgatccgagcccagagaacccccccccttggcaatcagcgcccccggccccccaacccacaaaaca

SEQ ID NO: 642704 - DNA, 156 bp, Homo sapiens
caactgagtcttgaggaacgaaaatataggagattgtgaagatacattctcagtttattgggatatcccattactctttttgtgcataaggaacgtgataattaagtgagctatgattaggctgaagatttggatcacaaacaacattaataagaa

SEQ ID NO: 642705 - DNA, 246 bp, Homo sapiens
gattcatcaatagtagactcttcacatctcccggcgattttagagtactggaccgcggccctggctcctctttccttgttcacaacgtgtgtcctgctatgacgtctttatcctcaaatttaaatttccctcctctaagatgacatcacctaactgataccctgccctagtcccccacctttaacttaagatcccacacctcacaaacctacagcccagaaaccagaagcgcctatagaggcccca

SEQ ID NO: 642706 - DNA, 686 bp, Homo sapiens
  misc_feature (7)..(7): n is a, c, g, or t
  misc_feature (172)..(172): n is a, c, g, or t
  misc_feature (177)..(177): n is a, c, g, or t
  misc_feature (198)..(198): n is a, c, g, or t
  misc_feature (205)..(205): n is a, c, g, or t
  misc_feature (208)..(208): n is a, c, g, or t
  misc_feature (240)..(240): n is a, c, g, or t
  misc_feature (297)..(297): n is a, c, g, or t
  misc_feature (309)..(311): n is a, c, g, or t
  misc_feature (315)..(315): n is a, c, g, or t
  misc_feature (371)..(371): n is a, c, g, or t
  misc_feature (373)..(373): n is a, c, g, or t
  misc_feature (377)..(377): n is a, c, g, or t
  misc_feature (384)..(384): n is a, c, g, or t
  misc_feature (401)..(402): n is a, c, g, or t
  misc_feature (418)..(418): n is a, c, g, or t
  misc_feature (423)..(423): n is a, c, g, or t
  misc_feature (427)..(427): n is a, c, g, or t
  misc_feature (429)..(429): n is a, c, g, or t
  misc_feature (438)..(438): n is a, c, g, or t
  misc_feature (443)..(443): n is a, c, g, or t
  misc_feature (446)..(446): n is a, c, g, or t
  misc_feature (473)..(473): n is a, c, g, or t
  misc_feature (483)..(483): n is a, c, g, or t
  misc_feature (499)..(499): n is a, c, g, or t
  misc_feature (526)..(526): n is a, c, g, or t
  misc_feature (535)..(535): n is a, c, g, or t
  misc_feature (568)..(569): n is a, c, g, or t
  misc_feature (657)..(657): n is a, c, g, or t
gtaggtnttgaaattgggaagtgtgagttctctttgttcttcatttcaagactgttttggccattctgggtcccttggatttccatatgaattttagtatcagcttgtcaatttctgaaacaaatccagctaggattttgacagggattttgttagtcttgtatatcaattnggggngtgtatccatcttaatattangtgatcnggnccacaaacatcagatgtcttttcatatatttngaccttctttcattttcttcaacagtattttgtaattttcagtgtacaagtcttgcncttcttttgttnnntttnttctaagtattttattctttttgatggtattgtaaatgggattgtttcttaattananctcngactgcngactgtcagcgtatagnnacaaattggtttttgnatgancccncnaaatttcanaatcngcnttttttcctcttcaaaatcgagggtcnttattttccnagaggggttttctccnttcttaaggccagagattatttgaggnctgcccatngagcacccaaagcttggggttgtccttgagagnnaacaaaaaattcttggtgtcgggaactgtagcacatggtttacttagtctttaagataaggtaggcttacagaaagtcatgaactttnaaatgtctgagaagtccttgagcacagaa

SEQ ID NO: 642707 - DNA, 154 bp, Homo sapiens
cgacgcacatttcatacctctaggagtaatgtataatcgtcgatcgatatagccgtcttgatagcacaaactcctgagtgctgggctgcttgagattattatctccatcttgcagaggagaaaaccaaagtccagagcccaggtccgcataata

SEQ ID NO: 642708 - DNA, 809 bp, Homo sapiens
gctcttgccctaagcagcctgaggtgatctgtgaaaatggttcgctattcatgttgacccggagaaccccacgaaatcatgcggagatcgagatgaggttccaatcttcgtgttcactttaaggaactaactgcgtgaaactgtctcaggcctatcagagggatatgcatatacgaaaagccacgaaggtatctgaaggatgtcactttacagaaacagtgtgtaccatttccgacgttgcaactggtggaggtaggcagtgtgtgcgcaggtccaagcctagatggaggctggacactagggtcggtgggccataaagaggtgcggaactttttggtgcacatgcttgaacagcgcagagatgtgagtgctgaatcttaagggtttaagatgtcatgatgctctggtcatctgaggctttatccaagtgtagatcaaaggctactctaaggatgcgccgcgggacctacagagctcatggttcgggattaacccatagcgtgagctcgcctcgtgccacatttgagatgatccttacggagcataggaacgagattgttcgctagtaacagactgaggagggttgctcagaatgaaataaggatagtcccaggaaagaagcttgaacgataatcaccagaagtttgtggcaactggggggttataagtgcaaggctttaatagtcagattgtaattgaaaatgggaatagtcacaggttttccctggtaatttaatttggagacaaaattaaatccaaaattaagaactttaattattaaaaagaaccagaatagcatcagaaaatta

SEQ ID NO: 642709 - DNA, 431 bp, Homo sapiens
tgggacctgattgcgggccacgaggcgcaattcggggcggagctgctgctcaggctcttcacggtgtaccccagcaccaaggtctacttcccgtacctgagcgcctgccaggacgcgacgtagctgctgagccacgggcagcgcacgctggcggctgtgggcgcggcggtgcagcacgtggactaaccctggcgcgctgagccgctggcggacctgcagcgctcgttgcgcgtggacccagccaactttccgctgctaatccagtgtttccacgtcgtgctggcctcccacctgcacgacgagttcaccgtgcaaatccaagcggcgtgcgacaagttcctgactggtgtgcccgtggtgctgaccgaaaaataccgctgagccccccggcgcaggccttggtccctgcctgtcaatacacagaggcccga

SEQ ID NO: 642710 - DNA, 359 bp, Homo sapiens
accccaagcagttcatacagactcagatgcatctcacccctgctgtgatgtgtcaccctgtgttgtgtgtgtgtgtgtgtgtgtgtgtgtgtccccaactggatgtgtccacggtgcatgtgtgtgtgtctgtccctgtcgggatgtatttactgtgtgtgtgtctgtgtgtgtgtctgcgtgtgtatgtgtttgtgtccctgctgggatgtgtacacggtgtgggtgtgtagtctctagtgtatgtagtctgtgtatgtgtctgtccctgtcgggaatgtatacactgtgtgtgtgtagtgtgcgtcagcgtgtgtatatgtatgagtccctgccggaatgtgtcactgtgtttgtgt

SEQ ID NO: 642711 - DNA, 101 bp, Homo sapiens
aactagaaatcatctaggaaaaaaaaagataattagcctatagtttcagctacttaggaagctgaggtgggataatcacttgagctcagtcgaacggactg

SEQ ID NO: 642712 - DNA, 1801 bp, Homo sapiens
  misc_feature (209)..(209): n is a, c, g, or t
  misc_feature (1268)..(1268): n is a, c, g, or t
cgaccgacgtgttttctgttctccagccacacgcggtgtgttgcttccgctgttgtggtggtgcgcctccacattctccacgtgtggtggataaattgcgtgctgcgcgtcctgttctgccctacatgtggatgccatccggtgtgatctgttatctttcacactgggggtggcgtgtttactactcactccctaccaacagatatggntggggctcgaacacttttgtgttgatcccccgcgggcgaccttcttctcgtgggttgttgtcactccgtttgtgggtttccccccccatcctcctcctccttgtgggaagattgtttcgtgtgtgtgtcttctgctgactgactttgtgttggttggtctcccccctgctatagaaatcctctggtcgtccccaccaggggggtgtctgttgttcttctctcgtctcttattatgggggcgccattatataccacagcatctgttgttctgttctctctttaacctttcgtgatggtgggaaaagctggtttgtgtttgtaaaaagaataaagagggtagttgttgttttgccccccccgcggtaaggcccacctggttggtgtgaatattatagcgcctcccaaaggatgttgtgccccccccctgtgggggaggcaacaaaaaaacatgtgttgtaggggaggaaggagtggtgtctcccggcgcattgtgggtggagagaggtttgtaagaaaaaggtttcgacacgacagttcgttgggtgttgcacaacatgatgtcctctcaaaaataagtttgggggggagaaaacctcttgttgatataaaggaaataagtttcttaccgcctcgtgtgtggtcccacggaggtattaaaaccacacgtcgggtaaatttgggggtcgtcaagacccccgcttgggtccacacacgacgccacacatgacacctattttgtggggggagatagagaaatgtcttacacacactgtgtgcttgagagtggacacacacagcagttgtgagatgaagacatgtggccccccacacagagatatataggttgataatactccacacaccacatatacactcgaggggagaaatatatcatatttggtatacaccacctcgcgctcgcctgctgtgtacacacatccttcgctgagtatcacacacacaggcgcgctgctctcacgccacagcgagagagaataatagtgcgtcggggcctcacagagagcctcgcagcaggagagagataccccccgcgcgctnccccctgagagagagaggagacacctgtgtctccacaacgctgcttgtcacacagacacacctcacacacaggcccgcgcctgtctctcagaggagagggacactctctcgtgcgctctcactttgtcccagagccccccagagagtatgacacacacactgttctgttgtctccagagagacacatctcacagaggagagtctcacactgtctcctccacaacactttgagagggcacagacactctcttctcatgtgcgcccagaggtctttctcaagagaataacccacccacttagaaaatagaggagatgttctccagagaaatagagaagagttacacatgtgacatctttgtgagagtctcacacacccgggcgcaacattctgtgggaagaaaaaataatttgccatattgtgaaagaccaccgagagggtattttttagaggtccattgcccgatatttggggataaaccagggtgttttttagcccatataatataaaataacacccaaattcttggaaaaaa

SEQ ID NO: 642713 - DNA, 994 bp, Homo sapiens
tgctaaaccgtagccccagaacccacgtccaccgttactaccagtacaaaccttagccaaacctatttaccccaaactaacagtatagcgcgcatagcaaacttgacaaccctggacgacaactagcactatagatacccgcacaggcgacaagcatgacacaacattactaagcctaagccactacatactagacacaggcacgtaacgcccatactagccattcctgacactaactgcaacttaaccgtacgacaactacactattgtcaacgtgcagcagcccaatacgcgtcaagcaccactccggacagacccagcacagcacgcatacacgtacagcacacgagtcttaacacagcagacgacgacactcgtatcgtactcgctaggctaacacattagatagaggacagcagtcttactacgcgctacgcacgagcagaaccaatatccgtagcacgcagacactgagatgcactacgcataggctatgatcctaactactcagcaactctatcagatatcatacatattacaactaatgcaccaccatgacacacgctcctacacatcccccattgatcaaactctctacacgtcgattcagataccagcacgacgagacacacgcgctcattacgcgatcaccctagcgacaacaacaccgtcgccacgcacgacgacgtaccaaaactcctacacaccacactagctagcgccataacaacgcagccaaccacattaaagaacagcgcttcaacgcatcacacatcccatctaccctacacacaaccaatcacaaaaaccaacaacatacaaacaccagcaaagcgccttgcgcgccctcacaggctcgcagtagagaaggtactacagggtgccgtccgagacggcgcccgagggcacaccggagggcaaagagacaaagggataataaaaagtagaacgaagccacacagtcacaacagacaatgacggtgagaaataagag

SEQ ID NO: 642714 - DNA, 859 bp, Homo sapiens
  misc_feature (11)..(11): n is a, c, g, or t
  misc_feature (101)..(101): n is a, c, g, or t
  misc_feature (103)..(103): n is a, c, g, or t
  misc_feature (105)..(105): n is a, c, g, or t
  misc_feature (145)..(145): n is a, c, g, or t
  misc_feature (147)..(147): n is a, c, g, or t
  misc_feature (161)..(162): n is a, c, g, or t
  misc_feature (192)..(192): n is a, c, g, or t
  misc_feature (194)..(194): n is a, c, g, or t
  misc_feature (212)..(212): n is a, c, g, or t
  misc_feature (216)..(216): n is a, c, g, or t
  misc_feature (255)..(255): n is a, c, g, or t
  misc_feature (272)..(272): n is a, c, g, or t
  misc_feature (274)..(274): n is a, c, g, or t
  misc_feature (285)..(285): n is a, c, g, or t
  misc_feature (288)..(288): n is a, c, g, or t
  misc_feature (308)..(308): n is a, c, g, or t
  misc_feature (322)..(322): n is a, c, g, or t
  misc_feature (327)..(327): n is a, c, g, or t
  misc_feature (334)..(334): n is a, c, g, or t
  misc_feature (480)..(480): n is a, c, g, or t
  misc_feature (544)..(544): n is a, c, g, or t
  misc_feature (563)..(564): n is a, c, g, or t
  misc_feature (604)..(604): n is a, c, g, or t
  misc_feature (854)..(854): n is a, c, g, or t
gggggcctgcnccccactgcatcctccccaggcccccagagtcgcccgaaggggacatgggcgtttctatccacattaagtagcaggagattccctgagtnanangcattttcttaagtcggacgtgtccaggctccagcagcantnctgggggtgggggnngtgggccttcaggccagggcactgcccatnanttcggagaagccacctgntgtnccaggtgctgctggctgaggctcctgcagctcaggctgngcctctttccaggccananacttctccaanttngttttaaaaagcaatccgtnacctgggcagtctncagtntctttgnaggctcgcttcttgcagcagccgcggcacaggctgaacacacatctgttgccctttgggtttccacactggtcacactttgcatattttggcttcagagaggggtcgaaggtcttgtgggggttcctcagctgcttcttttgcttnttcttggataggacctccgtgccaccctcctcttcctccagggcccgcttgctgcgcgcacctnccttctccttgctcccctnnctgggccccggccggatgtagggctggcagatccagtggnagggctagtcgccggtgggcttcgctccctcctgcctggatatctcctcctgacaccgcagcttcagctcctggctcacagcagcgatgccctccagggtcttcaccttggccagctcctctcgcagctcctggtgcacctgcagcgtgtggtgccacagcttgaagaggtgggcccggacgtaggacagggggcaggggtgctcccgcacgatgtccagatactcctcggccagctcccacacggcagngctcc

SEQ ID NO: 642715 - DNA, 294 bp, Homo sapiens
  misc_feature (188)..(188): n is a, c, g, or t
  misc_feature (238)..(238): n is a, c, g, or t
  misc_feature (242)..(242): n is a, c, g, or t
cacaataggaattttaacagcatactgccaagacacaataagccactagtaaatggtagttgctggtttttgaaaataataaaagatcacaattaaactggttccctatctcctcagtctgaaaaaataataaaaacatgactgaatgacatgattttttttttttttttttttttaaaaaaaaggtntcattttgtcccccaggttgttgggcgggggcaaaaaaatagttaattgnggcntaaacctccaaggttaaggcaatttttttgagcaggtggaacaaaagggggg

SEQ ID NO: 642716 - DNA, 178 bp, Homo sapiens
accagtagctgccatagtttggttctgaaaactaacttggcatcaacacttgggtgtaggagacattgctttcgttatgtatcagaggacatgctcagcagatcaagagatatatttggcaacgtgtgtctagaaaggcacattgggtatcattcattacatttctaggttgtctggg

SEQ ID NO: 642717 - DNA, 1064 bp, Homo sapiens
gggcccttccagagaaatgtactgaaaaagtctacgcaatgtctgggatttgctaaacaatacctggaaagcagacaggtctttttgccattcctccaggacatccaccataaggaaaggagaccctggaccaacattctctaagatgtttatatggaccagtggccggacctcttcatcttatagacatgatgaaaaaagaaatatttaccagaaaatcagggaccatgacctcctggacaaaaggaaaacagtcacagcactgaaggcaggagaggaccgagctattctcctgggactggctatgatggtgtgctccatcatgatgtattttctgctgggaatcacactcctgcgctcatacatgcagagcgtgtggaccgaagagtctcaatgcaccttgctgaatgcgtccatcacggaaacatttaattgctccttcagctgtggtccagactgctggaaactttctcagtacccctgcctccaggtgtacgttaacctgacttcttccggggaaaagctcctcctctaccacacagaagagacaataaaaatcaatcagaagtgctcctatatacctaaatgtggaaaaaattttgaagaatccatgtccctggtgaatgttgtcatggaaaacttcaggaagtatcaacacttctcctgctattctgacccagaaggaaaccagaagagtgttatcctaaccaaactctacagttccaacgtgctgttccattcactcttctggccaacctgtatgatggctgggggtgtggcaattgttgccatggtgaaacttacacagtacctctccctactatgtgagaggatccaacggatcaatagataaatgcaaaaatggataaaataatttttgttaaagctcaaatactgttttctttcattcttcaccaaagaaccttaagtttgtaacgtgcagtctgttatgagttccctaatatattcttatatgtagagcaataatgcaaaagctgttctatatgcaaacatgatgtctttattattcaggagaataaataactgttttgtgttggaaaaaa

SEQ ID NO: 642718 - DNA, 118 bp, Homo sapiens
tgagtcaggagttggacagcttataacatagtgaaacccatctcacaaaaaaataaaaagttagctgtgcatggacacacacctgtagtctcagctacttgggagtcaggaacggtcg

SEQ ID NO: 642719 - DNA, 214 bp, Homo sapiens
tctagaggattccagatatcctggatcttatagtgatcggattttgtgcgtaggtttggtctagtggtgtagcctgagaatagtgggaaatcagtgaatgaagcctcctatgatggcaaatacatgctcctattgataggacatagtggaagtgagctacaacgtattatgtgtcgctgtagctcacgactgtctcagctgatgcagtttgcta

SEQ ID NO: 642720 - DNA, 401 bp, Homo sapiens
gggcccttccagagaaatgtactgaaaaagtctacgcaatgtctgggatttgctaaacaatacctggaaagcagacaggtctttttgccattcctccaggacatccaccataaggaaaggagaccctggaccaacattctctaagatgtttatatggaccagtggccggacctcttcatcttatagacatgatgaaaaaaggatagctaccaagggaatctgaatttaaatgggtgtgacagccaaggaggaaaaactttctttcacattttgctctttatatccatatttgtatgtgcatggcctcaaaaataatttgtttatgaattatgggctgacccccaatatcaaacttcaagaaactacataaaaggagctcaaaataaaattttactaggttg

SEQ ID NO: 642721 - DNA, 101 bp, Homo sapiens
tcttgtttcctgcacttcgggagggcggggtgggtggatcacgaggtcaggtcttcgactctctcaaaatggctggggattacagggcattgaaccacgcg

SEQ ID NO: 642722 - DNA, 616 bp, Homo sapiens
  misc_feature (236)..(236): n is a, c, g, or t
cccccccggttttttctgccgctccccacacacaaaagtttcccccctctggtgggtgttttcccccccccccaggggaacccccctgtgtatttttcctgtgtggggtgtgccccccaaaacaggaccccccccgcccctttttccaggggggtgttttttaagcgcggggcacccctttttagggtgttctctaagggggcgccccggccaaattttttttttttttggggcgnatttttctcccccccctgaaagaaaaagggtttttttttttcccccccccttttgagagaccccccccccggggaaagggggttttccattttgaccccctttgtttttttttcccccaaaaagggaccccccctcggggtttggggggggcccccttaaacccccccccatttttgaccccccggggggggccccccccccttttttttttttcccccccggggggttcccccccccccccctttttgggcccggtccttttttttttaaggaaaaagggggccgaaaccccccccccggggtttttttttaaagggccccccccttttttttttttctccttttgggcccccccttttaaacttggtgttttttttta

SEQ ID NO: 642723 - DNA, 168 bp, Homo sapiens
tattttgtttgtaaaatgaacgcactctgggttctaagttcccacaccgtgagtcctttagtgtacttttttttttcaagccatcggtgcatgtcacgttgaatgcaccagttctcgtcagaacgccaaagttaaggaacgtcgaagggggatcctcctagacgtcga

SEQ ID NO: 642724 - DNA, 776 bp, Homo sapiens
ctctttccttgctaacgcagccatggctcgtgtcccaagaagcatctgaagcgggtggagtccaaagcatgatgtgataaatggaccggtgtgttgctcctcgtcatccacgtccccacaagttgagagagtgtctccccctcatcatttcctgaggaaccagacttaatgtatgccctgacaggagatgaagtaaagaagattgcatgcaggggttcataaaaatcgatggcaaggtcggaatgatataacctaccctgctgatccatggatgtcatcagcattgaccaagagggagagaattcccgtctgatctatgacaccaagggttcgctttgtggtacatcgtattacacctgaggaggccaatgtacaagtgtgtgcaaggtgagaaagatctgtgtgggcacaaaaggaatccctcatctgtgactcatgatgccgcaccatctgttaccctgacccctcatcaggtgaatgatccattcagatgtgttgagactgcagaattacttgatttcatcaccgttccgccacttgtaacctgtgtattgttgactgggggtgctcacctaaggaagaattggtgtatcaccaacagagagaggcacccgtgatctttggacgtggtcaggtgaacagatccatggcaacattttgccattcgatttccaacattttggtatgggcagggaacaacctgggttctcttcccgagaaaggatcgcccacatgtgggggcggaacaaactgggcaaaaaacggggaatgtcctg

SEQ ID NO: 642725 - DNA, 718 bp, Homo sapiens
tcagtttgcaaaatcatagtaaaagtccactctgtcttaaaacatagtgatacaatattagaaagtcgagcacttgctataagttgaattaacatcactagtgattctataaaataacttctagaatgcatgatgtgttagtgtgtcacaaatccagaaagtgaactgcagtgctgtaatacacatgtaatactgttattcttctatctgtagttagtacaggatgaatttaaatgtgtttttcctgagagacaaggaagacttgggtatttcccaaaaccaggtaaaaatcttaaatgtgcaccaagagcaaaggatcaactttagtcatgactgttctgtaaaggacaaccaaatcccttttccatttctcaattgacttaactgcactgatttctgtattaatctacctctaaagcaaatctgcagtgttccacacagactcagtgggtactggatcaagccgcctgtcccaggtacccacactctgaaatctccaacacagaggcttaaggcttgcgccacacaaggcatacttttctgtggtcttcttggactgcacctgtctgtcccttgcccttcaccatagacactcagaccaccctcacaaacacagtagtctataagtaggcattcaacctcggatctgaacattcaaacgcacagctttggaaacaagagctgggtggcttaaaaccttaaaatatgactgccgctg

SEQ ID NO: 642726 - DNA, 579 bp, Homo sapiens
  misc_feature (347)..(347): n is a, c, g, or t
tggtttttgggtgatgtggcttaaatgcaaaagttcctttttggggacatatttctgccaattaaagactagaaggggcacaactttttttttaattaccatagagaagatacattaaaaaaaatcttctgatgttttggtagccataactaaattatgggtaaaaatgtgcactatggtgaaaagggagcaacgtagtttggggttttaggtggtattggtttggttatggctttggttcttttaacagagattaaaatggttcctgggataagggattaagctttctcagaagtggctccatcattctggtggtaagaagcttaaattattgtaatggtaaccanaactcccagttattaaaaatctctcatggtggtttcctttatacaaagcaagataaagggcgtttataacactggccattacttgggcaaattggttggctaccttagtttaaaaaacaattctcaaacaaaagatctggcttcagggtgtttctaaatagcagtgattcagaattttttttaatgaaggtataatggcactaaccttcttcctgaggtctgattctgcatg

SEQ ID NO: 642727 - DNA, 216 bp, Homo sapiens
tggtatgataatgggagcaaccaagatggcttttggcagaggaaacaaagaattcattgttttcaacaatgatgaatggacattttctttaactttgcaaactggtcttcctgatggcacatactgtaatgtcatttatggagatacaattaatggcaattgcacaggcattaaaatctacgtttatgatggaacgaaaagctcatttttcattag

SEQ ID NO: 642728 - DNA, 117 bp, Homo sapiens
  misc_feature (65)..(65): n is a, c, g, or t
ttgactctacagtgatctttcatggccaggattccttctcccctgtgttttttgatgtgatcccntgtgtgtacttcttgatgacttggccatgtgatgatgtgtgattgtgttgtg

SEQ ID NO: 642729 - DNA, 174 bp, Homo sapiens
gcccaatgagctatgggacagtgtgcatttgccagggcaatttctattctcaattaacccattcagcaaatgctacgcatctgctgagtccgtatagaagcatttgctgctggacgataggatggggcccgagctcgtcgtactcctgcttgctaatccacatctgctggaagg

SEQ ID NO: 642730 - DNA, 250 bp, Homo sapiens
ctataaattcagcgaggtgaagaacctgaaccttggttggtgtccagaaagtgtcagtccttttgcaggtggtttgcttttgtctgttatgactctcagttgaaacaggagattgctagcactggtaatacctcttactttttttttcttcattttcttctttcttcctttcgtttttcttttgagacaagtgcccgctttcttctgacaggctggagtgcagtggtgtgatcctgaatcattgcggccg

SEQ ID NO: 642731 - DNA, 1131 bp, Homo sapiens
tagtgaacactgtttcaaattagttctaatggacttaactgtttgaaaaagccagtaaaatagagagtggtaatactacctagatacacttacttaacaatctgacacaggcttaagcttatcaagtagcttctatagtacagacgatgttttctgacggagactgtgcatccgacgtgagaccagaggtaggaacagtttagtatacattggttttcatttctccatgttaacactatgacaataacaaaaggctgtagcgtgtgtacttattacattgtcacaaacagtacagtgggacgccattacctttacacacaatggtactggtaacctggggaaattaggttcctggttatagaggtctattcttggacattgcccattcccagtgaaaactggctagttcaccgagaaaagcaaacaacgtattttttcaccagtgactgtcaaaagggtacccactagcttactgcatgggcgcatgtggcctagcacaactcggaactcagcgtaagatataaaataagactaaattaaagtatttctacagtgtctacttgcaacacacacacggagtccaatgctcgggacttaaggcaggcctaatgggtattacaacaaagtggacaggccaattacatatccacagttctagtgtccgtaaaatttgtgcgtcacttggcacattctaggcttgccaggcgagcactgtatgccccccaattaactcccagcagggtccaacaggtccagtgtttaaactaacacattcttcagggcaactccttgttaactttgtctccaaaccgtgactgttaccccacaggcgttcctcaaggcggcttcgcactttcttaccctttcaacttggccctcccccgttttttaagccaacccggggttcgcttatccctttagcgactttttgtagttcgcaacccccaacggtaaaatctttgtcaaaaacaaccttttgggggggcaacctgtggttaacaccccaaacgttgcgcattaataacttctcaattcggggtacttgcgcggggcgcttaagccaacaggtgtgctaaaccccttatccgtggccaacaattatttgtcagtttcacgctatagacaccggcg

SEQ ID NO: 642732 - DNA, 472 bp, Homo sapiens
cccaaatttttcccgaaaaaaattgaaattaaagtcctttggggaccccagggggggttttttttctaccccaactgtttttttcccaaaaaaaagccaatggttttttattattgaaaaaaaaaaaatgagggctttaaaccattttttaaaaggggccctttaaaacttgtcaaaggtgccccaaattaaatgggattttggttttggtttttggaggggatgtttaaataacccctttttccggggggccattaaaaatggttttttgttgatttaaaaagaatattttggaaaaaaccttttagggggcaaaacccccctggggccccctggaaaaaaatgcccaataagtttttttggtttttctttggcccttgccaattggggtaagaaccaaagtgggtttgtttaaaccccctttttttggatcctttccaggtaaacccccaaaaaaaggttccctttggta

SEQ ID NO: 642733 - DNA, 353 bp, Homo sapiens
gaaaagttatttgctgggaaagtgtccaaaagcctgttttttaaacccaaactgggcttttggtagtgcctcatcccaacccatgaaggctgttcatgtttcaccccttttcttccttcaacaaaggccagggtatggagcagggcccctgaatttgctgtaatttggaaatgcttttttctttccaccataaacggtaaaaacaaaggaaagggtgaagggagtttgggcaaacaaaacataaaaatggtggggtggtggtggggtttaaaaaacttgttggtataattgtcataggacttgcctaaaaaattattaaaattacgggagtggactcagcttttagcctagga

SEQ ID NO: 642734 - DNA, 404 bp, Homo sapiens
  misc_feature (9)..(9): n is a, c, g, or t
  misc_feature (18)..(18): n is a, c, g, or t
  misc_feature (293)..(293): n is a, c, g, or t
aacaaaaancccatcccntggcccaaaatgggtgaaacaacgtctctacttaaaaataccgaaaatttagcctaggttgtggtggtgcacccccctgtagtccccagctacttgggaggctgaggcaggagaattgcttgaacccgggaggtagaggttgcagtgagccaagatcatgccagtgcactcccaggctgggtgacacagccagactctgtctcaaaaaaaaaaagagagacagaagagaagacacagagacacgtggaagagaatgccttattggcccagcacangtgcacgcctggcctgtaatcccagcactttgggagggcgaggtgggtggatcgcgtgaggtcaggagttcgagaccagcctggccaacatagtaaaaccctgtctctact

SEQ ID NO: 642735 - DNA, 444 bp, Homo sapiens
aatctttaagtctaaatttatatgtgaaagttaactttttttaaaaacctaaataaaattattttcctatcaaaaaaaaaaattaggataaatcacagtaaagtttattccggagcatcacagattgaacatcagttagagaagagtccttggggtctggaggcaattaaagactaccaaaagaaaatagtggagagtttaggactattgtcattgatgttttccatgatcccaaaccagctgtaggctgaatatatatgtaaaaagtagagttttatttatgaaaagtattgttctaagatggaaaaacccttcagggccatgctgtatcctttttacccttctatatgacatgtctgtttatgtcctttgtggtttcttcagattttctatactagcgtgggaactaatcagggaacctgcctggggtataaaatttgtgta

SEQ ID NO: 642736 - DNA, 952 bp, Homo sapiens
gacttccggcgtgtgcgtctgggtccgcgcgctgacaatggcggctctgaagaattggtgtcgcgccgggaacttcatcttcaggtacagacagttgtttgtgtgtccctgtgtgtggctaaattaagaagcggggtcctcagaatgggataagaccatggcacaaaaatgtgaacgactgggtggggagtaaccccgggtgtggcggtcccctattgtgcacagaaatcagagcctcaattccctttcagtaggtggacacgcatttgatgcagggcagagcagtgtctttgggggtaacccaggattaggcaccctcataaccttttctctcttcaggaccaatatatggcggttggatggaaggctaattagtgaaataatacgtaaacgggcgtgttaatacacttaaactttctctttgaacggaaaagtaataccagtgtttaacttgtgggaaaacagtgaattccaagagggaggaaggactgacgtgtgggcaggtgtgatacatagggagccaagaggtgaaggagtgacttcaaaaaaacgacagaggtgttacttgaggggtggacaacccatggggattgagtggaggtggggtctttcaaagaagaatgggagggagacgtgggactatcaagagggggggaagatcagggcctctaatacgcggcagggaacaccatcaaggttggggcaacctgccggggaacacggtgacaagggcctcccggaaagcgaaaccacggtggagaggccagattagagagtccggcacaaaccggaggaagggggccgctaggcggaccggcgccaccggggaggatgggctggacatggcggcccatcagggagcggcaggtccccgccggtgtatgtgccgcaagggagcggaaggcgcggtagggacgggcagggaggacacgggacggaacccgggtctaca

SEQ ID NO: 642737 - DNA, 713 bp, Homo sapiens
acgcgccttgcgctcgaccctgtggagatcctgcacgagcgcgagtacagtttgcaggctcgcatcgcacaccggggcaggagcttgaaaaccttcccgggtccctggccggggatttgcgaaccaaagcgaccattgagctcaaggccctcaggctgctgaacttccagaggcagctgcgccaggaggtggtggtgtgcatgcggagggacacagcgctggagacagccctcaatgctaaggcctacaagcgcagcacgcgccagtccctgcgcgaggcccgcatcactgacaagctggagaagcagcacaagatccagcaggagcccaagccccggcaaaagcaccacgaatacctcaataccattctcccagcatgccaaggatctcccggaatatcacacatccctccccggccaaatcaccaaaactgcccaacccaatccgcaaataccatgccaacaccggcccgccaacgacagaacaagaacaagccggtcgagcacgacgccatgacaagggtcacaacatcaaaaaagagaaggacaacgcacgccaaaccacgcgcccaaaacaccaggccacaggacagcccaaaaccacaaacccgccaagcacagagaccgacaccccgaccgccacacgagcaaacaggagcacacggcaagacgcccaccagaccccagcgcggtccagaaccgacacaacaacct

SEQ ID NO: 642738 - DNA, 354 bp, Homo sapiens
tcccccccccccccgggtaatttttgtttttttagtaaccccggggtttccccctgttggcaaaactggttcccaattcctggccccaagtgttttgcccccttccccccccccaagggttgggatttccggggtgagcccctgcgcccggcctttttaaacctttaaattcccttttaaagggaaatggcctgccccggggttggggctttttctttccaaaacccctcccttttctgtggacgggggcggaaatatcccccccctaggggtttcctaaaaaaaaattgggataatgtttggaatgtttccccgggctttcccgccctttttataaatagtggctttttgtta

SEQ ID NO: 642739 - DNA, 154 bp, Homo sapiens
gcattgaatgcagtatttacatatgcatcaatgcacatgcaaaaggtagtcttgatcctatggtaaagccattcaggttaacgtgacagacctttacacttcttatatttctaaaaattaatagtatatccacatgcttgcaagcagtgggagg

SEQ ID NO: 642740 - DNA, 156 bp, Homo sapiens
atcatcggcgccgacggcaagctgaacgagcagaccaccctcggtctggcctacagatacgccaccagcgatgtcgactccgacgacggcaacagcaccgatgtgaagagccaggctctgatcgcctacggcagctggaagcaaggtccggtctgc

SEQ ID NO: 642741 - DNA, 206 bp, Homo sapiens
ctcttagaggatccccgcgccagcaccttcggggcattccctgagagcccgccaccctgtctctccacggtggctcccgctggcccttccactttccttcccgagcccccagatacttgtacagcaagatcgtgcgtgtgtacttctcggaatgggcctgatccccagcactgccctcgtgcgtggtaccgcagctcaatccttcg

SEQ ID NO: 642742 - DNA, 1713 bp, Homo sapiens
  misc_feature (125)..(125): n is a, c, g, or t
  misc_feature (468)..(468): n is a, c, g, or t
  misc_feature (923)..(923): n is a, c, g, or t
acaccagcgatgagatcttaggtggagaatcggggcccagaacgaggtcccaccatcgagtgtcgcaagattcacgtgcacgaggttcgagttcatcacacactgcgtaacttgtgcctggcgtnactgtagagcttgcacgtatcgtggagagttgacgccctgcgcatatactgtggccgtactcaccctcggggcatcaccctccggcggcattaccgctgacccgggtctactgagactcgagatggaatgaggctcagtgcgaacgtggacagctcagatctgatggggatcctcaggtatgactgggtgctctccggtatgagcccttggtccatactcgtgcagtggcccattaccattgcatactcaagtccagacccaaagatatccaatggcccacactagatcgggggcccgtcgaggggggccccctctgaatgtgcacagcaaaccagtgcattnccacagcaagcacaatcgtgtacactcagcatgataacgcgcacttttccctgcataagggcacccgtggactctccaccaagaacccttgtgctctgcacagatgggcaagtagccttgatactcgttgcttggatcacatgtataccctccgcgggtgcgcaatctctagcgaccccgggggtgtaattcctagggcactgcgacgtgcgacttaccacggccgtgcatgcgtgtcgctctgtggagccgttgctttcacttgtctggagtgatggagagctggggcagttgagtgagcgtggggtgtgtgcactcggggacgctagctggctagccctagtcgaggcagcggccaaaaaaaaaacgttgatacgtgaaccggcagagaaaaaccttgtgatttaaacgggcacaatttaagttgggggttggcacgtgggccattaaatggngcgtggggccgccggctcacccggcaccgggcacactggccctggggagcctataggggagaacctggggggggccaaccgggggaacgaggcgcaggaaaatcccctggagacacccacgcaggggggccccaggcaaccccaacggctgcccgcggggtatgagaagcaccttcaccgcgagggtggcccaaccacgggtgcggggggaacacacccccgtcgggggggcaggaccaccaacctaacgccacgggacaccccctaggaacgagcgagcaaacatcccaaggaagagacccacatccccacacagcagtcgcgggtgccagaaaacgggactcgaccaggtcgaaccgactcacacactcggtcagtatcccacagatgggggcacccaccaaggggaggaggcatccaccctcggtgccgcactcgatcgtatataacaaccatggaaaaaggagcagccacccacataggttgatctcgcactataataacaggccgcaccctacgcacgccgaagcctacgaccgccagtacactccccacggccaccaactagcgcgcagacacgaccagacctcgactcactgagacctcacgactgtgaaacacatcgtagcatctcatactgcatacgatgctaggaaccgaccccgactgcgctacgtagcacgggaccaagcatgcagtcaagaaatagacaccaccctgactatagctgtctgccctcgtttgtttttttgctttcccttgtcgttctgccgccgtactcccaacacac

SEQ ID NO: 642743 - DNA, 902 bp, Homo sapiens
agcggggcaaccctcttgggtccccttccacaccgtggaagctttgttctttcgctctttgcaataaatcttgctactgctcactcttcgggtccacgctgcttttatgagctgtaacactcacggcgaagatctgcagcttcactcctgagcccagcaagaccatgagcccaccgggaggaatgaacaactccagacgtgctaccttaagagctgtaacactcactgtgaaggtctgcagcttcactcctgagccagcgagaccacgaacccaccagaaggaagaaactcccaacacatctgaacatcagaagggacagactccagacgcgccaccttaagagctgttaacactcaccgtgagggtctgcggcttcattcttgaagtcagtgagagcaagaacccagcaattccggacacaccctgtttcccccagccctctttggtaccaaagacacgtgagtcataaacatctagaatgtttcgtaacaagaaccaggccaggctgggcagggtggctcatgcctgtaatctcagcattttaggaggctgaggtgggcggatcatttgaggctaggagtttgaggccagcctgggcaacacgctgagacccatccctataaatgacaccacacaaggccggtgtggtgtaagcattcctgtagtcacagctacttgggaggctgaggcacaaggatccacttgcccacaggttccagggctgcagtgagcttggggccactgcagatccagccgtgggcagaaaccgggtttcaagaagagacacacagggggcacactattaggcacagctcagaaaagctctaaacaaacatctgggcgccaacggaaacgggccgcccatccgaaggggatacaaacacaaaggaacaataagcca

SEQ ID NO: 642744 - DNA, 926 bp, Homo sapiens
cgcagtgactcatgcctataatcccagaactttgggaggtggaggtgggcggatcacctgaggtcgggagttcgagaccagcctggccaacatggtgaagccccatctctaccaaaaatacaaaaattagctgggcggggtacgtgcctgtagtcccagttactcaggaggctgaggcaggagaattgcttgaacccgggaggtggaggttgcagtgagccgaggtcacaccattgcactccagcctggacaacagaatgagactgtgtctcaaaaaaaaaaaaaaaaaaaggtaaaatttttcaaatgggggcttcccagttcccggggggcagggccttcaaaattaacccttagggcatctcccggggattggtcaggtaattggaagggttgggggacaaaaaaatttatcaagatggtcaggtaattggacgggttgggggaaaaaaaatttttcagaaaggaagttttgggccctttttaacacagtgggtggagcgcccttgcgaatcaactttcaaggtccccgggggcgacaccagcgcccaggggtcttggacacctaagagggccatatcggaaggaacgttttgacaaaggccccccatttaacagggttctaagcccctgggcgcggcgcaaattcgcgacatccggacacgcaaaatttcttccacatcgcaatctcaatacagcgttcccattggggggacagttaatcgcacaagcggggataagcctcgggggacacaaaaggggccgggaccacatccaagagtgtgttctcggaaatggctaggggatagacggcaatactccagggaagccctaaaggtcgggcaaatcgcgagaaaccccacacattggacaacgcgcggtacacaaacacttaactcacaccacaaggggccccacatttaaca

SEQ ID NO: 642745 - DNA, 125 bp, Homo sapiens
tccacgtgcgaatatatatttatttaggaatgcacactaacagcatgacgataaactgtcattcacaaacccgtaccatgaagcacgtaatcttttaaaaatgtgttgtttttcacaaggtaatt

SEQ ID NO: 642746 - DNA, 446 bp, Homo sapiens
ggccattatggccggaatcaggtaaatggaaggttgatgattgaatatcaaatagggaattggatatgaaatctaagagtgtgagtcacttgcatatgtaaggcttggggttttggcatatttccttaggccacagggccaggtttctgagttgttccctttttcaggcctctggaaggccagtgccagcagcaggcctgggtttaaccttcttcccatgtgagctggaaaaactttggcatcttaattagcctggaatcatccacctgatccccaaccattgcctgttctcaatgaaccatgcttgggaaatggaagggcctcagaaggtcgaaatcccaggacctccaagccaaaggtgttaggttttagtgaaattggtgccaggtttaaccatacctgttgggcccagaattattatcacagcctttctgacccaaactttc

SEQ ID NO: 642747 - DNA, 1772 bp, Homo sapiens
  misc_feature (162)..(162): n is a, c, g, or t
  misc_feature (247)..(247): n is a, c, g, or t
  misc_feature (258)..(258): n is a, c, g, or t
  misc_feature (466)..(466): n is a, c, g, or t
  misc_feature (644)..(644): n is a, c, g, or t
  misc_feature (849)..(849): n is a, c, g, or t
ggtcctcggtgtgagagagcagtcgtggttgtctcctttcttcggccatggctgtgtgctccgccattgttatcagggtgatacaccagggacagagggtgaagatcattcataggctacaatacacttgtcacgattctgtcctagccttatttgtcaatngagttcctctcatatcagatgctatgcaatatgttggtgagaacgctatttagctatcatcgatcgcgagcctctctagacgcanagaattgctanagcagactacgcgccactagtcgccttgtccaacggtgagacatgtagcgtagtgtggttagctctagagatcgtagcgatagcatagaagctcatttgagtgtgctagcataggggcacgaatgcctggtgggggctaccgatagtgtaccacacgaaagttccagaccgtgctggggaggaagaaccttcagacctcgggccttcntatgactccccggggggtggggatactttgttgggggagaatcctcatgggtgggttccagcttcgagactggggcccggacacttgcttatttgcgaacgcaatacacacgaagagaacaccctttgtgtgcgcgcttcggctctaagagctaatacggttagccacagtcgaagcntatgcaaccgccgaaactagagatgactcagtcgtgcccactcctagtgtgttgctagagcctctagcgtgctgagccctgcagccacctataaccattgcgatctcgtgcgtgcgatgcctcgctagaaaaggatcctttccggttttattgcacgaggacagtttctcctgtaatacatatccccatttttagagatatacgntcccgagagggatcaacccggtttttgcgaaacggagtctccatcgcaagtaagaactagctgggccagtgccaatagccattcgctaaagggaagattggcgccattgtacaagaccaggtcgtgtgccacgcacgcaccgtcttgggaaaagattcggactgattttgcactagaaagaggttcttgcaattcgcccacgtcactttcattgcccgcacacctttgactcaccgtttttgtggggagacattgggcttccaatacccaggagcagaaaaaggctccggtgtttccggcaaccgaaaattgtcgcaaagggcgagatttacttaggccagaacccccccgcgttggcaaaattgcgcttaggtcctttacgtacatacatttcgcacggcagagcaaagagggaaggaggagcattctccttagtgctaatatgtgcgggtccgcggtgtttttagcaatagggaaagtgcggcgtggtgtcccccgacggttaatctgtgcttttgggcccatggactggttgcttttgggtgcctaggcgcgaggattaggagagtgtttaccgccgcaacggctttgggttggcgccttgtgatgagttaggccccgctagttgtcgttaatcagactattcaaactgcggggttttcagcgcaaccctgagaagatcctctgggggcgaccgtcgggcaacggtctggagagacacgaggattgtcaaccgcggtacgccagagtgtggttgacagagcaggtgccacacgcggacggacttaggggagagagaccaatcaacgacggaggagggacgtgttgtgcccctcatgttttgtttgcacacacattgaaagggcctcggtgttgaggtaagcgccctcagaaacgtctcatcaacgcaacaagcgcgatca

SEQ ID NO: 642748 - DNA, 729 bp, Homo sapiens
ccgatctctaggagtatgctgcctgattgccactgatgatgatacatactctctctagaggagctggactcccttaagtacaccgacctgctcagcttagtcaagagtatggtgcttcggtccaacctctggacatccaagttgatataagccttgacaggctacattaatcatgcacgcgcgggaactcagaatcatgatgtaagccaagcttctgcataactcttggagatgagactgagatacggaacagcatccagcaagaagcagtgagacaggcactgggccatgtcaccataacaaggagatggtgcgagactcgctgcgaggaccctgactcacagaatcatgtaaagcaggaaagtctggatctgatatctactgcacaagttccttctacatcagacgtgctccaggaagctgctagtgctgtatcctcctgttccacatgatacatgcgtccttcagaaggaaagatatatctctacacagatgaatactatcaacttgtataacatgccagaacatgcttcactgatccagactgtaggaagcttcatgtacctacttgtcagggaagacatgcatgatctgtagcagcgacacatcataagaggtggcgtaggactacagtgactccagaggaagatctctgtgctttttactcctcagcaacgaccttggcgtcttgtgccctgtgcatatacttggcctgatgggcctcggcct

SEQ ID NO: 642749 - DNA, 292 bp, Homo sapiens
aggcatgcaggcttggtgatagcttggtgtccagagatagaagtcttagttcaactttaaatttgcccacatgaacccttctaaatcccctgtgtgaatttagtctgtcagaaaaagaggaacagctctttggacactaggaaaaaaccttgtagagagagtaaaaaatttaacacccatagtaggcctaaaagcagccaccaattaagaaagcgttcaagctcaacacccactacctaaaaaaatcccaaacatataactgaactcctcacacccaattggaccaagcttg

SEQ ID NO: 642750 - DNA, 288 bp, Homo sapiens
ggaccgaggacctgcacgtcagtacccgcgactcctcaccttcgcctcccagctacaaggctggcaagggcctgcccattgtaggttctgtcatccaggtgagcttcttggaaagctatggcgaggctcacggccgccgagcagcacatcacaaacatgatggaacttgagaaggtgaagtgctcctgccaggtggtggtggccagaaaggtgcgggaggtggctgaaccacctcatccagtcctgtggcctgagcggcatgcgtgcataactccgtgatgctgggct

SEQ ID NO: 642751 - DNA, 517 bp, Homo sapiens
tctcctgattttgtacaatatctaggtgaccttctcttctttccattttcaaacgcttgatcattgatgctcccttttctcttctctctcctcctggaaaagagaaggaccaacatccccctttcccttcttcctgtgctgccctcaccctctgagctccgtcttaaccaataagtcgttccataatctgcagcagcgtcctaagacgatcagtgccttttgctctcaaagttcccccattagtgaactgtttaagtcagtttgtgaccaccggtgtccaatggatcacaccagtagcctctcttctcagatggctttaaggtctctcctaacgctccccgtgttcccccgtcgagcaagtgaaggggctcccggttcccttgatcaccctcagaaacctctctcgttcccctttggatggcatcgcccgtccccagcaccaatattggccaaagcctccttttctattcttagcgggggccccttctggccaggtaactaaatgtaagaagcattc

SEQ ID NO: 642752 - DNA, 189 bp, Homo sapiens
ttttttttttttgagacagagtcttgctctgtctcccaggctggagcgtagtaatgcaatcccagctcaatgcagcctcaacctcctcggcttaagcaatcatcctgcctcagccggtaagtagccaggaccacaggtgcttaccatcacacccagctaattgttacattctgtagagaccggggtctc

SEQ ID NO: 642753 - DNA, 306 bp, Homo sapiens
caaaaatttaaaaaaacccctccctttttattcagcatcagctattgaaaagggattttccttttttattcccgttggacatagccccacgccctgcctccgggtttgtcctttggacagagccccctgtcccctttggtggtccgggccctttttttgcagcagctcaaccccccgactccctcagatccccagggctgcagccggggcccggggttccttttttacccttttggatgcttccaagggggggcccttccaactaccaggattattaagattattaataaagatttcttttttcca

SEQ ID NO: 642754 - DNA, 409 bp, Homo sapiens
  misc_feature (264)..(264): n is a, c, g, or t
  misc_feature (409)..(409): n is a, c, g, or t
ggcacgagtccaggtcttatagagccacggacacgactaccttgttgtcaacacgctgagccgcgctgacattcacctggtggaacttctctactacgtggaagagcttgactctagccttatttccagcttccctctgctgaaggtgacccatttcacagtcttcagagaggcagacccacatctcccatcttgtgatcttgtatctgtgccctgtgactgagcatgtggtgaccccagccttctctcaggcctatggtgccncaaggtctccacaatgagctttcaggctccaattctgaggtgagtacactattgttatggagaggagatttgtagtgcatgctaccccgcacagagtattatgcctcctattatggggacacagggcccagcatgtctcccctcn

SEQ ID NO: 642755 - DNA, 108 bp, Homo sapiens
gttctagaggatcccgtcatagtcaacagtaaagctaaatttctagatataacaatattaaattgaacaagcatataaatgcatacattctcatggttacagtcactc

SEQ ID NO: 642756 - DNA, 111 bp, Homo sapiens
ttcgtatattctggaaggcaggaactgttcacatatgttaaattaagtagctgccagtattgcatgtagaaaatgatgaatttaacttgacaaatgacctccatccaattc

SEQ ID NO: 642757 - DNA, 316 bp, Homo sapiens
  misc_feature (16)..(16): n is a, c, g, or t
gcaggatccccccagntcttatgcattagtatgaacatggtgagactttcggttttatatttctcgtatttcacatgggtgaacgccggagcttttatttggaataataattttcctcctaaagcaaaacacattgcagtttaagtctctgactcttgcctttccacctgcgtttctccttgggccctgcttagctctgcttgaatggaaccagtgctgattctggagcctgctgttccaacagaacagggcgctagcatttcatcttgacacactagactacagctcagaagcccgatggagcagaggatgtcac

SEQ ID NO: 642758 - DNA, 512 bp, Homo sapiens
agcagctaatgaagagagccataagggctgggatcccaggcaccttaggaacagctagtcttttttattttgcctctccaaaaaaaatgttaaaggggacggtgtctcctgtcacccaggcgggagtgcagtggaacgatcgtggctcatggcagcctctaactccggggctcgggcaatcctcccacctcagcctaccgagtagctgtgaccacagtgtgcccctcaccaggctaagcataattttttaaattagatagtacataaacgtcccaagattagaagataaaaagacatgagggactccatccataatggtgttgggagtgtaagggtccagctccattcttcggcacagtggatatccagtttttacacaacactgtgattgtaatgaatgccactgaatcatacactcaaaaatagctaaaagggcaaatggtcggtaatctcttttaacccaccattttggaaatttatttataccaaaaacccatggaatagttaatgcg

SEQ ID NO: 642759 - DNA, 824 bp, Homo sapiens
tgggcgaagaggtaacagtgtcccaaatataatggcctaagtaacctaggaaatggttgacataacacagggttcaggggtgtcattaaagacacactttttgccttgacctcagttggtttgttgccttaggctatccacctctcgatcacaagagctgctgtataacttccagttttacatctttgtaaattgtatctcaaaggcagaaaaggccatttcgtctctcatttgttttatccatgaggaagatttttaacaaaagcctccagaagatttcccctcagtttccattgacttagatcaggttacagagaaaggcaagtgtctgacatttgggtctcgtgtaagaagtagacgtctgtggaaacagacaagaagctaaagctaaggtgtgaacgaatggaatcggcagcccagtgcccttcccaataagaacaggttgaccataatttactcactttttcttgtgtagaccattttgattatctgcagggtatacgtacagcaggtgccagagtgaatgttccttgtacattcttgagttacatgcttaatatgttccttgagaaagttctaaaagtggatgatagttgactggtcatagggcttacttatcaatttacccctctattagaccatatgatttgaaattcctcccctgcagattatcttggcaattgacattctatcgtaagtaggccagatcacaacaggctgtcgttcaaatgtttcgcttaaatactgagtagatgattaggaagaacaaacacgggcagacggtccaagaagacaagtaaatatcaggactcaacattttgttg

SEQ ID NO: 642760 - DNA, 103 bp, Homo sapiens
gcgttgtgttactaacggaagccactgctgtagtaggcacactgggcaccaaatgtgcaatgtgcaggtggtgatccccgttcctgacagagtcgtacagttc

SEQ ID NO: 642761 - DNA, 108 bp, Homo sapiens
ttttccttccataaaatattttttacttctatataacttctttttttatttttttgagatggagccttgctctgtggcccaggttggagtgcagtggcgcgatctcag

SEQ ID NO: 642762 - DNA, 303 bp, Homo sapiens
tgcagctctctctgatgcgtgctagcattccacatagatgtgacttgctcttccttgcttcgtgcatgatcgtgaggctccccgggcatgtggaacttgtaagtccaagaaatctctttctttggtaaattgcccagtcacgagtatgtcttaatcagcgggatgaaaagagactaataccaataacgtaacaagaacaagaatgaactaattgacatgaaggactcacctgaacaattacaccaaaagagcatcttcttctttctctaatctacacaaggcccgtccacaacaggccaattc

SEQ ID NO: 642763 - DNA, 820 bp, Homo sapiens
agtttctatttgaatacaggacgttttaaatggcagtatttcatttctgtcaattatgtgggtactttccacaaatctataaagaaggataaatggtaccatcatgtttattataatcctcaagagaaaatgtgtaatgtcaaaagattgaatgtgtagttagaaacacattatgtatcttaagttacatttctatcagtacttttattaatattgtgaaagaagagcagctgaatagtagttagcttaagtagtgttctccaagtactttgtgctatcaatgagttcttctcgaaaaaataattagttaggccaggcacaatggctcacacctgtaatgccagcccttgggaggccgagtgggcagatcacttgaggtcaggagttgagaccagcctcgccaacatggtgagaccctgtctctactaaaacgataaagaaaccaaaaaaaatattggccaggtcttgggggcacacgcctgtaatccccagtacccaaaatggcagaggcgagagagaccatttgaagccggggagggcaagggctggaggcagcgaggatctggccagggacccagctgaaagagggagactcgtggtcagaaatataattaacagggctcagttcaacgcctgagggtgggagccactccgtgtaccctagagggcgaccctctcaatatggggctctccccctgagtccaaattcagcggaagcacaaacaccgcttaaacgcggggggatggtaataacacccgaggtggacgggcacagctccgtcagactcacaggcgccggggggcgccaccgggggtctca

SEQ ID NO: 642764 - DNA, 134 bp, Homo sapiens
  misc_feature (89)..(89): n is a, c, g, or t
aaattaagaatatctgtttgtatacaaacagatgctacaagagcctgcttcagatacttacatagttttgggagcagatcgagattatnagcagccaactagcagctgctgagatagtcagtgagctgtatcag

SEQ ID NO: 642765 - DNA, 225 bp, Homo sapiens
acctcacagacaacacagacgtcagaacgaaaagcagactcgacagggatttactgacttcagcggggtctcccagtgggtgcaagataagccattagtgatgggaaatgactcctccggcgccacctacagtgtctacattgaaatgcaccccaggctccaagtccccacgaggctggagacgccttcccccgatgtcctcgcacccgcgccgtcgcctacgca

SEQ ID NO: 642766 - DNA, 1847 bp, Homo sapiens
  misc_feature (1537)..(1537): n is a, c, g, or t
  misc_feature (1539)..(1539): n is a, c, g, or t
aagcactagctctcccctcttcccgagagggaaaaagctctctgctgctcccttctagttggcagcaaggaagaaaacgagcaaccactcagtgtgggcagaagaagacactactctacctactagggagggagcactcccctcgggggataaaagaccaaccccaccaccccgcgcccttctgctgaagagagagaatactctcctcgctctcactcagcactaagtaatcttatcccactcaggcgggagggatagtttctctgatgcgcctcacttttctgtgctgtgtccgtgtctagacacaaacacaaagagaagaaagcgccacttcctccttcctccctcctgaggtagttcactaccaggcaggagaaaaaatcatctgcttggctgtcgcacgcacaccacaaaataaagaagtggggggcacaccacaacaagggctcgtcctcacgccaccactctcttcttggtgtggcagacacacgcccttgtgcgcccacccccacacctgctgtgggatgagtgtcatactacctgtctaggcagcagaagagaaacacgcacggagggaaggacaaacacggtggtctttttccggagcggcaccccaccgtagaggagatgacgaccctcccccccctcccccttcgcgttcttcaccacgagcggcgctcctctcttctgtggaggagcgtcctcctcccccccccccccccccccctcttaatattctccttcctcctcccccagcagagcgcaagccaccaccactcgtcggctgtagtcctccccctcctccgaggtgtggagaggagtggcgccaacaacacccctcgggtcgtcatcatcagacactgccgctgagaagagacaaacacaaaagagttgaggagggagcagccaacaacacgagagatagtactaacacacaactcctcttgtcttctaaaaaaacaacacgtcctcacacacaactctctctccccacaccctcctcttctctcccctctctctgcagagcgtcgggttgtggtcatcacacacaacaacacaacaaggaaggtgtcgtcctctcgacaacacacagaggagacgacacacaacttctctcatcatcacaacacccccccctcatagagagtgtctctcagagatttctctcacacagcagcagaggtatactctcttctccacttctcttctctctccctctctcctcctctgcagagagagagtgtcgtctctccacaccacaaacatgtgtttccaacacacgctgtctctcttctctcctctcacacagcagagtgcgggcatcgaacacaacacacaacactctctgtgctcgcaacacaacacactgtcaacaccacactctctctctctctctctctctcacacgcggtgacacacacacacacatatctctcttcgcgcacactctcttctcctctctgagagagatacgcgagatgatcatacacacactctctccacacacactctctctctatataataattctcacaanancctctctctctctcgggagagagaccacactctctccctctctcttctggctctcctctgccccacctctgtgggtctctctcccacaccacacacacaccggctctctctctcctccttgctccacagacccccacctcacaaggtgttataacacacacaagaaaaagtctcggagagagagatctctcgaacagaaaaattagagagtttctctctctctctttaaaactccccccacaaacccccccccctcccccccctctttttctcacaaaaaaaaaaataaaaccttctctctctcttta

SEQ ID NO: 642767 - DNA, 222 bp, Homo sapiens
tctcagcctgacctctgaatagatgggattataggtgccgtgtgactcaactggctaatttttgttttttttttagtaggggggtgggggggtctcaccatgttggcctgggactggtcttgaactcctgacctcaggtgatcagcatgccttggcttcccgaagttctgggtttgaaggtgtaggccaccgatgcttgcccgtgccaagcgtgctacttca

SEQ ID NO: 642768 - DNA, 406 bp, Homo sapiens
  misc_feature (54)..(54): n is a, c, g, or t
  misc_feature (60)..(61): n is a, c, g, or t
  misc_feature (88)..(89): n is a, c, g, or t
  misc_feature (116)..(116): n is a, c, g, or t
taggatccccgcacgctatccggttcaataaatgatgtggggatagctgacagncatagnnagaagaataaaattggacccctatctnncaccatatacaaaaattgactcaaatngattaaagaattaaatgtaagaccttaagtataagaatcctagaagaaaacctaggaaacaccattctagacattggtcttgggaaaaaaattatgactaagtcttcaaaagcaattgcaacaaaaacaaaaattgacaagtgggacctaattaaagagcttctggacagcaaaagaaaccatcaacagagtaaacagacaacctacaaaatattcacaaatgatgcatccaatcaaggtcgaatatccagaatctgtaaggaatttaaacaattgaaccggatagcttg

SEQ ID NO: 642769 - DNA, 1254 bp, Homo sapiens
gttatatgtgtagcttcagaaactaagttacaacaggccaggcaaggtggctcacgcccgatagtcccagcatctctgggaggctgaagcggctggactagcatgaggatcaggagcttcgagaccagcctggccaccactggacgaaacccgtgtcgtctacaaaaacaaaaacaacaaaaaacacaaacaaaacaacagaggggacggcgcgacccagggcaccccgagaaagaggacactaacgacaatataggacgcgggcggagggaggagccccactccacgcaacaggagagaaagcgcggacaaaacgcgcgatacaccacgagaaggaacccggggggccaagaggcaaccgcgcgcggagaggtgacctccacacacccgtaaacacacagaccggccgaccgagcggccgaaaacagcagaagcaggcgaccgacaacaaatgcgacaacacaaaccagccagacgcacacagcgagagaacaaacaaagaagagcgaacatacaaacacaaagaagcggggctgaatcgcgcagcgcgtccgcaccacaacgcacatcactaacacgaacgcacaccacgcgcgaccgcgagggagaagccaaatacaacggcgacaagaagacgacagcgaccggaagagaacgaaggggacacgagccggcggggacggcgcggcagcacagccgcgtgcaccaggagcacggcagcagcacacacggcagacggcggggggcacagcaggagcacacacaaaccgagacggcggaggcgacggcacagagcggcacgacggcccacacgaaacggcgcggggaccacatgacgagtggagaggcagcgctacagcctgaacgacggggaaacaacaaacgctggggacaggggaagagcacgaagagagaggggaaagagtaggacagaacaggagaaaacagcaagcacacccagacagggcatgcggggcgagggacaccggaggacagagagagcgaagacgaacgagaacaagcaagcagcggccggcccagacgaacaccaaccgacgagaggaagcgagagagagcccagcaccgccgagaacgggcgggatgaggggagcgagagcaaacacgaacacgcccggagagcgggagggtgaaggggagcacgaggacagaagacaagaagaaccgaagagagaggacagcggcacagcaagaccgccgacacgggatgaggaagggcacagaggacagcagaag

SEQ ID NO: 642770 - DNA, 1538 bp, Homo sapiens
  misc_feature (1537)..(1538): n is a, c, g, or t
tggactaaaaagccaaggtctttaattaaagggtcccgaaggggtttccccatggttatttccatgccagccagggctccagggaacagcctctctctcggggaggttaccgggtgtggctgtgggcctgtggggcccggttagcacaggggcttataagggtattcgtgccgtgcctccactctccagcggggccaggaggcaccagcaggaagtgccgccccgaacttcggctctctgtggggggggccccttggtgggcctgtgcccttctcctttatagcctccagtgtgtgtgtgcccggggaaattccccaggttaatttcccggtgtggcgcagctctcgcggagcccgtgggcaaacttatagaaaatcttccctctccaaggttgttcacacctccgaaggaagaaagaaagcgcggtcctccttgagagagagggggaagcgagagaaccagaggggtgtccagaagtgtggtggcaagacagaggtgtgtacacaaagagagtggtgtcctctcccaagccgtggtgggggctctctctcctctcgtgtggtccctctgaaacggtgtgggtttctcgggtggtaactaacactaagtgtcagccgagggctctccccccaaaagataccccacgcggccttgtgtctcccgtgtgtggtataggaggaagaaaaaaactactgagagaactataatcaagaacacggtgtgtgagggctcccccaagagggtgtgcgtggtgctccctacaacaccacaaagacgggggaaaacaacactctgggtgggaggagaatcaccagaagggggggggagaaacacacaatatttaaataaaaaaaacctactagggaggaaaaattctaaagcgcaaaaagacctccaacacagagtgtcgccgaggagaaaagaaacagaagagagggaggaggggagagactaacagacacaaaaaaaacccatttttaatgtaacaaccaacaaaaaaccgaggggtgtcgggtcgggggaaaacaacacacacgacaaaaggagggagacgactttgatgatgtcgccaaagatatattaaaaaagacccccctgcggaggattagcaacccacggaaaagagggacaagcaaaacaaatacataccagcggcaaaaaatggtgagtcacaaaaggagcgaccacacggagaagaattgtagggagcaccaaaagtgggcaccaaagggaaaaaagaacggccccggaggaggggatttcatgaaaaaccaaaacttgtgtgccacacatatataatctctcctgaggaagagaaacaaacaacaattctttaggtcggacacccacggaaggagaacaccacaagattcaccccggaagaagagagacaccctcgcaaatgaagagaaatcaatgatttgaggggagagcctcctgatgagcccccaagaatcaataaaaaaagcgggtgcagcaaaagagcgaagagctagcagatcaatcagatgacaacacagccgcccaaataatatgnn

SEQ ID NO: 642771 - DNA, 779 bp, Homo sapiens
ggggggagtacctattttccatgagggggatgaaatactggagctgttgtagaagaaaaacttctgatttaatacattcttagcccaagagggctgtacaaaagggaaacacatgtggactaaaaaagatgctgggaaaaaagttgttccatgtagacatgactggcatcagactggaggtgaagttaccatttcagtatatgctaaaaactcacttccagaacttagccgagtagaagcaaatagcacattgttaaatgtgcatattgtatttgaaggagagaaggaatttgatcaaaatgtgaaattatggggtgtgattgatgtaaagcgaagttatgtaactatgactgcaacaaagattgaaatcactatgagaaaagctgaaccgatgcagtgggcaagccttgaactgcctgcagctaaaaagcaggaaaaacaaaaagatgacacaacagattgggtgggagatggaaggaaggctattacattatttccgaattttaatactgtgtgaagtggtggcttgctgcgtgaatcttttggtttggtggtggggtactgagatggggcttttaaaggttaacattagggttcttaaaagccaaaaggaggttggcttttttgggcccctcatctttcttttggggtatggaagaatgattattcatttttcccttctgggaggaacataagtggggcctatactgaaaaaggtgggaagaggccataacatattggcggattttttgttttttctggtaacgttggactttttt

SEQ ID NO: 642772 - DNA, 260 bp, Homo sapiens
gaggagacccattctataccaacacctattctagatttttcggtcaccctggaagtttatattcttatcctaccaggcttcggaataatctcccatatgtaacttactactccggacacgaagaaccattaggatacgtaggtatggtctgagctagtgatatcaataggcttgctagggtagatcgtgttgagctgcagccatatatttacagacagaagtagatagtcgatcgcacgagcatcttttatctccagcag

SEQ ID NO: 642773 - DNA, 657 bp, Homo sapiens
  misc_feature (28)..(28): n is a, c, g, or t
  misc_feature (77)..(77): n is a, c, g, or t
  misc_feature (117)..(117): n is a, c, g, or t
  misc_feature (122)..(122): n is a, c, g, or t
  misc_feature (145)..(145): n is a, c, g, or t
  misc_feature (162)..(162): n is a, c, g, or t
  misc_feature (179)..(179): n is a, c, g, or t
  misc_feature (196)..(197): n is a, c, g, or t
  misc_feature (214)..(214): n is a, c, g, or t
  misc_feature (230)..(230): n is a, c, g, or t
  misc_feature (235)..(235): n is a, c, g, or t
  misc_feature (305)..(305): n is a, c, g, or t
  misc_feature (309)..(309): n is a, c, g, or t
  misc_feature (321)..(321): n is a, c, g, or t
  misc_feature (339)..(339): n is a, c, g, or t
  misc_feature (385)..(385): n is a, c, g, or t
  misc_feature (394)..(394): n is a, c, g, or t
  misc_feature (457)..(457): n is a, c, g, or t
  misc_feature (493)..(493): n is a, c, g, or t
  misc_feature (495)..(495): n is a, c, g, or t
  misc_feature (643)..(643): n is a, c, g, or t
catacatatatatatatatatgtatgtntaaaatttcacagggatatgcttttttttttaaagactgaatgtgttcnccatttagcctgtagatttatttccattttccaaaccccngcacncagagaccccagcccccaggagnagggtgtttggggaccncccaatggaaaattttngaggcccggatgaactnngccaaagggggagaggntacagagggagggganatttncagctaaaaaaaaaaacggggggagtttggactgatcaacttgagatttaaaaactgctattccttttgntctncctagcatcccnccccaccctctgagagcncctcaggcttagatagtgaagtgaacaaatgccaggggcattttgnacttaagtnccaaagtaggaacattttatacttttttctgtattgtaataggtagttttgtatgaaatcttncccccccccccggtgtactgcattcttcccagcatngngcattttccctgggcttatttgaaaattttactgttttatacaagctcgtttagtacatttttctatgttttaccacaagttacaatttgaaaagaaaactattttttttaaatattccattgttaactgaatgttactgtttccacnccagcaactacatg

SEQ ID NO: 642774 - DNA, 126 bp, Homo sapiens
gctagaatgaccgtgtgaagctagccctccggctccaagaaggttatctcctcagccaacagagctgtggttgagtgtggtggctggatgtgtggccgaattgacaaacccgtcttgcgggggctg

SEQ ID NO: 642775 - DNA, 544 bp, Homo sapiens
ggtcgcccttttttttttgttttgggtcaaaattagtaaactttatttaaacttcaaaaaaataaaataacagacaaaaggcagttaagcttggttctccccgaggatcagtgtaaccactcacagaggaactacccctaagttaaaataccctttacccgccccgcattcaagccacaggcaaggaaggatctctcaatttgggggacaggcagggggtgtggggtggggtaggagtgagaacaccatggggccagtgagttctaccagcacaaggtggagaacaagacaagaatctgcatcagaaacgggactccagaagttcaccgggagctcgtgccacaaggctatttatgtacaacgggagctggggctggggggtagacgccccgtgagggaggcaagaactggcacggcagcacggggcaagctggcccggggccctagcccgttgccgcaccccaggtgccctcagttctcctcgtcactggtcatccggggctggatagccgggctggtgagactggtaggtggggctaggtgg

SEQ ID NO: 642776 - DNA, 127 bp, Homo sapiens
tctagaggatccctttagcaactggttgagactgagctatagttaatctgttgtgacattctggatgtactgcacaaacacctcattccagcagctaacactggcgagctccaaggttttcctatat

SEQ ID NO: 642777 - DNA, 1248 bp, Homo sapiens
  misc_feature (280)..(280): n is a, c, g, or t
  misc_feature (894)..(894): n is a, c, g, or t
gcagcgttccagcccgggttcgtgtcgccatggagtgcacgatcagacgtgagccagtgatgcggccaactgcagcaggcgactggcgtccggcctgcagatgagtgcacgttcacggtacggcggaggctgcaccgcgctcggaagttgcgcgtcccacacgaccccactcgcgggacctctccgtgctactttagcaggggtggagtgaacgttggtgcgctgccagggctgggccatctgcgcggagccaggcgcggtcacgagcccacttgaaggngttgcttgtgtgcagctggcggcgctgggaccccctcgacgggtccgccgggcggcctgcgaaacgcgatgcgcacgcttgtccttgcatgaaagctcccacaaggcttagactttccctcctctgggaatgagcgctcctagtcggaggaccccgactgggccgccccccgcattccccctccgagtgtaccccatatcgtcgtcgtgagtgcgcaccgcgaaggggtccgctcaatggatgggcacgaaggtcggtctacggtctgcacaccgcgttgagcaaacagcaaagggggctgagcatttcagggtcccccccccggttgtgggactgtgtctcaaggggaagttatgcagacgccgttgctcccccaggaagggcccccctcggaaagggttcgcgcagccggggtccttcgcagtggctctcgaaaggcgaacttccgttgcggtacgtaaaacgttcgtttcgcaacccttttgtgcgccgcgctttccgcgcaattttgggacccgaaaaccgttgggtgtctccatcgcgccatggcggcctaccgggactttgccattgccactcctttgagcggccattgtggttgttggtgctcagangaggcgaaaagttgggagcttggccatttcccaatttggaaccacggccatcggttgtgccgcgcctttcaaaggacgccaccattttgctttcggaattttcccatggcgggaagagaatccctggttccgccttgatggcgggaaaggagaactggggacttgccatggttgaggccaaagttttggtcctaggctaggaattgcggccgccggtccacagttagaaataattgggccgaggccccaaaaaaggcgtcgtgcgaacgctgtggggcacactgcggtgacaacatccaattcaaaacacctagaggcgcgtctggttgctccccaatgtgtggcttacccctt

SEQ ID NO: 642778 - DNA, 534 bp, Homo sapiens
ggccaacttaatatatatatcatcttcatatataccagaaaaataggtggccattactaaggtggtattccatcccaaggtatgtagaagatgtcattgttggaatgacggtgttcagatagcactttgtagcagatagggtaggttacttgtatgtggtggggtgtgaaatcataattcaggtatttacaaaaagaaaaagtattcccaagttacgtacattgtaatgttttttaaaacttatttgtaaagtataaacttgcccagtgtattgcattgaactttatcttcaaaatcaaatagaaaatagaaactgagtggaatgtaggagcttttccatggctagtcatagtaaaggccacatccagctgtacaatatgggaataacaaggctttaaaagctatctggggagagaaagggcaatgggaatgaaagaataatttagtgttgtgttgttgtaatgtctctcctctaagtcttcaatttaaagagaattctgtattctaatttgagacatggtcagaggaagttaa

SEQ ID NO: 642779 - DNA, 112 bp, Homo sapiens
ttttcggcgcttctctggtcgtggagccgggcgttgcatgctagtgcctagtgggccacttttggttacgtcagtaactgtgctgctgcgcggatgaagccgagatcgcctg

SEQ ID NO: 642780 - DNA, 107 bp, Homo sapiens
ccaatttaaagttgaactaagatctatcttgtgagaacagctatcaccagacgagctacatatgacggtgtgctcttttagctgtccttaggtagctcgtctggtta

SEQ ID NO: 642781 - DNA, 731 bp, Homo sapiens
  misc_feature (570)..(570): n is a, c, g, or t
tagcaagctagaggggctcgattggccgcacccggtagcgggcggagagcggcatcttagatgcgtgcatacataaaggctctggcgggattggctgccgcgttgtgggctggtccgcatgcatctgccagcgtacctaggggtcgagagtccaggaagctccttcgcccgacgggggcggggaacctcacaagacgaaccggacgtcgctgtctccgagtctgcaaggaagacagttaaattctggtaaatagcgacgtcaagtactcgatggccagcagtcttaaatgaagatcgagaaggagagcagaagtcacgtgtcatgtgacaggagacctttttgcatgcccgagaaaacgagacgtctgttagacccactgatatcagtgaggattgtcgcactgggcgctgggataggctgtcctctttacgacgaaattcggaggggtgcaagaacttgtacatcaacgatgggatgtggtcttgatcgtctgcaatcgggccacatgtactctgcgatgatcgaggaggtatggaggtacgagacttcaagactggattgtgtacagnactcgtgaacgcagatgcaccaatcctaggcatgtggcccgccgttctcgttgtcgttcatctctaacggtggccgatatcgagctcgcgtaaagctagcttttagactagtgccagagggcaaagttacatggagcagggagtgttgtgtagacaagaca

SEQ ID NO: 642782 - DNA, 1334 bp, Homo sapiens
ctgagtatcttccttgcgctcgctggtgttgcctcctcacgtgtgcgctttgtcttttcctcgtggtgcgtcctcttgtcactgccctctctggtgctgggtggttggtctgtggttactgtggcccttgtttttctgacttgggactgtgctctctgcacttcgagtgcgcgcgcgggtacttgtccctccggcctgttggtcaatttctgggggatcccctgtggcctcgggtattgcttgctctcgtcacttttgtagtgtgcgtcggttccgtggtcgcgcttctctcctggactattgaagcttgcttctctatgtgactgatcgtgtgattcctcactgggctgcgttgtcgctgagttctttgtggtatcacatgtaaaactgcgcagttctctggtttacacgccatcgtcctaccatgcctaatgcggctggaagattcgccttagtgtgcctctacgtgtttctggcggtatggtactgctgggcagccccaaatgtgcggagcatattcagttccgccaagcttgtttgccccaatgtccccggtgacaccgctgactgtcccttgcacacgcaattgtgataaccgctctgtgcttgcactctactgttcatctgcctgcaggtactgctggagcatggacagtacaaccgatccacagctactatggctaacgccaacggtttcttgcgccatggcctgagggacctcggtccgtcccaatgttccgacggtcaatgtgcgtctcatgtcctcttgcacgcagattagggctccatcctcggacgtacaggcacccttgcagactgaacgtcaagcccatccgtagacgaagctgacccaggaccaggtatcgatcggaccgttcaaatactcttgcccaggatggctctgactgttctgtctctcgcctgatgctggaagaagcgagcaatacatctggccatcatggtgatccatccctccaacccccacaaggtccctcttttggcgagatcaactggggggccttttggctgtcacgtccctgtgcattggtctgacccccaggcccctatcccccagcactggttcctcctctccccagcctagggaacgatgtctcactagtccaccttccctatcgggtctaggggagcaaggggttggaccaggacagtgaccttgggaggaaggggactactcgcgcccacgatcagggagagatgtgagcatcccgggtcactggatcctgctgctgtaatgggaacccctacccaccatttacttctccacctcccgtcctccccatcattggtttttttttgtaatctcaactgtgccg

SEQ ID NO: 642783 - DNA, 1291 bp, Homo sapiens; identical to SEQ ID NO: 634055
  misc_feature (708)..(708): n is a, c, g, or t

SEQ ID NO: 642784 - DNA, 355 bp, Homo sapiens
tgtggagcccccagcccggggggtattccggtcctctattaattccttaagggagcctgtcctaaaaactatggctttaatgcagccaggcctgcttatctccccgagggagtttttccaaaggggcataaaaaagccaaagaattttagaagatgaatccgtcccccccatttttctgggaagtttgcccgggtagtgaaagggccaccgtaaatgctgaaaccggccctaaaatgctggctttgattaagggattataggccggcccccttggaagcttttagttggcttttgcccaaggggggtaattccgacccccttatggtttaataaaccttttttttttaaaatgga

SEQ ID NO: 642785 - DNA, 463 bp, Homo sapiens
gggctgcaggaattcggcacgagcaccgaggtcgcacgcgtgagacttctccgccgcctccgccgcagacgccgccgcgatgcgctacgtcgcctcctacctgctggctgccctagggggcaactcctcccccagcgccaaggacatcaagaagatcttggacagcgtgggtatcgaggcggacgacgaccggctcaacaaggttatcagtgagctgaatggaaaaaacattgaagacgtcattgcccagggtattggcaagcttgccagtgtacctgctggtggggctgtagccgtctctgctgccccaggctctgcagcccctgctgctggttctgcccctgctgcagcagaggagaagaaagatgagaagaaggaggagtctgaagagtcagatgatgacatgggatttggcctttttgattaaattcctgctcccctgcaaataaagcctttttacaca

SEQ ID NO: 642786 - DNA, 1622 bp, Homo sapiens; identical to SEQ ID NO: 634014
  misc_feature (708)..(708): n is a, c, g, or t

SEQ ID NO: 642787 - DNA, 529 bp, Homo sapiens
cagtacatcatacacttggtttatttggagacagcttggctcggtcgcccaggagggagggcgggggggtgattcagactcacggcaacctccacctcgggggttcgggcaattctcaggcttcagcctccggagtagcggggataacgggcccatctcaataaaatttaaagaagtaagctgaatattccggccggtagtcctagctactggggaggcggaggtgaagggatccctggagcccatgagttggaggcggcagggagcggggagggtgccaccacactccagcaggggtgacagaacaagatcttatctcttaaaaaaagaaaattactactaataacggcatgggtagtataaaatataacataataggaaatatctaaaagggtataacacacatactcaaataatctaaaaaactccactcttaattccagtaagtataggcatgaatatattccatccatcagtccatctatgggccggtccattctgttattctgggccagcattcccaaagggt

SEQ ID NO: 642788 - DNA, 1107 bp, Homo sapiens
  misc_feature (1107)..(1107): n is a, c, g, or t
tttgaagagagagttcaagagggcgtgagacttctccgccgcagacgccgccgcgatgcgctacgtcgcctcctacctgctggctgccctagggggcaactcctcccccagcgccaaggacatcaagaagatcttggacagcgtgggtatcgaggcggacgacgaccggctcaacaaggttatcagtgagctgaatggaaaaaacattgaagacgtcattgcccagggtattggcaagcttgccagtgtacctgctggtggggctgtagccgtctctgctgccccaggctctgcagcccctgctgctggttctgcccctgctgcagcagaggagaagaaagatgagaagaaggaggagtctgaagagtcagatgatgacatgggatttggcctttttgattaaattcctgctcccctgcaaataaagcctttttacacatctaaaaaaaaaaaaaaaaaatcaaaaaaaaaaaaaaaaaaaaaaaaaaaaaaaaaacacccgggggccctctattgggggggggggaaaagggggcaagaaaggggccacgggcccaaaggggttccgggacccagattctgggcacacacgcgcgaacaccgcggcggccaccaaaagggagccgccaaaaacccgaaaccacgcgtaccgcgataagaccgcgcacaccccacgcgcacccccccggcacgccgcgcatccacctcgcgggaccaacgcctgcaaccaacaaccagcgggcacgagagacccctccacaccgcccgaactaacaccaccctaccggcgccggcagacgcccagggcgccacaaaagcagaacgacgacggcacacgcggccacgcagaagcaagcgaccgcgcgaggagagggcggcacaagagaaaagaggaagacggaaccacccagacgcgcaacgcccacgcaaggctcgcacaggcggataatcggcacagcggagacaacaaccagccgaacgacgcgacacatccggcgcgcctcaccaacgagcacaacacctgacgacggcgccacgcacacgcacagacggcgacccgaaccatgcgacgccagccagaacgagcacacgcgcagcgttccatcn

SEQ ID NO: 642789 - DNA, 827 bp, Homo sapiens
taactaatgctaaggagttatttagattaacataggtgattctgaccaccaactcttccttcctgaatctcctatagaatctgacagtctcagagagctgtcatagcacatattagactaatatgttgacactttgagagatgaaaacttgcaaggagagaaagtagcctacggcacagttatgtttatcatcagtaggtggcatcctcatttcctcaggtagccccccattttcacatgatgtgtttgaaggttaaatgccaccaagaagtgctgagtcagctataaaactaagtccctgaattccatggcccttttaaatatgtaatcagttcaagattgaaaataaaaaattaagcattttcgttaggtagagctagtgcgtatttgagacggagtgtgcactcttgttggccaggctgagtgcaatggcgccatctcagctcactgcaacctctgcactcccggattcaagcaattctccttcagccctccaagtagctggggttacaggtgcccggcacatggccagcctagttgttagaatcgacagtagagatgaggtttcaccatgtgggcaggctgttcttgaatctcctggaacctcgtgatcacccccaacctcggactatccaaaggtgctggagttacagggcgtgagcccacggtgcccgagcttggccgtactaaaaataccggattattccaaaagaaggaccctggaaaagaagtgctcgcagggaaacacgggaagataaggcccacattgggggagaaccccaacaaaaaacaggcatacagggcgacaaacagcaacgggaaaaacg

SEQ ID NO: 642790 - DNA, 621 bp, Homo sapiens
  misc_feature (23)..(23): n is a, c, g, or t
  misc_feature (25)..(25): n is a, c, g, or t
  misc_feature (621)..(621): n is a, c, g, or t
ccgcccacgcgtccgcggacgcntnggcgccaccgaggtcgcacgcgtgagacttctccgccgcacgccgcccctccgccgcagacgccgccgcgatgcgctacgtcgcctcctacctgctggctgccctagggggcaactcctcccccagcgccaaggacatcaagaagatcttggacagcgtgggtatcgaggcggacgacgaccggctcaacaaggttatcagtgagctgaatggaaaaaacattgaagacgtcattgcccagggtattggcaagcttgccagtgtacctgctggtggggctgtagccgtctctgctgccccaggctctgcagcccctgctgctggttctgcccctgctgcagcagaggagaagaaagatgagaagaaggaggagtctgaagagtcagatgatgacatgggatttggcctttttgattaaattcctgctcccctgcaaataaagcctttttacacatctaaaaaaaaaaaaaaaaaaaactcgagtttttttctttttttttttcatattaaatataaatatatatttttatgtatttggtaatacatgcatatatgctcatttttggctttgaatacagggtacttactacactttn

SEQ ID NO: 642791 - DNA, 781 bp, Homo sapiens
ggggctctaaggagacactttttttttcctccctccttccctcctctcctcctcccttcccttcccctctcctcccctctctcctccttcccccctcggtccgccggagcctgctggggcgagcggttggtattgcaggcgcttgctctccggggccgcccggcgggtagctggcggggtggaggaggcaggaaccgcgatggcgcctcagaaagcacggcggtagggggagggggcgagctcggaggcccagcagcggggtcctgggggaggctggcttcagagaggttacggcaggaagtgtggcggctgtgcgacggcttcgggcggcaaatccaggcaggcgggagctgtggagggggtggcagttactcggacctcctcctcctcctaccgcggactggcagatgtgcagggggctgcgtgatgttaccggatgaaagaagccgaaaatggagcacgtccaggctgaccacgagactttatcctccaggccttgtgagaagccaacacagatctatagatatcttcgaactcggaagtctcatagcaccaatattttggcacagaactcattacttacatgtctcatctgaaactccagaacaaacatcaaaaggacaacatttaaagttgatgatactgttactcaaaagtagcagaacattgaaggagagcaagaatctcatagctagtcagctcatttgagataacgtaaatggtactccacaaaattgtagccatcccaactcgaaatgaacaatcgtaccggaactgctga

SEQ ID NO: 642792 - DNA, 469 bp, Homo sapiens
  misc_feature (29)..(29): n is a, c, g, or t
cttcgaggccaaagaaattcggccaaccnaagtgtcgccaccgaggtcgcacgcgtgagacttctccgccgcagacgccgccgcgatgcgctacgtcgcctcctacctgctggctgccctagggggcaactcctcccccagcgccaaggacatcaagaagatcttggacagcgtgggtatcgaggcggacgacgaccggctcaacaaggttatcagtgagctgaatggaaaaaacattgaagacgtcattgcccagggtattggcaagcttgccagtgtacctgctggtggggctgtagccgtctctgctgccccaggctctgcagcccctgctgctggttctgcccctgctgcagcagaggagaagaaagatgagaagaaggaggagtctgaagagtcagatgatgacatgggatttggcctttttgattaaattcctgctcccctgcaaataaagcctttttacaca

SEQ ID NO: 642793 - DNA, 469 bp, Homo sapiens
  misc_feature (18)..(18): n is a, c, g, or t
  misc_feature (24)..(25): n is a, c, g, or t
  misc_feature (33)..(33): n is a, c, g, or t
taagcttacggctaggtncgggcnnggtgttantcgccacgcgaggtcgcacgcgtgagacttctccgccgcagacgccgccgcgatgcgctacgtcgcctcctacctgctggctgccctagggggcaactcctcccccagcgccaaggacatcaagaagatcttggacagcgtgggtatcgaggcggacgacgaccggctcaacaaggttatcagtgagctgaatggaaaaaacattgaagacgtcattgcccagggtattggcaagcttgccagtgtacctgctggtggggctgtagccgtctctgctgccccaggctctgcagcccctgctgctggttctgcccctgctgcagcagaggagaagaaagatgagaagaaggaggagtctgaagagtcagatgatgacatgggatttggcctttttgattaaattcctgctcccctgcaaataaagcctttttacaca

SEQ ID NO: 642794 - DNA, 450 bp, Homo sapiens
cacaagtggggcatgcttgtgattttcatcttgattacacagatacactttttcaccaagacggggctgagtaaaactagtgccactccgagtaagtagtatctagcagttgtccacctaccgtgtgtcttccctctgcaggagtccagggtgtagatggtggccagccccccggacaggattccgaggatctaggtgtcctcgctttcaccagtttcgactggtctcctgagcctccgtattttgattcctggatcccacggttgccacaacactcccgtaagacagaagcgcccacacgtttggggttgtgaagcccattcgcaagaatacacgtttgtcactctccgaggagcttcgtgtgttttgatacaaatataggttctagcttgggctacaatcatacaggaacttactttgtggttgtttacgacgtcccagacagcccca

SEQ ID NO: 642795 - DNA, 710 bp, Homo sapiens
  misc_feature (90)..(90): n is a, c, g, or t
  misc_feature (270)..(270): n is a, c, g, or t
tcgtttaaggagaactgaagttttttgtcatctgctgtggctgttctatgaaccaccttcttctttctgcgagcagttcctgtgcccacncaatgcgcacttgtgcctgcagtttggcgagtttttcctggttcatgattgtttctttcattctttgttcgggagcgaaaattatacgggtggcccgcgtcgggggactagggttggtgctcaaggggtctcgcggtggaccaccgtgagattatggcgcacacacgcggggacgcaagncaccgaggtcgcacgcgtgagacttctccgccgcctccgccgcagacgccgccgcgatgcgctacgtcgcctcctacctgctggctgccctagggggcaactcctcccccagcgccaaggacatcaagaagatcttggacagcgtgggtatcgaggcggacgacgaccggctcaacaaggttatcagtgagctgaatggaaaaaacattgaagacgtcattgcccagggtattggcaagcttgccagtgtacctgctggtggggctgtagccgtctctgctgccccaggctctgcagcccctgctgctggttctgcccctgctgcagcagaggagaagaaagatgagaagaaggaggagtctgaagagtcagatgatgacatgggatttggcctttttgattaaattcctgctcccctgcaaataaagcctttttacaca

SEQ ID NO: 642796 - DNA, 354 bp, Homo sapiens
  misc_feature (317)..(317): n is a, c, g, or t
  misc_feature (325)..(325): n is a, c, g, or t
tcaaaagcagttcatgatgtggagaaattggagcctccatacagtgttggtgggaatgtaaaatggtacagctgatttggaaaacagtctggcagctcctcaaaagcttaaacagttattatataacccagcaattccacgcctgggtatataccaaaaaaacctgaaaacatgtccacacaaaaacttgtatacaaatgttcacagaagcattatacataatctccaaaagtaggaacgaacccaaacatccatcagttgaaggaatggaataaatattgtctgtctaggacagtaaattacttttccaacaatanaaaggggntggaaggtactggattttggtgtggacca

SEQ ID NO: 642797 - DNA, 621 bp, Homo sapiens
atcagtcgaaggacttcgccacagcgtgggtgggccttacctaatcagtcgaaggcctttgctacagtgtgggtgggccttacccaatcagtcgaaggacttcgccacagcgtgggtgggccttacccaatcagtcgaaggcctttgctacagtgtgggtgggcattacccaatcagtcgaaggccttcgccacagcgtgagtgggccttacccaatcagtcgaaggcctttgccacagcgtgggtgggccttacccaatcagtcgaaggctttttgccacagcgtgggtgggccttacgcaatcagttgaaggcttattgccacagcgtgggtgggccttacccagtcaaaggcctttgcccacagcgtgggtgggccttacccaatcagtcaaaggccttagacacagcgtgggtgggccttgcccaatcagtcgaagtccttcgccacagtgtggatgggccttacccaatcagtcgaagtcctatcgacacagtgtcgggtgggaccttacccaatcagtcgaaggacaacgacacaggcgtgggtgggccctaaccccaagtcagtcgaagggccaacaagagcagaagatctaagatctctctaagggaagaggc

SEQ ID NO: 642798 - DNA, 206 bp, Homo sapiens
cccgtctcttaaaaaaaaaattggccgggtgtggtgatgtgtgcctgtagccccagctacttgggaggcttaaggcaggaggattggcttgaccccaggagttagaacaatcctgtaacccctaaaagttttcgaagcccgtttgttcatccttgtctcttgtcccgaccccagcaaccactgatctataggagtggtgggggatc

SEQ ID NO: 642799 - DNA, 623 bp, Homo sapiens
  misc_feature (18)..(18): n is a, c, g, or t
  misc_feature (24)..(25): n is a, c, g, or t
  misc_feature (33)..(33): n is a, c, g, or t
taagcttacggctaggtncgggcnnggtgttantcgccacgcgaggtcgcacgcgtgagacttctccgccgcagacgccgccgcgatgcgctacgtcgcctcctacctgctggctgccctagggggcaactcctcccccagcgccaaggacatcaagaagatcttggacagcgtgggtatcgaggcggacgacgaccggctcaacaaggttatcagtgagctgaatggaaaaaacattgaagacgtcattgcccagggtattggcaagcttgccagtgtacctgctggtggggctgtagccgtctctgctgccccaggctctgcagcccctgctgctggttctgcccctgctgcagcagaggagaagaaagatgagaagaaggaggagtctgaagagtcagatgatgacatgggatttggcctttttgattaaattcctgctcccctgcaaataaagcctttttacacatcaaaaaaaaaaaaaaaaaaaaaaaaaaaaaaaaaattcgagactagttctctctccgggggcggcgcggaaagacgcaggggaggtttccgggttttcggaccccaggggccggattggtgaaatcctccctgaaggggattcctcaatacgc

SEQ ID NO: 642800 - DNA, 915 bp, Homo sapiens
  misc_feature (90)..(90): n is a, c, g, or t
  misc_feature (270)..(270): n is a, c, g, or t
tcgtttaaggagaactgaagttttttgtcatctgctgtggctgttctatgaaccaccttcttctttctgcgagcagttcctgtgcccacncaatgcgcacttgtgcctgcagtttggcgagtttttcctggttcatgattgtttctttcattctttgttcgggagcgaaaattatacgggtggcccgcgtcgggggactagggttggtgctcaaggggtctcgcggtggaccaccgtgagattatggcgcacacacgcggggacgcaagncaccgaggtcgcacgcgtgagacttctccgccgcctccgccgcagacgccgccgcgatgcgctacgtcgcctcctacctgctggctgccctagggggcaactcctcccccagcgccaaggacatcaagaagatcttggacagcgtgggtatcgaggcggacgacgaccggctcaacaaggttatcagtgagctgaatggaaaaaacattgaagacgtcattgcccagggtattggcaagcttgccagtgtacctgctggtggggctgtagccgtctctgctgccccaggctctgcagcccctgctgctggttctgcccctgctgcagcagaggagaagaaagatgagaagaaggaggagtctgaagagtcagatgatgacatgggatttggcctttttgattaaattcctgctcccctgcaaataaagcctttttacacaaaaaaaaaaaaaaaaaattgggggaaattaaggtagggggggggaaaagggggtaaggaaagggcacagggccaaagcaggtacctggacccagagtaccatggtaccaaagggggaaaatctggccgggaccaccaataacgggaagccgaataaattccagataagcgccagggtaacccggcattaagggactcgggaaaga

SEQ ID NO: 642801 - DNA, 109 bp, Homo sapiens
ctcgggggtctcatattcaggtaaagctctaagactcctgagccatcttttatgtaactggcttacctaggctgggggcttgaatacaatgtaacgcaagccaaaggca

SEQ ID NO: 642802 - DNA, 146 bp, Homo sapiens
gagcatggggctttagccagtgctgcatctgaccgcctcatgccttcccgtaacgttctggtgcatttacaggtctatcatgcccacagttgcccggtctgcttaatacaacattttcttgtgacgcgaaacataagtgctctcca

SEQ ID NO: 642803 - DNA, 115 bp, Homo sapiens
ccaccatctttacaccatgtttaacttctctcactcatgtgttcatttaatatttcagatctccgacacaagactttaataggttcatttagccagtccacaacgcaattatatc

SEQ ID NO: 642804 - DNA, 116 bp, Homo sapiens
cgccacagcttctcagcttctcccggagtgggcagctcgcaactttcgcgggtgggcgtggtgcgagtgtgctcatctgctgagggctatgcgtgccatggtgaggtcatcacgcg

SEQ ID NO: 642805 - DNA, 132 bp, Homo sapiens
gctcttgtcactggccttggttccacaccagcctgagctctccagtggcagctccacttgcaggcaagggggaattaatgcgtacatcatcttgtttgaagtcaatttaaaactttttcaggataagtcgca

SEQ ID NO: 642806 - DNA, 100 bp, Homo sapiens
tgacgagccggccctaatggacttcttccaaaggagtatctgcagcttggtgaaatttgtactgtttctatcataaataagttatggcttctgttggatg

SEQ ID NO: 642807 - DNA, 317 bp, Homo sapiens
  misc_feature (238)..(238): n is a, c, g, or t
  misc_feature (242)..(242): n is a, c, g, or t
  misc_feature (244)..(244): n is a, c, g, or t
  misc_feature (293)..(293): n is a, c, g, or t
cttggtgccgcagcacgggttctcggccagccacagcaaccgcagacgcggcagccccttcaggtagaagagctcagccaggctggggatcggttcctccgcaggtacagctcactcaggcgctggcaccggctcacaggctccagggtggagatgctgttgacactgagcgtgatcacctccaggctgggcatctcctggcaaatggagatatctgtgaggcggtgccccagcagtntgantntgcgacgctgtgcagctccgaggccttggctcgggtcagaaccatcttnccgcgtcagcttcatggcggtcgc

SEQ ID NO: 642808 - DNA, 264 bp, Homo sapiens
cgcgcagaggaacaccctgccgaccaaagagaccattgagcaggacaagcggagatgaaatttccttaagatcctggaggatttcctacccccgtctcttcgagaccccagtctctgatttggagaaagatccagctgcaagatggacacgagccacaagctgcactgtgaacctgggcactccgcgccgattccaccggtctgtgggtctctgaagggacccccccccaatcggactgccaaattctccgcgatcgaagtgtg

SEQ ID NO: 642809 - DNA, 712 bp, Homo sapiens
  misc_feature (53)..(53): n is a, c, g, or t
  misc_feature (76)..(76): n is a, c, g, or t
  misc_feature (93)..(93): n is a, c, g, or t
  misc_feature (111)..(111): n is a, c, g, or t
  misc_feature (114)..(115): n is a, c, g, or t
  misc_feature (119)..(119): n is a, c, g, or t
  misc_feature (121)..(121): n is a, c, g, or t
  misc_feature (135)..(135): n is a, c, g, or t
  misc_feature (213)..(213): n is a, c, g, or t
  misc_feature (224)..(225): n is a, c, g, or t
  misc_feature (229)..(229): n is a, c, g, or t
  misc_feature (234)..(235): n is a, c, g, or t
  misc_feature (238)..(238): n is a, c, g, or t
  misc_feature (256)..(256): n is a, c, g, or t
  misc_feature (271)..(272): n is a, c, g, or t
  misc_feature (279)..(279): n is a, c, g, or t
  misc_feature (319)..(319): n is a, c, g, or t
gagcgctgtgcacgtggagaagagcggggactcggcgaccctgccctcccgancctcatgttcgaagagcctagtnggccgaggcggcccagntagccgcgggccttgggnccnnaatntnacgacctccgcctncggcctcctgcaaaacaaggcctcatccattctctttagggcccactgtcatccccgatttgcctctcagggctccangcgccgccagnntctnggcannatnacgggccctagaggcagnatctctttcccaganntcccccnagcctatgtataagtgactctgaggaggaggaggaggaanggaagaagaaatcccccttaggcgtcatttggcaaagcctctgccggaagtaggggccgacggggaacgacgaacctgtcaaagaagcgtggggcccagccttgcgagtgactctgaggacacgaagtagccaaggaagaacgaaactgccaccaacacaggctcttgtggcacgtgactctgctgaagatgagacacagaaagaggaactgccagacaatcatgcccgcctatcaaattcagcgcgatgtctccttgttccgatttccaaaagactgggcccctctggtagggccaaggctcagctttcaggcctgcagcttcccgcccatgtctctcacaagcgcaggtgagctctggatcttccttgcgacggggaggcacgatctcaca

SEQ ID NO: 642810 - DNA, 661 bp, Homo sapiens
  misc_feature (53)..(53): n is a, c, g, or t
  misc_feature (76)..(76): n is a, c, g, or t
  misc_feature (93)..(93): n is a, c, g, or t
  misc_feature (111)..(111): n is a, c, g, or t
  misc_feature (114)..(115): n is a, c, g, or t
  misc_feature (119)..(119): n is a, c, g, or t
  misc_feature (121)..(121): n is a, c, g, or t
  misc_feature (135)..(135): n is a, c, g, or t
  misc_feature (162)..(162): n is a, c, g, or t
  misc_feature (173)..(174): n is a, c, g, or t
  misc_feature (178)..(178): n is a, c, g, or t
  misc_feature (183)..(184): n is a, c, g, or t
  misc_feature (187)..(187): n is a, c, g, or t
  misc_feature (205)..(205): n is a, c, g, or t
  misc_feature (220)..(221): n is a, c, g, or t
  misc_feature (228)..(228): n is a, c, g, or t
  misc_feature (268)..(268): n is a, c, g, or t
gagcgctgtgcacgtggagaagagcggggactcggcgaccctgccctcccgancctcatgttcgaagagcctagtnggccgaggcggcccagntagccgcgggccttgggnccnnaatntnacgacctccgcctncggcctcctgcaaaaccagggctccangcgccgccagnntctnggcannatnacgggccctagaggcagnatctctttcccaganntcccccnagcctatgtataagtgactctgaggaggaggaggaggaanggaagaagaaatcccccttaggcgtcatttggcaaagcctctgccggaagtaggggccgacggggaacgacgaacctgtcaaagaagcgtggggcccagccttgcgagtgactctgaggacacgaagtagccaaggaagaacgaaactgccaccaacacaggctcttgtggcacgtgactctgctgaagatgagacacagaaagaggaactgccagacaatcatgcccgcctatcaaattcagcgcgatgtctccttgttccgatttccaaaagactgggcccctctggtagggccaaggctcagctttcaggcctgcagcttcccgcccatgtctctcacaagcgcaggtgagctctggatcttccttgcgacggggaggcacgatctcaca

SEQ ID NO: 642811 - DNA, 790 bp, Homo sapiens
  misc_feature (476)..(476): n is a, c, g, or t
  misc_feature (604)..(604): n is a, c, g, or t
  misc_feature (639)..(639): n is a, c, g, or t
  misc_feature (672)..(672): n is a, c, g, or t
tgtaatcccggcactttgggaggctgaggtgagcggatcatgatgtcagtagttcgagaccagcctgaccaacatgatgaaacaccagtctttaataaaaatacaaaaattagccgggcgtggtggtgcgcacctgtaatcccagctacccgggaggctgaggcaggagaatcacttgaacctgggaggcggatgttgcagtgagctgagatcatgccattgtactccaccctgggcaacagagcgagactccgtctcaaaaaaaaaagacatgagaataaaacagtttactgcatataccaaggcatatcagatgtttaggaattgcatacaattttggaacacatatcaatacaactgtgactcaaagaaagctgaacactatttcttgtctgacagagctttccatgtgtgaaatttgatttgggggaactgtatcagatatcaaaggtttaaaacactatatatggccgggncgtggtggctgacacctgtaatcccagcactttgggaggctgaggcaggcagatcacctgaggtcaggggttcgagaccagcctatctacatggtgaaacccctatctctaaaagtcaaaaaaatagncgggcgtggggcatgcacctgatgtgagctcttgngaggctgaggcagagatcacttgacccagaganggagttgcagtggccagataccccagtgcgctcacatgggcacagagagggctccatctataataataatgtgattaacagttcagaaagggttgatgctcacgttagtacaggcatg

SEQ ID NO: 642812 - DNA, 275 bp, Homo sapiens
  misc_feature (76)..(78): n is a, c, g, or t
ggtggctgggctgcgcttgggtccgtcgctgcttcggtgtccctgtcgggcttccaagcagaggcctagcggaaannngtaaaagatgtctgaatatattcgggtaaccaaggatgagaccgatgagcccattgaaataccatccggaagacgatgggaccggttcctgctctccacggttacagcccagtttccaggggcgtgtggccttcgtacaggaatccagtgtctaagtgtatgagagtgccggctggtagaggaattcttcatcccca

SEQ ID NO: 642813 - DNA, 2488 bp, Homo sapiens
  misc_feature (16)..(16): n is a, c, g, or t
  misc_feature (81)..(81): n is a, c, g, or t
ggcgaggacgcgggcnggggctggggcgggggcgggcccgctgcggggcgcctgcgcctccatcttgccgtacggcgcggncgccgcgggccggcccacgtcccgagccgtgtcgccgccgcgctccctccctcggggcggtccgcgggcgggcgggcggctagggccggggcctggctgcgcggctgggccaaggcccgcgatggtgatctgctgtgcggccgtgaactgctccaaccggcagggaaagggcgagaagcgcgccgtctccttccacaggttccccctaaaggactcaaaacgtctaatccaatggttaaaagctgttcagagggataactggactcccactaagtattcatttctctgtagtgagcatttcaccaaagacagcttctccaagaggctggaggaccagcatcgcctgctgaagcccacggccgtgccatccatcttccacctgaccgagaagaagaggggggctggaggccatggccgcacccggagaaaagatgccagcaaggccacagggggtgtgaggggacactcgagtgccgccaccagcagaggagctgcaggttggtcaccgtcctcgagtggaaacccgatggccaagccagagtcccgcaggttgaagcaagctgctctgcaaggtgaagccacacccagggcggcccaggaggccgccagccaggagcaggcccagcaagctctggaacggactccaggagatggactggccaccatggtggcaggcagtcagggaaaagcagaagcgtctgccacagatgctggcgatgagagcgccacttcctccatcgaagggggcgtgacagataagagtggcatttctatggatgactttacgcccccaggatctggggcgtgcaaatttatcggctcacttcattcgtacagtttctcctctaagcacacccgagaaaggccatctgtcccccgagagcccattgaccgcaagaggctgaagaaagatgtggaaccaagctgcagtgggagcagcctgggacccgacaagggcctggcccagagccctcccagctcatcacttaccgcgacaccgcagaagccttcccagagcccctctgcccctcctgccgacgtcaccccaaagccagccacggaagccgtgcagagcgagcacagcgacgccagccccatgtccatcaacgaggtcatcctgtcggcgtcaggggcctgcaagctcatcgactcactgcactcctactgcttctcctcccggcagaacaagagccaggtgtgctgcctgcgggagcaggtggagaagaagaacggcgagctgaagagcctgcggcagagggtcagccgctccgacagccaggtgcggaagctacaggagaagctggatgagctgaggagagtgagcgtcccctatccaagtagcctgctgtcgcccagccgcgagccccccaagatgaacccagtggtggagccactgtcctggatgctgggcacctggctgtcggacccacctggagccgggacctaccccacactgcagcccttccagtacctggaggaggttcacatctcccacgtgggccagcccatgctgaacttctcgttcaactccttccacccggacacgcgcaagccgatgcacagagagtgtggcttcattcgcctcaagcccgacaccaacaaggtggcctttgtcagcgcccagaacacaggcgtggtggaagtggaggagggcgaggtgaacgggcaggagctgtgcatcgcatcccactccatcgccaggatctccttcgccaaggagccccacgtagagcagatcacccggaagttcaggctgaattctgaaggcaaacttgagcagacggtctccatggcaaccacgacacagccaatgactcagcatcttcacgtcacctacaagaaggtgaccccgtaaacctagagcttctggagccctcgggagggcctggctactgtgcctcaacggttcggctcctcaacagacagtccctgcggcagaagtgggtgtggccgtgagcctctgcaggctcaagagtgttgtccagatgtttctgtactggcatagaaaaaccaaataaaaggcctttatttttaaaaaaaaaaaaaaaaaaaaaaaaagaaaagagaaaaaaaaaaaaaaaaaaaaagaaaaaaaaaaagaaaaaaaaaaaaaaaaaaaaaaaaggggggggccgcgcgccaggaaaaaaaacaccccgcggggagcggcccatataagagacgcgcccaccaaatgagtgttgggcgacaagagaggggacgcccccaccagaagagagggggcgacgcattagataaagacagagagggacgagcgagcggcgccgagtgtaaaacacccgcgcggcgtggaggggggaaacacgacgacgcgggggggaaactcataggggagaccgccacacacccacggggggggggcaggaagccagcggggggagacacc

SEQ ID NO: 642814 - DNA, 2349 bp, Homo sapiens
  misc_feature (16)..(16): n is a, c, g, or t
  misc_feature (81)..(81): n is a, c, g, or t
ggcgaggacgcgggcnggggctggggcgggggcgggcccgctgcggggcgcctgcgcctccatcttgccgtacggcgcggncgccgcgggccggcccacgtcccgagccgtgtcgccgccgcgctccctccctcggggcggtccgcgggcgggcgggcggctagggccggggcctggctgcgcggctgggccaaggcccgcgatggtgatctgctgtgcggccgtgaactgctccaaccggcagggaaagggcgagaagcgcgccgtctccttccacaggttccccctaaaggactcaaaacgtctaatccaatggttaaaagctgttcagagggataactggactcccactaagtattcatttctctgtagtgagcatttcaccaaagacagcttctccaagaggctggaggaccagcatcgcctgctgaagcccacggccgtgccatccatcttccacctgaccgagaagaagaggggggctggaggccatggccgcacccggagaaaagatgccagcaaggccacagggggtgtgaggggacactcgagtgccgccaccagcagaggagctgcaggttggtcaccgtcctcgagtggaaacccgatggccaagccagagtcccgcaggttgaagcaagctgctctgcaaggtgaagccacacccagggcggcccaggaggccgccagccaggagcaggcccagcaagctctggaacggactccaggagatggactggccaccatggtggcaggcagtcagggaaaagcagaagcgtctgccacagatgctggcgatgagagcgccacttcctccatcgaagggggcgtgacagataagagtggcatttctatggatgactttacgcccccaggatctggggcgtgcaaatttatcggctcacttcattcgtacagtttctcctctaagcacacccgagaaaggccatctgtcccccgagagcccattgaccgcaagaggctgaagaaagatgtggaaccaagctgcagtgggagcagcctgggacccgacaagggcctggcccagagccctcccagctcatcacttaccgcgacaccgcagaagccttcccagagcccctctgcccctcctgccgacgtcaccccaaagccagccacggaagccgtgcagagcgagcacagcgacgccagccccatgtccatcaacgaggtcatcctgtcggcgtcaggggcctgcaagctcatcgactcactgcactcctactgcttctcctcccggcagaacaagagccaggtgtgctgcctgcgggagcaggtggagaagaagaacggcgagctgaagagcctgcggcagagggtcagccgctccgacagccaggtgcggaagctacaggagaagctggatgagctgaggagagtgagcgtcccctatccaagtagcctgctgtcgcccagccgcgagccccccaagatgaacccagtggtggagccactgtcctggatgctgggcacctggctgtcggacccacctggagccgggacctaccccacactgcagcccttccagtacctggaggaggttcacatctcccacgtgggccagcccatgctgaacttctcgttcaactccttccacccggacacgcgcaagccgatgcacagagagtgtggcttcattcgcctcaagcccgacaccaacaaggtggcctttgtcagcgcccagaacacaggcgtggtggaagtggaggagggcgaggtgaacgggcaggagctgtgcatcgcatcccactccatcgccaggatctccttcgccaaggagccccacgtagagcagatcacccggaagttcaggctgaattctgaaggcaaacttgagcagacggtctccatggcaaccacgacacagccaatgactcagcatcttcacgtcacctacaagaaggtgaccccgtaaacctagagcttctggagccctcgggagggcctggctactgtgcctcaacggttcggctcctcaacagacagtccctgcggcagaagtgggtgtggccgtgagcctctgcaggctcaagagtgttgtccagatgtttctgtactggcatagaaaaaccaaataaaaggcctttatttttaagaaaaaatcgaacaacaaaaccattttttcgcggcggccggccctcaggaaaaaggttctcacaacccaatctgtgtgggcggggggcccaataggttaatggacactcggccaaagctggccaaggaaacccgggcccgatgggtgggcttcccccataaaaaagcgcgggggaccggggttggaaccaccatagggtcgggcgccgggcccccggccaggccataccccga

SEQ ID NO: 642815 - DNA, 220 bp, Homo sapiens
ggcaaaaaagatatatatatgatatatatatatatatagataatatagaacacacaatacatatacaagaacaaggagaaaattggaaaacagcacaaaatacaattgaggtataagctcagagcacagtatgtcatgttcaataaatataatcaaattgtaactaggtgaccagatacatgagtcttatagtaacaaaaattataccgtagtagagatc

SEQ ID NO: 642816 - DNA, 1964 bp, Homo sapiens
  misc_feature (16)..(16): n is a, c, g, or t
  misc_feature (81)..(81): n is a, c, g, or t
ggcgaggacgcgggcnggggctggggcgggggcgggcccgctgcggggcgcctgcgcctccatcttgccgtacggcgcggncgccgcgggccggcccacgtcccgagccgtgtcgccgccgcgctccctccctcggggcggtccgcgggcgggcgggcggctagggccggggcctggctgcgcggctgggccaaggcccgcgatggtgatctgctgtgcggccgtgaactgctccaaccggcagggaaagggcgagaagcgcgccgtctccttccacaggttccccctaaaggactcaaaacgtctaatccaatggttaaaagctgttcagagggataactggactcccactaagtattcatttctctgtagtgagcatttcaccaaagacagcttctccaagaggctggaggaccagcatcgcctgctgaagcccacggccgtgccatccatcttccacctgaccgagaagaagaggggggctggaggccatggccgcacccggagaaaagatgccagcaaggccacagggggtgtgaggggacactcgagtgccgccaccagcagaggagctgcaggttggtcaccgtcctcgagtggaaacccgatggccaagccagagtcccgcaggttgaagcaagctgctctgcaaggtgaagccacacccagggcggcccaggaggccgccagccaggagcaggcccagcaagctctggaacggactccaggagatggactggccaccatggtggcaggcagtcagggaaaagcagaagcgtctgccacagatgctggcgatgagagcgccacttcctccatcgaagggggcgtgacagataagagtggcatttctatggatgactttacgcccccaggatctggggcgtgcaaatttatcggctcacttcattcgtacagtttctcctctaagcacacccgagaaaggccatctgtcccccgagagcccattgaccgcaagaggctgaagaaagatgtggaaccaagctgcagtgggagcagcctgggacccgacaagggcctggcccagagccctcccagctcatcacttaccgcgacaccgcagaagccttcccagagcccctctgcccctcctgccgacgtcaccccaaagccagccacggaagccgtgcagagcgagcacagcgacgccagccccatgtccatcaacgaggtcatcctgtcggcgtcaggggcctgcaagctcatcgactcactgcactcctactgcttctcctcccggcagaacaagagccaggtgtgctgcctgcgggagcaggtggagaagaagaacggcgagctgaagagcctgcggcagagggtcagccgctccgacagccaggtgcggaagctacaggagaagctggatgagctgaggagagtgagcgtcccctatccaagtagcctgctgtcgcccagccgcgagccccccaagatgaacccagtggtggagccactgtcctggatgctgggcacctggctgtcggacccacctggagccgggacctaccccacactgcagcccttccagtacctggaggaggttcacatctcccacgtgggccagcccatgctgaacttctcgttcaactccttccacccggacacgcgcaagccgatgcacagagagtgtggcttcattcgcctcaagcccggaagttcaggctgaattctgaaggcaaacttgagcagacggtctccatggcaaccacgacacagccaatgactcagcatcttcacgtcacctacaagaaggtgaccccgtaaacctagagcttctggagccctcgggagggcctggctactgtgcctcaacggttcggctcctcaacagacagtccctgcggcagaagtgggtgtggccgtgagcctctgcaggctcaagagtgttgtccagatgtttctgtactggcatagaaaaaccaaataaaaggcctttattttta

SEQ ID NO: 642817 - DNA, 829 bp, Homo sapiens
cttgcgtaacccttgagtaattagtttctcccctttggcgcataccttggacgaagtgattgtgccgcccaacctgtagggccggttggctctccttgctatgatgttgtcctgttctgagtagtgctttgtgcacctatttttcgcccttgtatactggatcctgctggactctggacacaggttagacgcttccccatttcctgcttagggggctttctgtccaaccttacggcgggcattcggatgtagcacgcagaggtttacatggggcgctttgccgattagcttgcattgttgcccccccatctggcgtgtccgatttttgcttgaggcgccttcttccaggcatctggcatgtcgatttggacacatgagtctcaagtggaaagtacattgagccaattgcgggggtacgggagataggctagtagataaaacgtatcgctaagccgcctaagagtcgtgcaggatgacgagattgtggcacatcgcactataatagcgatattgtgtatgcatgaaattggagtagattgtttattttgtttctttttgttttttttttttgttttttaagttgaattatgacagaaatctttaatataaaatgtgtctttcagtaatatgtttagcattcaagtatactatcacaatacatatgtacactctttggacacacactacatggattgctgccatcagtgtaaccaatccattaaaactataaagagggaggggaggggaggggaaactaacggcaaacttatcatgttttatctggtaagaaattgtgaatttctctactttcggggccataacccacttt

SEQ ID NO: 642818 - DNA, 479 bp, Homo sapiens
tccgccctagaaagttcatgcccacccgcctcttcagaggaaaccaatggtcattgatgtccttcacccgggaaaggcgccagtgcctaagccagaaattcgggaaaaactagcccaaatgtccaagccccccccggatgtcatctttggatttggattcaaaaccccttttggggggggccaaacccctggctttggcatgattttttattccctgggttatgcaaaaaaaaatgaaccccaacatagccttgccagacctggcctgttttagaaaaaaaagccccccaaaaagccccgaaagggaccccagacccgaattaaaaaagtccggggggctcccaaggcccatgttggggctggccaaaaaaagtgagctggggattgggtccccccccaaggggtaaaggggctcccattatgttaactggggcccctgtgggttttttcccagacccttaataaactaaaaacttcca

SEQ ID NO: 642819 - DNA, 2272 bp, Homo sapiens
  misc_feature (16)..(16): n is a, c, g, or t
  misc_feature (81)..(81): n is a, c, g, or t
ggcgaggacgcgggcnggggctggggcgggggcgggcccgctgcggggcgcctgcgcctccatcttgccgtacggcgcggncgccgcgggccggcccacgtcccgagccgtgtcgccgccgcgctccctccctcggggcggtccgcgggcgggcgggcggctagggccggggcctggctgcgcggctgggccaaggcccgcgatggtgatctgctgtgcggccgtgaactgctccaaccggcagggaaagggcgagaagcgcgccgtctccttccacaggttccccctaaaggactcaaaacgtctaatccaatggttaaaagctgttcagagggataactggactcccactaagtattcatttctctgtagtgagcatttcaccaaagacagcttctccaagaggctggaggaccagcatcgcctgctgaagcccacggccgtgccatccatcttccacctgaccgagaagaagaggggggctggaggccatggccgcacccggagaaaagatgccagcaaggccacagggggtgtgaggggacactcgagtgccgccaccagcagaggagctgcaggttggtcaccgtcctcgagtggaaacccgatggccaagccagagtcccgcaggttgaagcaagctgctctgcaaggtgaagccacacccagggcggcccaggaggccgccagccaggagcaggcccagcaagctctggaacggactccaggagatggactggccaccatggtggcaggcagtcagggaaaagcagaagcgtctgccacagatgctggcgatgagagcgccacttcctccatcgaagggggcgtgacagataagagtggcatttctatggatgactttacgcccccaggatctggggcgtgcaaatttatcggctcacttcattcgtacagtttctcctctaagcacacccgagaaaggccatctgtcccccgagagcccattgaccgcaagaggctgaagaaagatgtggaaccaagctgcagtgggagcagcctgggacccgacaagggcctggcccagagccctcccagctcatcacttaccgcgacaccgcagaagccttcccagagcccctctgcccctcctgccgacgtcaccccaaagccagccacggaagccgtgcagagcgagcacagcgacgccagccccatgtccatcaacgaggtcatcctgtcggcgtcaggggcctgcaagctcatcgactcactgcactcctactgcttctcctcccggcagaacaagagccaggtgtgctgcctgcgggagcaggtggagaagaagaacggcgagctgaagagcctgcggcagagggtcagccgctccgacagccaggtgcggaagctacaggagaagctggatgagctgaggagagtgagcgtcccctatccaagtagcctgctgtcgcccagccgcgagccccccaagatgaacccagtggtggagccactgtcctggatgctgggcacctggctgtcggacccacctggagccgggacctaccccacactgcagcccttccagtacctggaggaggttcacatctcccacgtgggccagcccatgctgaacttctcgttcaactccttccacccggacacgcgcaagccgatgcacagagagtgtggcttcattcgcctcaagcccgacaccaacaaggtggcctttgtcagcgcccagaacacaggcgtggtggaagtggaggagggcgaggtgaacgggcaggagctgtgcatcgcatcccactccatcgccaggatctccttcgccaaggagccccacgtagagcagatcacccggaagttcaggctgaattctgaaggcaaacttgagcagacggtctccatggcaaccacgacacagccaatgactcagcatcttcacgtcacctacaagaaggtgaccccgtaaacctagagcttctggagccctcgggagggcctggctactgtgcctcaacggttcggctcctcaacagacacttcgtgggcagcgctgccccgaagtgatgctgtgctaggcttcaagggcagggcctattctgggcagagggatgctacagtcagggcccaggagcaggacagtgctgttgtcattggagcggaaggggagcgtcaggagctgatacagggaaggaagaaggtcacacagaggcagcagctccctggctggtgacaccacagtgaacacggaaagaaatcctgcaggtctgctgcattcagatgtctgtttgaaacgtgatacttt

SEQ ID NO: 642820 - DNA, 1182 bp, Homo sapiens
gtggataatgtactgtacagggaaaaacccagtggattaagtagagttttgcctaaagcaaaagactatcaactctttggaagatattcctgattccagcccagggcccagggtgggttcacaggagctaacggagaacctggccttggatggagacgctcagagcccctctgcccctcctgccgacgtcaccccaaagccagccacggaagccgtgcagagcgagcacagcgacgccagccccatgtccatcaacgaggtcatcctgtcggcgtcaggggcctgcaagctcatcgactcactgcactcctactgcttctcctcccggcagaacaagagccaggtgtgctgcctgcgggagcaggtggagaagaagaacggcgagctgaagagcctgcggcagagggtcagccgctccgacagccaggtgcggaagctacaggagaagctggatgagctgaggagagtgagcgtcccctatccaagtagcctgctgtcgcccagccgcgagccccccaagatgaacccagtggtggagccactgtcctggatgctgggcacctggctgtcggacccacctggagccgggacctaccccacactgcagcccttccagtacctggaggaggttcacatctcccacgtgggccagcccatgctgaacttctcgttcaactccttccacccggacacgcgcaagccgatgcacagagagtgtggcttcattcgcctcaagcccgacaccaacaaggtggcctttgtcagcgcccagaacacaggcgtggtggaagtggaggagggcgaggtgaacgggcaggagctgtgcatcgcatcccactccatcgccaggatctccttcgccaaggagccccacgtagagcagatcacccggaagttcaggctgaattctgaaggcaaacttgagcagacggtctccatggcaaccacgacacagccaatgactcagcatcttcacgtcacctacaagaaggtgaccccgtaaacctagagcttctggagccctcgggagggcctggctactgtgcctcaacggttcggctcctcaacagacagtccctgcggcagaagtgggtgtggccgtgagcctctgcaggctcaagagtgttgtccagatgtttctgtactggcatagaaaaaccaaataaaaggcctttattttta

SEQ ID NO: 642821 - DNA, 415 bp, Homo sapiens
actgtagttgcctgggtactgatccctattctttcttttttagagacaggctctcactctaccacccaggctagcagtgcagtgtcaccatcttggctcattgcaacctccgtctcccaggttcaagcgattctcctgtctcatcctcccaagtagctgggattacaggcacgtgctgccactacgcctggctaatttgtgtattttttgtagagacaggctttcaccatgttggctggtcttgaactgctgacctcaagtgaccctccgtgccttgatctcccaaagtgctgggattacggagcgtgagccagtgtgtccctcggtcgatggaagtaataagaaatactttcaaagaatgcttagtagtatattaggtttccagttttccatacagacaggtgcagcgtagaat

SEQ ID NO: 642822 - DNA, 1744 bp, Homo sapiens
  misc_feature (16)..(16): n is a, c, g, or t
  misc_feature (81)..(81): n is a, c, g, or t
ggcgaggacgcgggcnggggctggggcgggggcgggcccgctgcggggcgcctgcgcctccatcttgccgtacggcgcggncgccgcgggccggcccacgtcccgagccgtgtcgccgccgcgctccctccctcggggcggtccgcgggcgggcgggcggctagggccggggcctggctgcgcggctgggccaaggcccgcgatggtgatctgctgtgcggccgtgaactgctccaaccggcagggaaagggcgagaagcgcgccgtctccttccacaggttccccctaaaggactcaaaacgtctaatccaatggttaaaagctgttcagagggataactggactcccactaagtattcatttctctgtagtgagcatttcaccaaagacagcttctccaagaggctggaggaccagcatcgcctgctgaagcccacggccgtgccatccatcttccacctgaccgagaagaagaggggggctggaggccatggccgcacccggagaaaagatgccagcaaggccacagggggtgtgaggggacactcgagtgccgccaccagcagaggagctgcaggttggtcaccgtcctcgagtggaaacccgatggccaagccagagtcccgcaggttgaagcaagctgctctgcaaggtgaagccacacccagggcggcccaggaggccgccagccaggagcaggcccagcaagctctggaacggactccaggagatggactggccaccatggtggcaggcagtcagggaaaagcagaagcgtctgccacagatgctggcgatgagagcgccacttcctccatcgaagggggcgtgacagataagagtggcatttctatggatgactttacgcccccaggatctggggcgtgcaaatttatcggctcacttcattcgtacagtttctcctctaagcacacccgagaaaggccatctgtcccccgagagcccattgaccgcaagaggctgaagaaagatgtggaaccaagctgcagtgggagcagcctgggacccgacaagggcctggcccagagccctcccagctcatcacttaccgcgacaccgcagaagccttcccagagcccctctgcccctcctgccgacgtcaccccaaagccagccacggaagccgtgcagagcgagcacagcgacgccagccccatgtccatcaacgaggtcatcctgtcggcgtcaggggcctgcaagctcatcgactcactgcactcctactgcttctcctcccggcagaacaagagccaggtgtgctgcctgcgggagcaggtggagaagaagaacggcgagctgaagagcctgcggcagagggtcagccgctccgacagccaggtgcggaagctacaggagaagctggatgagctgaggagagtgagcgtcccctatccaagtagcctgctgtcgcccagccgcgagccccccaagatgaacccagtggtggagccactgtcctggatgctgggcacctggctgtcggacccacctggagccgggacctaccccacactgcagcccttccagtacctggaggaggttcacatctcccacgtgggccagcccatgctgaacttctcgttcaactcctttaaacagaacccacgcaagggcggggaacaacaagagggaattaaaaacgcaataagggcaaaaagcaaaaaaagaggcccatggcaaggacccaagaaaacaaacgttggcgggaaaacccaccaaggg

SEQ ID NO: 642823 - DNA, 1198 bp, Homo sapiens
  misc_feature (16)..(16): n is a, c, g, or t
  misc_feature (81)..(81): n is a, c, g, or t
ggcgaggacgcgggcnggggctggggcgggggcgggcccgctgcggggcgcctgcgcctccatcttgccgtacggcgcggncgccgcgggccggcccacgtcccgagccgtgtcgccgccgcgctccctccctcggggcggtccgcgggcgggcgggcggctagggccggggcctggctgcgcggctgggccaaggcccgcgatggtgatctgctgtgcggccgtgaactgctccaaccggcagggaaagggcgagaagcgcgccgtctccttccacaggttccccctaaaggactcaaaacgtctaatccaatggttaaaagctgttcagagggataactggactcccactaagtattcatttctctgtagtgagcatttcaccaaagacagcttctccaagaggctggaggaccagcatcgcctgctgaagcccacggccgtgccatccatcttccacctgaccgagaagaagaggggggctggaggccatggccgcacccggagaaaagatgccagcaaggccacagggggtgtgaggggacactcgagtgccgccaccagcagaggagctgcaggttggtcaccgtcctcgagtggaaacccgatggccaagccagagtcccgcaggttgaagcaagctgctctgcaaggtgaagccacacccagggcggcccaggaggccgccagccaggagcaggcccagcaagctctggaacggactccaggagatggactggccaccatggtggcaggcagtcagggaaaagcagaagcgtctgccacagatgctggcgatgagagcgccacttcctccatcgaagggggcgtgacagataagagtggcatttctatggatgactttacgcccccaggatctggggcgtgcaaatttatcggctcacttcattcgtacagtttctcctctaagcacacccgagaaaggccatctgtcccccgagagcccattgaccgcaagaggctgaagaaagatgtggaaccaagctgcagtgggagcagcctgggacccgacaagggcctggcagggcctggctactgtgcctcaacggttcggctcctcaacagacagtccctgcggcagaagtgggtgtggccgtgagcctctgcaggctcaagagtgttgtccagatgtttctgtactggcatagaaaaaccaaataaaaggcctttattttta

SEQ ID NO: 642824 - DNA, 166 bp, Homo sapiens
  misc_feature (55)..(55): n is a, c, g, or t
  misc_feature (57)..(57): n is a, c, g, or t
  misc_feature (77)..(77): n is a, c, g, or t
aaccaaatcaagcacatggagaagttcgtggagaacattcggcagctcggcatcntngtcagtgacttccagcccancagccaggccgggcgcaaccaaaagctgaattttattgttactggcttacaggatattgacaagtgcagacagcagcttcatgttggtt

SEQ ID NO: 642825 - DNA, 271 bp, Homo sapiens
ccattcgataccgtgccttgccattccattccattcgttcccataccatgtgatttcattccattccagtccattatattcgaggtccactccaatccattcgtattacattcaattcctttgagtccgttccatagcactccattcctttcgattccatttcttgcctgtgttcttccattttattccattccgttcgattccattacattcgattgcattccattcgaatgtaatggcttcgaacggactggctcagtcgaacggactg

SEQ ID NO: 642826 - DNA, 845 bp, Homo sapiens
  misc_feature (16)..(16): n is a, c, g, or t
  misc_feature (81)..(81): n is a, c, g, or t
ggcgaggacgcgggcnggggctggggcgggggcgggcccgctgcggggcgcctgcgcctccatcttgccgtacggcgcggncgccgcgggccggcccacgtcccgagccgtgtcgccgccgcgctccctccctcggggcggtccgcgggcgggcgggcggctagggccggggcctggctgcgcggctgggccaaggcccgcgatggtgatctgctgtgcggccgtgaactgctccaaccggcagggaaagggcgagaagcgcgccgtctccttccacaggttccccctaaaggactcaaaacgtctaatccaatggttaaaagctgttcagagggataactggactcccactaagtattcatttctctgtagtgagcatttcaccaaagacagcttctccaagaggctggaggaccagcatcgcctgctgaagcccacggccgtgccatccatcttccacctgaccgagaagaagaggggggctggaggccatggccgcacccggagaaaagatgccagcaaggccacagggggtgtgaggggacactcgagtgccgccaccagcagaggagctgcaggttggtcaccgtcctcgagtggaaacccgatggccaagccagagtcccgcaggttgaagcaagctgctctgcaaggtgaagccacacccagggcggcccaggaggccgccagcagggcctggctactgtgcctcaacggttcggctcctcaacagacagtccctgcggcagaagtgggtgtggccgtgagcctctgcaggctcaagagtgttgtccagatgtttctgtactggcatagaaaaaccaaataaaaggcctttattttta

SEQ ID NO: 642827 - DNA, 393 bp, Homo sapiens
tgaacgattcggctcggacccctccataatgtgtgcccatcacagcatcatacagagtgcttccactgccctaaaacaccctgtgctcttcctattcatccctctcttcaaccccagcaaccactgatccttttaccatctccatggttttgcctttcccagaatgtcatattgttggaatcatacactatgtagcctttgcaaatgggcttctttcactgagcaatgtgcattgaaggtgcctctatgtcttttcaagggttgacagctcattcctttttattgctaaataatattccattgtctgaatgtaccacattttgtttatccattcacctactgaaggacatcttgattgcttccaagtttgggcacacattatggagggggatc

SEQ ID NO: 642828 - DNA, 1841 bp, Homo sapiens
  misc_feature (1841)..(1841): n is a, c, g, or t
caatgcagtgctggctgagctgcctcgtgagccctgcgggagagcgctgcggtggtgtgaccctgtgtctgagtgctgtgctgtgctgtgctgacagtggtgcttgctgtgctgtgtgccctgcaggctgtcgtgtgctgtgtgctggcatgtccggtgcattgtggcgtgacagatgctgctgtggctggcgatgggctgactgtggacgcactctactgtcggggaaacctttcctagacctgagccgtagctgctgaggaacggcacttgagagacgaccatgtattctagcaaggtacgtggccgcagtcctgctgatgatcggagacctcaaggacaccaggacagctgtgcctctgtgaccctatcgagctatacagatagcagctttcgagggaacccccgcgatgaatgcaggaaggattgacatagttttagttgagacacgaaacatgtcgttattgagtatactagagcccagatgatcaggagctttacggatgcatgggagtatccacacaagagagctttaattgagagagtcagagaggatggaggtgagagcaccgatgtgatgaggacgatgaaattgtggacattcgcagtaccaacaggacacggaactcttggatacatcccgtgcacatttcgtactgtgttagaccacgggaacgtttctcctcgcgagtcaggtgccaggacgtgggcgcagagaaagccgtgaaagaggaatcatacaaatttgtcgtgaagaacacgcgacgggcgcgacttggtcgtgatataattggctggcaattgttgccagcgaaacgggtctatggagagtggtgggggaatgtgaatgcggaagataagatgattcgaggaagacagagggagagtcacggtttgtggcaaattagttgcgcgcgttggacggttagaagacgtgtggggtagaaagatggccagacatataccgcattcgttcacaatggagaggggatggaagaacgattttcgtaagcgataccggaaagggtaagtagattggcgtcgacagcaggcacagcgaagacagggtataatcggagcatagcatgcaacggggaacgactcaggcaccgcatgatgcgagccaaaaggggggggaccgacgatgagaagatcctaacacaagaatcccacaaaaggcacggaggatggatatatccgccgacaacacataacgaagcaacacggcttatcacagagacgcctcaaccaattgagagaacacggtgactactggagcacaactcgcgacgcagaacgacggaagggaggaaaggatgagagagaggcgagtgtgccatgacgacggtcacagcagcgcaggaggacaggcagaagagactggtaaaggacagaagagagacagagtcgtaggcggagtacgcgagacggcgaggacgaagtaagctagcagcggcgcgagatactcagcggtagcgatgtgcagggaggagcgaggtgcgagaggcacgcaagcggcggtactagcgcacgaagaggagaagagacgaaggggaggcatatagaagaagtgacagctgcgggaataataatatggcaacaggatacgagggacggtaggtcaggacctcccacgcaattccagtatataaggagaacggagaggaacgacgtaagagaggagacgagaagagcgggcaggagaagggatggagagtggaggagagggagggaagagagaacgaggacggagagggacgagacaaggagtgagagcaggaggagcagggaggacgaaaggagagagagagggaagagagggaggggagaggagagaggan

SEQ ID NO: 642829 - DNA, 103 bp, Homo sapiens
  misc_feature (49)..(49): n is a, c, g, or t
aattcaaagcttcctaaccgatgtacgggcgacaatgtaaataaatacnattgttctaaagtctttttcattaaaaatttaaaactttaagaaaaaaaaaaaa

SEQ ID NO: 642830 - DNA, 107 bp, Homo sapiens
ggccagtacggatgtgcgggcggacggatgtgctacatcttgtgggctgctgaaaagtaggtaacgaatggctttatgcactttttcgttcttaggaaacaggggag

SEQ ID NO: 642831 - DNA, 194 bp, Homo sapiens
ctatttaaccggataaattttgattactattctcaaggaatagtaattccttaagattactatccttaaggaaagtcaaaacaatatggggctgggggcagtggctcacgcctgtaatctcagcactttgggaggcagaggcaggtggatcacgaggtcaggagttcaagaccagcctggcctagatggtgaaa

SEQ ID NO: 642832 - DNA, 437 bp, Homo sapiens
caattctgtttctctcaggatgactaagaggagaagaggtgtacctcattatgtctgaacactaagaagaggtatcaaatacaggaaggggtacattttgagaatcaatatacttggaatcaactagagaccaatttaggggtttacatgtacttcaccgaagttcttaaggttgtgtcgactcttaaacgccgcttgaccaatttttttaacctcagttctgatcttgactctttataggtcttcccagagtttgctgctgcccattcaaatttagcaagtgtactgcagcagcagggaaaactgcaggaagctctgatgcattataaggaggctattcgaatcagtcctacctttgctgatgcctactctaatatgggaaacactctaaaggagatgcaggatgttcagggagccttgcagtgttatacgcgtgc

SEQ ID NO: 642833 - DNA, 392 bp, Homo sapiens
  misc_feature (355)..(355): n is a, c, g, or t
  misc_feature (366)..(366): n is a, c, g, or t
  misc_feature (390)..(390): n is a, c, g, or t
ttcatgtattttactattctaaggagatcccaggaagagtttgcctggttaatagtgaaattataacctttcaagttatttaactttcaggaacatctcaaatagcacttcatgtttgttgaacctcttctaaaataagggatttccattgattttccaaggagatgtaatgggatgactttagtttgagagtgaacattctgaagattagatacaagatatatcactaaagaaatatagatttaaaaggaactttcaagatcatctagtccaaactcctatctagcaaagaagaaatctaagagttcaaaaggtcaaattgcacaggatcatttataggaaaccatatgtatgntccaattttcnttagagtatcatctggttaattanag

SEQ ID NO: 642834 - DNA, 396 bp, Homo sapiens
  misc_feature (363)..(363): n is a, c, g, or t
  misc_feature (391)..(391): n is a, c, g, or t
accactgcactccagccatggtgacagtgcgagaccctgtgtcaaaaaacaaacaaacaaacaaaaattatgtcctgcttttaggcaaatatggagggcaggcagagaagttttcttgtatctgcatctgcttctgatacggacaggggacagggaaaatactggttagaagagggtggatccctggcaaagacctcaccttcaagcctgaagacctgcggccctaaatgaggacaggcattcctgttttcaagacaaagaggttgccttttgtccctccacaccctctatcctgcccccacgtaaacccgcaaaccccaagctccacagcagagacgcaggtgagtagaggaggataccagnagatggacggtggaacagcacagcaggnagaga

SEQ ID NO: 642835 - DNA, 127 bp, Homo sapiens
tctcatggaagcacacacatacccccattattcaatttggggatggcccccttatttccatggggaggagagtgaaggacgctcagcagtggtgcagggcccaagggatccctcctgcagcaggggg

SEQ ID NO: 642836 - DNA, 150 bp, Homo sapiens
ttcaaatgggggtattacaacattctcgtagtccagtggctgaccatcatctccccatgtcatctgaacaggaccgctacgatgtcacttagtcccacctggatcctttacttccaccaccaaaattccatcatgacagaggctcagaca

SEQ ID NO: 642837 - DNA, 1560 bp, Homo sapiens
cgtatgtgtgtagtagtgtgtgtggtggcgtttttttgctttcaatcgatcgcgtggcggctctggtttgggtgtggcgtcgtatctaaggtcgagggggggtcgtcctcgccgcgggtgtgtggttgttgttgtaagttgaggcaggcttgttggtgctactacgtactggggccgggggagaggctgcggggggatgtgatatttgttgtggttccgtcctcctcgttgttgtgtctgtctggccaatcgtgtcgctcgcccagtctgagttaaagtatagtgtgctgttcgccgttggggggtgctgacaagaattcttcttcgcttgctgtgtgaagggatggttggttcgtgtcttgtttttgtggtgtggttgtttattgggttgggtttttttttgtgggtggggtttgtgttgttgtggggtgggggggacaattcagggggggggggtgtttgatgacttctctgtcgttgtgtgttttggtcggccgacgccgacggggggggtatgagtgtggagggtggctgcctacccctatgtggtgggtgggtcggctaccatccgacgcgacgggctgcgttctgttgctgtggtgggcggcggctgctggtggatcgccgcccttttgttggggtgagaggtttctattaaggggtgggggtgttctcgtgtgcttgtgttgcgttctcaaggggtttgtgtcgcgacacagttagtgtccggggggggttcttactctattcgcgcgcgatgggagggcggctcgcggctcgtcacactctctcggggcgctgctgtttactctcgcgccggggagattgtgtctctactgtgtgagagaggttttttgtgtgtgtgtttgtgtgagagaagagacactctctctgcagaggccctgtgctgagagagcgcgcagcagcgtgtggtgggtgtgttgtggtgacacatgcagcggtggggtcgtgtcatctctctctgtgttgttgttatgagatttgttggcccacccccagcatagtatgtgtgggtctctctctctctgcgggggggtctctcacagcagtagtagtgtcactctgctcttttatttttgtgtgctgctgtggacacacttctggtggtgtcggcacacactgcggtgtgtgttgtgtgtctcttctcctcttctcagagaataagcgcgcgctcttctctcacacacagaggtgcgcctccgcgctggagagagtgtgtgggcgcgacacacacacagagaggcgctctggggaaggcgcgctccacacggcgggtgggcgagagggcgcccctctcgccccagctgtgtgtggagaaagagaagggacacagaggcccgccccacaaccgtggagaagggcccaagggtgggtgagagtgcgccacacacacacacgcaacgcgggagatattattctctcccacaacacacaagaggggccccgggtggggcacacaccggggagagagaggggtgggcccgggggcccggggggttttttttttttcaaaaaaagggtcctttttttcccccaaca

SEQ ID NO: 642838 - DNA, 541 bp, Homo sapiens
  misc_feature (302)..(302): n is a, c, g, or t
  misc_feature (386)..(386): n is a, c, g, or t
gtgcatgtgtattcctattcctaaaatattagctggttagatcttggaataaccagttgactctccggagtacacatcagcttgggcattttctctggacagtctcattctcactcacagttcaagtggttctgtctccggggacatctggtgtggtctgttctgacttctctgctagtgtcattaccacatcagcatctgattccaaggcatacggtcggggtttttattcctttccctgcagaaggatgacacattagacatggacttctcccaggggccagaaatacccatcaaaaggngcggtgcgggcctcagaccctaccctactctggcgggtttggctccccacactgaagccatgtagcctctgacagcctcacggnccaacaccatattctgataccggtggagctatttttgtgtttttctctctttttttttttttttttgggaaagggagtttggctctggcgcccgggggggagtgcgggagacaatctcgggtcgtggaaccttggctcccgggtaaggtgatctc

SEQ ID NO: 642839 - DNA, 262 bp, Homo sapiens
aatttctttgctgaccatctgtctccccacgtggaattgtcatgttctttctttaaataatgcaaatatcctcatattgttactttcttagttttgatattttgggggcttttcttcaaggagactctgtttttctttgatctgagatataataataatttgatagtttaactctttatatatttttttattttcaagttactggaagaggcacccatactcacccggtcttattttcttacttgccctcttgattctcctg

SEQ ID NO: 642840 - DNA, 521 bp, Homo sapiens
tcagtccagcttacgactgggagagatctactgtccgtgggggagtatggagccgcacatgatctggaacaaaaagctctgactcttgctcaagttcgcattttcgtcatgataattagttttgactaaaaacaccctggcgtagtgggccctcgatctagatcatgatgtgccagtttctgagacatctttttaaggctcttactgcagctcccctccccaccctcctcttctttgcaaagcagacccaagcagggcaggctcagaccactcgcttctttcagatctttcttgcaattatgataacatgagatttgctgttgtgctttgaggagaaccgtctggactcagccacaaactctaataagacctgtacatctgagaacctttcccgttactgcgttttcaccacctgtcttccccatgctttatttatctgtatgaacacagatttgacattacagctaaggaaataatttgagttgattcagaaatcctggcatgtgacaattttgttaaat

SEQ ID NO: 642841 - DNA, 381 bp, Homo sapiens
  misc_feature (12)..(12): n is a, c, g, or t
  misc_feature (73)..(73): n is a, c, g, or t
  misc_feature (83)..(83): n is a, c, g, or t
  misc_feature (190)..(190): n is a, c, g, or t
  misc_feature (255)..(255): n is a, c, g, or t
  misc_feature (323)..(323): n is a, c, g, or t
  misc_feature (333)..(333): n is a, c, g, or t
  misc_feature (368)..(368): n is a, c, g, or t
agtgatgtggtntagctgtgtccccacccaaatctcatcttgaattcctacgtgttgtgggagggacccagtngtaggtaatngaatcatggcggcaggtctttcccttgctattctcgtgatcatgaataagtctcatgagatctgatgattttaaatactggagtttcccctgcacaagctctctctntgcctgctgccagccatgtaaggacatgacttgctccttcttgccttccatcatgattgtgaggncttcccagccacgtgggaactgtaagtccattaaacctctttttttttataaattgggccaagtcttnaaatatggtnttttattcaggcaggcgtggaaatggggacttagntacggggtaaatt

SEQ ID NO: 642842 - DNA, 1046 bp, Homo sapiens
agaggatcgtggtactggatatggcggaatcatcggaatcctgtcaccatgggcatccagcccggggctggcgtcggcgaggcaatgatcctctcacctaccagccctgtgccgaagctcccggcgtactgatgccctcacctccagccctgtgccgtgaccttccaccatttgaggatgagtccgaggggctcctaggcacagatggggcccctggcacggaacaagaggatggagaggacgctccatttggagatggctctggagaagggactaccgcgcctgtcccagagctggacgcctatgccgtgcccgggggaactggtcgtctggcatgatgaggacgtagacggagtctgagcggctcagttcccgtagggggtggcgcgcctgagcgggccttgcggcagtcgtgtagcctgggaggttggccgggggctgggccgctgcgctcgcgcgctcctgttgactgccgctgacagagtccgtgtgacgcgctctgcccgctggcgctggcggggggggcgggcccggggagggcggcgtggtgtctggcgacggaggatgttcgcgcccgtggaggtgctggccggatcgcagtgggccacctcgtgtccgcgagatgggtggagcatgtcgggccgccggtgggcaatcctcccaccggttttcctaactgcctgggcccatcaacctgaggggacaacggccggcaacttttctgggagccgcttggcgggcctctttttggggataacccgggagagcttggtggttgaacaatgaggatgggatccaaggagcgaatagcaggccacatcgtgctggcactggccagtaatggaacatggtaccggagcctgagggggtgggcctatgccaagatacgtcgaacacttaatgccgatcccccccccgagaaagagcctctgtgctcccactcctccaatacatgtggtatagagacgcacatagagtacagcgagagatggcgatgccactcagacacaagaagcgcaagaagagacataaaaccgaggggcaac

SEQ ID NO: 642843 - DNA, 650 bp, Homo sapiens
aagatggcggtcttggctacctctaattgctctcgtgtattccgtgccgcgactttcacgatggctcgcccaatcttactaccttctgtcggccctgctctctgctgccttcctagctcgtgaggaaactgccgtcgctctgtcatcggatctgtcccacccaaacgcgaagacggttaacccgtgtgactttgactggagagaagtggagatcctgatgtttctcagttgccattgtgatgatgaagaaccggagatccatgtacctgatgacagtgacaattacccacgccgcatatatattgggcctctgagtatatgcatagctacttacaaatgagtaagaaccattgatgaggaactagcaacgggacatgagtggtcgcttggattgtggagttctttgcacgactggtctagttgactgtctctcatttgtcccctatctatgtcttgatccttctcccttaccatacatagtgtacagggctaaattgttgggaagagtggatgtgtggacgctatactgatgtaagtacgcgtgtacaaatgtgaccgcacatcacccctccaacaagataactccctagcctgatcctgtaccaccggtggaatgatggcaatgcggaaggcacagattgaccagatag

SEQ ID NO: 642844 - DNA, 116 bp, Homo sapiens
aaagcgttccggaacgctgtccagcatttgctggattccacacacgcagtactccatcaccatatacgttgggcgctggggacaaacagctcaggggggggcccctggctcggggg

SEQ ID NO: 642845 - DNA, 1199 bp, Homo sapiens
  misc_feature (64)..(64): n is a, c, g, or t
  misc_feature (79)..(79): n is a, c, g, or t
  misc_feature (91)..(91): n is a, c, g, or t
  misc_feature (111)..(111): n is a, c, g, or t
  misc_feature (123)..(123): n is a, c, g, or t
  misc_feature (138)..(138): n is a, c, g, or t
  misc_feature (416)..(416): n is a, c, g, or t
  misc_feature (421)..(421): n is a, c, g, or t
  misc_feature (1053)..(1053): n is a, c, g, or t
aagaacacacaattataatgacttatataatcaacacgtgtagaaaagagtacgagtaaagtangttccaggtagacgnacaacgaatgtnccacgtattgctcagaattncatagcgacagnaacattaggatgctngggcatctcagagactagatacaattagtatataacaagagaattccgacaatcgccacacgcctatgcagccagtgctacacgttgctatgttctacgtatcgttagagtagtaaacaagtagcaacacttcatgaccggttactcgtgtatatcatcgccgcatcaacagagtacatactaacccgcatcgacaggtgccgaaaccgctacacgtctcgctgtgacacactatgaactgcagaggtgacacgagaaactggaagagcgactgcgcnactcnccgctacacggcgctcacaagatgtaatcccgtccggtcaccgatcactgacgcccaagatccgtatgtatatatcgcctgagcatagcacgcaaacatacagcgatgtaacctacactgctcatacatgctgattgcctggtgtccatatcaccggagatctctatacctcacgcgattaccgcaacgtcaccgtaccgcaccagactccgtatacatagatggcttcgcgctcgaccggcatgacgttcacacgcttatctgatcttacatttgcgccgctcgccacgtacctatcgatcctcgcgtgcgtcataataataccttcttcacacccgcgcacagcaatgtcaaccgaacaaacataatcgtctcagttccgtctttgtcgcggcgtggccacagtaaagtcagtataggtagtatctcatacgagcctaatccgaggataatgactcaccgctcgacttaaatcacaccagcctaagtccgaccgaatcaccgccgagagcacggtctacgcgcatcaagattaccactaatcactaatgatagcacacctaaacacccgcactgaccaccgctccggtccttggttcaaaggatgggcatactgcacggaccgccatagnaacagttcgtgaccgcgcctcaaactacgcactgctgccactgcgcgtccactcatgtgcgtacatagtgatttaggtagagtccaaatccgcagtcaaacgccactctctataagagacccgatcgaactccacgtctggcgtgt

SEQ ID NO: 642846 - DNA, 304 bp, Homo sapiens
cttgatacaaacgaacaggcagtcgtagaggtacacagggcaacgtccagaagagtcccagtgacagaaaacagatcaatgtcaccggccgctggaactcctagggagtactcactgcaaaggagcccttctggagtgatgaaggagcccttctggagtgatgaagatgttctctctcgattgtggtggtcgtggcatgggtacagaacacttgtcaaaaggcatggaattactcaagatgggagcatttttactgtatgttaattataactcaataaaattgattttttaaaattctaaaacg

SEQ ID NO: 642847 - DNA, 300 bp, Homo sapiens
acggcctactggagagacgcaccggagcgctcgacttgccgttgcctccaagcccatgaggatgacggcgaccacaatgaacaagttgctgtgctgagcgctcgtgtttctggacatgtacattaagaggaccacccaggaaacgcgtcctccaaagtaccttcattatgacgaagaaacctctaatcagctgccgtgcgacatatgaccgcctggcacctacctaaaacaacactgtacagcaaagtggaagaccgtgtgcgccccttgccctgaccactactacacagacagctggca

SEQ ID NO: 642848 - DNA, 139 bp, Homo sapiens
gtcattatgtcaataaaaaaatttttaatatttgctgctaaaaaataacccaatgcccaaatcatgtattctttttaaaacagatttttagaaatttgttgacctccttttttgaataaattatccttgttaacagcca

SEQ ID NO: 642849 - DNA, 164 bp, Homo sapiens
tcacaaatttaggactcggacgggccttggggatctacctgggtccttcgggtctcgcgcttttcctcaggaccccagggaatctggtgggtggggatcgcgtcaacgcactcttcggctccgcactattctattctaccttccaaggagggtttccactcgga

SEQ ID NO: 642850 - DNA, 214 bp, Homo sapiens
ctttttttttaggtttgagggggaatgcgggagattgtaatgggtatgggagccataccttttaggtattcctagggtgggtggtaggaggtttttccttggaggtgtatgagttggtcgtagcggaatcgggggtatgctgttcgaattcataagaacagggaggttagaagtagggtcttggtgacaaaatatgttgtgtagagtgtcgacg

SEQ ID NO: 642851 - DNA, 175 bp, Homo sapiens
  misc_feature (157)..(157): n is a, c, g, or t
aggatccccctgtcttgtaccggggagggaacacaggtcagtgtggggataggggtcacggtggacacgggggtgggctgtctctccacctcatcacattatgctaacaggaacgcagacgcattcagatgcctttgcagaaagagatgccagaggntcttgcccggtacatgca

SEQ ID NO: 642852 - DNA, 242 bp, Homo sapiens
cacaagaatcctgaaacagatgttctcagaacatattgaggatgagaagaatacagaatctcaagagaggttcattctcacaacagatgatgccagtctggaccgagatgataagcagaatcaaaattgcaatgcacgctcgaaagaggaccaccgtcaatagaatagtagcagcacaagaaatatcaaagggtccgagagagaatatttgcccgagagactggccagaacggatatctaaa

SEQ ID NO: 642853 - DNA, 252 bp, Homo sapiens
ggcaagaaggcattttttttttttaaaggaaacaaactttcaaatcatgaagtgatataaaagcggcatatgcctacaaagttttgaattcaggtcccagttgttgtcacaaaggagtgagtgaaactccccccccccccccttttttatataataaaagtgccttagcatgtgttgcagctgtccccactacagtaagttggtttacaaatgttttgcattgagcatcccaataaagagacccatgggcta

SEQ ID NO: 642854 - DNA, 220 bp, Homo sapiens
atagtggtaccagcgcgagcttcatcaaatgataattacgtttaaagtgtgcatttgtggttagaatctggtttgtttgcttccattattgagttcctcctaaggaaattgaggagagggactgaatagaagcccaaattcatataaaagttgcgtttaagttgtattaaaaatagatatataagaaaaaattctttcacttgatggaagcgtcgcgcat

SEQ ID NO: 642855 - DNA, 291 bp, Homo sapiens
cctcaccttgatcgtaaagttgctcttggatagtaactagcacttagtatctactttaaaatatgtggtttctcttcagggtcccgggccataaaacaacggagagctgtacttgctttgtcacttggaggaaccacatccttgagacaagctgctgtcttgtatgtcttcagtaggaaacttctgacacacacatatcagggaagttcctggccctgagaagtgttcccatagcttttcagtcgcaggttactttcacactacgtcagcttctctggtgagatcagggat

SEQ ID NO: 642856 - DNA, 310 bp, Homo sapiens
ccgtaacaggagaccaaccccagatatttgaggtatgctccttccgtgtccagatcatcgctcgagcgatggagaggggagccgtagcggttgtccgcaaggcctccacttcttccactgaaaaatcgttcgagactaccgctaaacctggctcagcgactgcctcgacgtctacgcctacaggatgtgggcttgtggcacagacaatccacttcccatcgtgcgacaagttgaacttaggaccatcgcagtttgctagtagcggcttcccgaaagcgttcttcgatacctctgactgtactggcacctt

SEQ ID NO: 642857 - DNA, 404 bp, Homo sapiens
  misc_feature (366)..(366): n is a, c, g, or t
cacaccacagtgacacagcagcttctcctgctgctaagtgtccttgccctgcagtgggcgcactgggattctgtggtcctggccacggccactcgtgggtcttgcagatggttcatgggcctcggtgggttacttggtaagtgagggtaatgtctgcctggcagcccctgaagtgtgcgtgacatgacacatgcatgctgcctgatgcccagccccatcccgccactgttccagtctgatgtgatgctgtggctgggatgtccttcaaacgcacgaggcagaggccacaggggccgcgtcttgcccaccactgtggaggaaacagcgacaggagggagtggggggacaggcacaagcacgtggcanaagagaaattaacaaaaacatcacggtaccgagctcga

SEQ ID NO: 642858 - DNA, 1093 bp, Homo sapiens
ggacgccgttgggacatcgtgggttggagttctggtgttcccttctgggttccgaggcccaagcgccttgtgagctgttgtgagtggaacgggaggttaagcataatcagtcgcgctaggtcaccatgcatgcctgtgccctcgttggagtcccgcgactgcgggctcctttatgagtcctcgctgttcctgcccgccgtctagtgtacgctccccggccttgcggtgcgactgcgggtcggcctagaccctgggcgttagggtcgcggggactggtgtgcggtcgctcgatggctggcggtggcggtgggatggacgcgcgtggcggagccggggactggcttgggcgcggactgctcactgctgctagccactgtggactggcgggacacgctctgacggtttgcacactcgctggttgtcgctccgggagggacctcgcggtcgagcacccggggcctgaatccatagtgtcaagattacgggcttgctctgtgaggacttgagcggtcgaggttcataagtaagccggcggaagatcgatagcttggcctggttgcattagcgatactcagggctacaagccaacgttgtgggagcgcattgctgtgtgcgtggagctgcggaaggctaagcgtgactgtactcccctagaagggcggaattgctacacgagggggcacgtaacggggtatatacccgggtggcggcccatgtgttgtcgcaaatttttcccgttacgtaggggacgcgaacctttccgaggctgcccattggcggggtatccatacctgttagccccataccgagaatggacttgtgaccattaccacggccttgtccaagctaagtgcaatatcagtaaggccggcgagtgatccgatcgcgtgggacactgggccgggaccggaccgataccgccaaaaccggtaatgtggaaggcgcagtgaaggtgcaagttgcaacggaataggtgtgtttctttgccattgattgcttaacgcatggtcgtcgcccgatggggttgtcgcctaaccttttagctcagaatatttggccgtgtgacaaccaagacctgtggaaacaacatttg

SEQ ID NO: 642859 - DNA, 365 bp, Homo sapiens
  misc_feature (9)..(9): n is a, c, g, or t
gattctagnaggatccctactactgtcgcattttcaagaaactatcactgtttgattcatttagcctttctattctttattcatccgataaagtaactgatgtcacaacatgtcttgtgatgaaattgaaatttatttttttatgttaaatataatttgattttgctgtttatttctaccaatgagatagactttggcgaatctaaagttgattattttatagaactcaccctttaacttattttctcctttaacagttgcttgcaatcctttatcagctgcttacaattaatttgatcgcattaagacctttaagtagaggtaggggagggaaagctgtaaaaaccttttcatggattaccata

SEQ ID NO: 642860 - DNA, 467 bp, Homo sapiens
  misc_feature (427)..(427): n is a, c, g, or t
ggataaactaacgaccgtggagagtgaagagcagccttggcttcaggcatgggatgaacactcatttcagagaacacggagctgggggagaacccagaggctgctgaagtgactcgaggcaggatgcaagtgagaacggggctgactaacacagaactgggaagggcaaactgctctatggagaatgtgactcaaaccagcagggcagaagcattgggatcccagctctgccactatcgacaaggcacagaagctctctgggctgagagtccttttataagacaagtggatattctctagaagtcctttcagttatttttgtttaaggaacgttaaatctttgtgtatctatagagaaggctgcaactgcagctgcagctcaggcaccagcacccaagttgaggagcagacgctcactgtgtgtggntgtgctctgcaagacaaccagcagacaccagcacgatcct

SEQ ID NO: 642861 - DNA, 521 bp, Homo sapiens
tgaggtaacggcaacttgaattgacgggtcgcttgaattgacgggctcgcgagctataggcttcaacacagcagtcaacactgagttcatcgtcttcttgtgaggtccattgttctagttcaaagtccagcctactgtagcctctgaggagcacttccgctgcaccagaggttttgtgttctcaacagtcccctgacacgagtaagcaaaaggttgtggtctatctcactcacacttaaactcgtgtttagcttctcgaatctgcgacctgcactagtgaaatgaaatattcaagactgtctctctccaaaaccccttagcgtgcacctttgtttacttgtcagaggttacatattcagtctactgggctgtatatgtagtttttatctgtagagaatgaggctccctggacctctagttcttcgagttcgattcgcacctagtagcccctacctggcgatcaaaccttctgccgaactgctgggtctgttcgcagagctcttgtctggcaaccggaccgt

SEQ ID NO: 642862 - DNA, 242 bp, Homo sapiens
atgcacccatgcagactggagccttcccgcagtatgttcctggtcatcgaaccactcaactggattacagtcatatcttctactctctgtttaataactgaaaagggtaaaaacctggaactgtttcctatgccccttgagaatctccaagtgggagccacatggccacttttatctccactggattcactctaaagacacagattggccaggcatggtgggtcatgcctgtaattccagca

SEQ ID NO: 642863 - DNA, 791 bp, Homo sapiens
  misc_feature (449)..(449): n is a, c, g, or t
gagccgagcgctgaatcgcggtgttggtgggccccgggggtcggcatgcggttgggcctgctatcagctcatactgtgtgggcttgccagcagcgttcatcccttgtgcgagcgctcgcgaatctggggccagccctgtcacgtctgagaaaagactagatcagcactctgctgcacgacgccgattagagacttgtgtgccattcgcgaggcgagaaggccgaacctccgtcgccacgggctggctacggcttcgcgcggcagtgagccgcctcggggaaattgcgcgaacgctccgaggcaggtcgcctggttcgaaattcgagttggcatcgaccccgtgcaagttcggtgttcctgcagtgggcactggattcgattcgttggtcgataggcatcgcatgcgcggatgcgaggagctgatgtgatgcggaaggccagagcagtgntcttggagggcagcaaggggtggtcgagagcagtacgcattcgctggcgcaaagatcccctcacggtcggaactcaagctccttggcggacgcgcaggggcctgtcgcaccggaccgtggcgcgatgccttaagcggcttgacctatggcacgcaagtacggagaccggattgtgacccggggaagcggtcgggggccttggccttggggcgaagtttggaacacaaagcgatccgggtacccaacgcgggtacttagggggccgttgcgcgttacggggggactccgggcaatagctggaaagtgctcccccaaccccgttgttggcgttgtgtccatggg

SEQ ID NO: 642864 - DNA, 200 bp, Homo sapiens
gccctttttaaataattaaaaggggtatacttggggtgtttggaacccaaaaaataaatgcttggggggatggataccccttttaccctgatgggattattatgccttacatgcctggatccaaatattacatggacccccttaatatataccttttctatgggccccccaaaatttaaaatttaaaaatttttttccca

SEQ ID NO: 642865 - DNA, 390 bp, Homo sapiens
gttgggccaaaggaaggaaggccaaaatgtgtaacttcccagcatttgggagatgctgtctcttgcccccctgagtgttccttttttttgctttcatgtccttccctgagaacaatgaattttgggacaggctaaacatcatgatgaagttttttaaacagccttttttagtggaaatccctttagatctgggtgtgctctatggggagtgctgacgtcaaaaagcaaatgtctataaggggcccttttaaaatgaaccttttcccccttgagcaagctgggattttttaatgtagaaatcaagccctctttataatttcccttcaaatgtttatgtttttgttttttttgtttccaatgatggtaaaaataaaaactacgcctttctta

SEQ ID NO: 642866 - DNA, 1113 bp, Homo sapiens
ccaaggggaggaagttctctagttgcaagttctaacaggacatacatgacagtctgttctaagtaagagagaagacaatagcaaactcttatagcatttgtaataccatggtcagcttgtgccttccaagacactagcatggtggcgcctagtaatatgcgattaatgtttatggcaaagctgctatacgaggaacttgtgaagcagcagccacgcagtctgccatgagaggttaggaccataatagaagctaggattcttgggactgttggcagaacaaatagagcatagaagagctgtagattggatgacatagttctgacaacgaaacgatagatgcgtgacattgttatgctcgatcagttggacgcgtggaccccccagcaccgtcacggattactgggggcaaccctgagcttgggacgggaagggcacgtcggctatctagacagagcactttcgcaatcgcgtagcactctgaatcgtagggcatatcggggtccatttcgtcgaaaccacgcgactgccgacggcaagttgggccctgcgaccacgtgcacattgtgcaccacaactagacgcgcgcacaattggccagaggttatcaccttcggcaagcaaaccaaaactctccggtgtggcggccacctgcgagcatacatataaaccggcctactctgcaccacgcgccttgtgccccaagcatagacacgaagcaccggctaacctcgccgcggtcggagcaacatcagttctgcacctctcccaatggtggaatgttacccacgatttcacaggcgcacgcacacaccactccgttacctaccaactcccgacggacatggcccggaagggtgcgaataccccctaagcggggacaagaggtggcgcacgaagaagagcattcaccaggaccgtttttccgcccgtgggctcgtgcgagaacggaagttgcaagttacaccttgtgcgctcacattctccggaaggcaaaaccaaactttctcggctgggcactgttccacggaaagcgccggttattaggttacgccggggacaaaggaccaccaccaatgtgagaacacaaagccccactagttatacgactggcat

SEQ ID NO: 642867 - DNA, 145 bp, Homo sapiens
  misc_feature (1)..(1): n is a, c, g, or t
nactctgtaggatccccgcctcatttagttccaatacatatagtccaccatttactaggcatagtgtattttggcgagatggtcttaaaatgcatcacgttgaagcaaaatccaggctgtgtctccgatagtacatatgattggt

SEQ ID NO: 642868 - DNA, 925 bp, Homo sapiens
  misc_feature (667)..(667): n is a, c, g, or t
gcgggtgggcaagagcgcgctgaccatccagttcatccagtcctacttcgtgtctgacttaacagaccccactatgtgaggagctcctacacgaagatctgcagtgtggatggcatcccagcccggctggacatcctggacaccgcgggccaggacgagttcggggccatgagagagcagtacatgcgtgctggccacggcttcctggctggtgttcgccatgtaatgagccggcagagttttcaaacgaggtgggcaagctcttcagcgcaggattctgcgggtcaaggaccgcgacgacttccccgtaagtgattggtcgggaacataagggcaagatctggagtcacagcgccaggtcccccgactcagagagcctctgcctgtcgagcgcctcccaccatcgtggcctacttgtgaggcctcggtcaaactgcagtctcattccgtggacgaggctttcgagcagctggtgcgggctgtcctggaaagtaccaggaactaagagctcccactcgagccctcccagtgcccccaggaaacgagagggcggggctgccgctgcgtctctcctgtagccaggcaagagagaaagcaagcaccagaagctctctggtgactagctgccttcggaccttggtgtgtcgatcctgagagccactcactngagacccgccaaatgttccttcatctggggtactcccaagggacaaaacttaccatatacatgcctttaatttccctgggcctcttcgtggggctacaggccactgttgtgccttctggcaaaagcctcctggtcccgaacctcacgcctggtgggggaaaacgcactcaagggtccaagcgggtaataacccctccccgagaataaaaaaggtccggcgcagaacaccaacaaaagggggcgccaaactaccaaagc

SEQ ID NO: 642869 - DNA, 379 bp, Homo sapiens
  misc_feature (74)..(74): n is a, c, g, or t
  misc_feature (118)..(118): n is a, c, g, or t
  misc_feature (134)..(134): n is a, c, g, or t
  misc_feature (160)..(160): n is a, c, g, or t
  misc_feature (208)..(208): n is a, c, g, or t
aaggtctttacctgttttccggggttgtccacaattttcctggaacttttaaaagtttctgtggggccccccgngggtggccctccccaggggcaacccccgctttcaaacccttttnattgagccttaaattnaaacccttttgttttaaggggcccantggggctagggggcccccccccccccgggtgtttggcagtttcaaggnttttttttcggggggggtttttttttttagggggttttcttttaacccccgagggggggaccccttttttttcaaaaaaaaccccccccaaatggggggtggttcttttttttcccgttttttcccaacccaggggggttttcccccttattaaggggcggggggtcgcca

SEQ ID NO: 642870 - DNA, 926 bp, Homo sapiens
  misc_feature (341)..(341): n is a, c, g, or t
gtattcccaggatgtactcctgtggctatatcgtaaaattcttcaaatggatgagtgaaggatttaatatcgagagaccaacatcagtctagcttatagatcgggtgaatgggtaatgtagatgctagcacgaattgttggtagacagatgtctcgaggtacaatggtggctaattattacataacacaatgatgcttaattagatggattgcttatcattatcttaaggatacattaggtggatacttttgacataataaggagaggatatagatggaagatagtgcaagctgacagtttagaatgctcattgcatctgaaatacttgattatgatgagnttttagagcagaacgagtacgataatcacatgtagccagagcttaaaatgttggaatgcgaacacatgcaaaattggctttggatgtagatggcgatctacgtataatcgtgcgtcgtgtggcaacgggcctcgtgcgtctgtggtacattccacgagtgtaagcgtcccgtaacccagtactatgaagtcagatggttaccagtgggaaggtaactggtcgtatctaaaaccggagaatattgaggtggtgcctatagggaatctatatgtaagcagttggaagaatgactacagtgagtatcatataaaaaacaagactttggcgacatagataaattcactggcattgccacatgaaaggtctttccatctgagggcgttcgagctgaattcttgaccggtggaacttctagtacagttcagaatactggaggtaggaggtgaccataatgggaggacaagtaatgtaccagtgggtggaaccagactggaatctttttaatctaaagatattctttgtggaaagcctttaattgcaattgacaggggtctgaggtataacttggggacagtttagtaggta

SEQ ID NO: 642871 - DNA, 325 bp, Homo sapiens
  misc_feature (1)..(1): n is a, c, g, or t
ntccaggttccctaacatgccagggcagaaattcctgggtccagccaggcacggtggctcacgcttgtaatcccagtaacttgggaggccgaggcgggtggatcacctgaggtcaggagttcgacatcagcctggccaatatggcgaaaccccatctttagtacaaatacaaaaattagctgggcgtggtggtgcatgcctgtaatcccagctacttgggaggctgagtcaggagaatcacttgcacccgggaggcggaggtggcagtgagccgaggttgtgccactgcactccagcctgggtgacagagcaagaccctgtttca

SEQ ID NO: 642872 - DNA, 123 bp, Homo sapiens
gtggaagccttgcgctcaggtgcgcaggaacgctttgttcaggcgttgatgcccgcttcggcacctgctcttccaggcgcaccagctcttcaatctgcaccaggaaccagcggtcgacgttgg

SEQ ID NO: 642873 - DNA, 114 bp, Homo sapiens
tgctctgttgtccaggtgagagtgtggtgctgtaatcttggctcacggcaacctccacctcccaggaccaaggaattccggtgccacagcctcctgagtagctgtaaaaagctt

SEQ ID NO: 642874 - DNA, 235 bp, Homo sapiens
cacacataaaaaaacacaaaagtcttacctcttcaggccacatagtcacagtcagattaaacattagaaggattatcaaatttatagatcaagggaacaaacattgcacaccaggatattgtctacaaatttcgtcaccatgctccattttgcagtgggtattagtcatacggtcactactatacgttctacaatttctagtgcccactttcacagggtaccgacgctcgaagtt

SEQ ID NO: 642875 - DNA, 1147 bp, Homo sapiens
ctcttggtacctcccacgcgccgagcggaggtgtggtttggtgtagttgttgggatcgggaggtagtatgcccacttcgatcaaaaatgcgtgtgtaggtatatactgtgctggggtgggtgtgggggcggtcatagaaacatcccatgtgtctccccctgaggagaagtggtgtgaccccccccagcagctataaatgggtggtcggtgtgtgggtgtgtgtgttggcgaccgcgctggttgtgtccctcccatcacgcccactgctggcagaccctacgcgcgtagcgggcgtgggttggtgttcgtcttctcttgtgtgggtggatggttggcgcacacggcatggggcttgcgccgatcgtagggcttttgttgttctgctcgcgcgctcgggcggcttcccccccccgtgggcggagtgggctcgctctcacgccccgcgtcgtggtggggggcccgtcacgcgccgcggcgggggtttttgtgtgggcgcgctccccgcgcttcggcgtctgtttttttttccctcgctcgtagcgggcgccccctctctctctgcggctgtttttggtgtgggactgccacagaggcgggggccccccgccccccgccctcgctctgtctggggagtgtgtgtcgctctcgctgcacggagggtcgcactccgctcctcttgtgcactcccgctcgcgtctcgctgggtggtgggcgcgtctcacacttgccgctcgcgccccccgcctgttctctcgctcacccgccccgcctgccctcgtctgcgtgtcgctgcgtggtgtcgccccacgcggcgcacccgccgctcctccgcaatatttgtgtgagagaatagaggaggggagagagaactctcttttttgtggggtgccttacaccacacaaaattatttactcgtcctccccccccacagaaggagaggccacacccccccgcgcgccctcctcttctggcgcgtggctgtgttgttgtgtgggcggcccctcttttttttttctgtgttgccccgcgcccccccgcgtgcgtgcgcgggttggtggtgcggtccccccttgtgctcccccccgcgtgagaggttttgtgtgtgcgcgggcggtctctcacacaaaaaaaaaaaagggcccccga

SEQ ID NO: 642876 - DNA, 566 bp, Homo sapiens
aagtcatcttgattactcctcccgttttgaaattgtgtcttcgatcagcatctccacatgctatactctttatttatttttgagacagagtctcgctctgtcgcccagactggaatgcagctggcgacatctccaggctcactgcgatctccacctcccaggttcaagcaattcccatgcctcagcctcccaagtatcctggaccacacacatgtgccatcatgccaggccaattttcgtatttttagtagagatgtggtttcgccatgttggccaggctcatcttgaactcttgtacctcaggtgatccacccaactcactctcccaaagtgctgggtttacaggtgtgattacactgtgcctggtaagaatacatgatttaaactcactcaattttaattgttttttaatccctaatcacccatcgctagtatgaccagaggttagtagaggggttcgatgccattctggttcttgagtgaagaccgggcaaggcactgagcatgggatgagggagccagtgaaaaatataaaaccaagggaaagggtccctccgcttgcatta

SEQ ID NO: 642877 - DNA, 894 bp, Homo sapiens
  misc_feature (271)..(271): n is a, c, g, or t
  misc_feature (503)..(503): n is a, c, g, or t
acggaggagattggcgcccacacagggcccggaattatggagaccactcatggggggggccccaagcacaacgaacaccattgggtggatacaacagggccacttgtaacaagtgcccgcacccatggaagactgggagagcaacaaacatactgacttccctgtgccgggcaacgaaccgcgttccatcacatcaccgacgccagtgttagtctcgccccccgccccattacggcacgtggaaactcttgcccactaacactgcatggcntgaagcagagtgcgtctcttcctcgcggcgtggtttctctagccgcccccggtggtcccacaagttctgttgcgccgccgcggccacctttcaagaaccaggtggggcccaaacaagggcccttcttattcttcttcggcgggggcacccacaacgccgaggatcttgggccgccgatccattccccgcaccgaggttctctcccgtgtgccttgtacccgctcccggttgntgtagaccccccgctcataactggtgaaagcctctcctcatccctgggaaatagtttatcccccgccaacacattgtttctctgcggcgcttccccttctggagggtgccacaagatttctaattctcactggcggtagccttacgggcgccgcccctggtgtgcctcaatgagcagacgcccacacagcaggttgttgttcacccgggatagttcagcggtggctcccccgagaggaccaacaccctggggttcacccaccaggtcgctacaacatatagtcgaattggtcattcgagcccccgcgttggctgccccgcacgattaataccccccccggttcttctcagtttcttaaacccaaaaaggaccccttttcccccacaaaaca

SEQ ID NO: 642878 - DNA, 869 bp, Homo sapiens
tcatcttggctcactgcaacctccgcctcctggttcaagggattctcctgcctcagcctccaactagctgggattacaggcacaagccacatgcctggtaaaattctttgtatttttactacagacggagtttccccgtgtttggccgggctggtctcgaactcctgacctcaggtgatccaccagcctcggctcccaaagttctgggattgaatgcgtgagccaccatgccggggcggtatggctcttttaaacttcatttgatgcctgggttataatatcatatgctggaggctcactgtggatgtagagtagggcaaatctgtgtgtgtatgtcattagaaaaattctaccatctttccttatacatctggtgtgggcgcactctacagtgacttcagtttgtcaagaacgaatgtggaggcggcgaaaatgatgctgccaaagtcccagtgaagttaggtgggtcaattagtgcattcctttctaaggtgtgttaagtggatctgccaaaaagaatcacagtcgtgattaggatgaaatatgactatttacactcaaaatatattcagcaagggtcatttagttggcccctcaatgcttcacagggtgccaaagaatctgggggaccctccgtgccaggtattccctcacaagcacacgggctagaggaaatccaaagatcagtggagaaataacgaaagggaacagcccaagggtgtggtggagcaaccggacactaacgggggaagcaaggtaacgactataggccaataaccgagggaaacacgcggggggggacactgccgacaggcaggggcagcacggaaaagaaaaacggggaacaggcggaaaaaaacagcagatga

SEQ ID NO: 642879 - DNA, 134 bp, Homo sapiens
  misc_feature (109)..(109): n is a, c, g, or t
  misc_feature (125)..(125): n is a, c, g, or t
gacgacattttacatgtattcttagacgtatcaatcaccattggtcaatctctaccatagtgaccatctttggttttagtttgactactctcacacaatgatgcctccngtctccaccataccangaatgagta

SEQ ID NO: 642880 - DNA, 223 bp, Homo sapiens
gccgagcaagaagaagaaggtacaacgcgcggtttcccgccggccgcgaatctcaagaagatcatgcagacggacgaagagatttggaaggtcgcgcgcgcgcggtgcctgttcaatcaatcttcccgggcgctctgagctcttccctagagtcgctgttgaagaaggcctgccaaggtgacccagtcgcgggaacggaaggaccatgaccacatacccacct

SEQ ID NO: 642881 - DNA, 156 bp, Homo sapiens
cagcatcgagcactgacgctcccacccttgggcaaggacgtcagtgcgcctgcgagcgtccctttgcgcggcagcccgttgcgggccctcaaggagaagcacaggccaggatggccccgggtcgcgcggtgaccgggctcctgtggctggcggccg

SEQ ID NO: 642882 - DNA, 113 bp, Homo sapiens
tacttacattgtgacctcattgtgattctggactccgtgttcctggtcttttccacctctgtgcatgaaaatgcgctgtgctgatgagctgaccccgtggaagttccacgtgt

SEQ ID NO: 642883 - DNA, 343 bp, Homo sapiens
cagaggcatgtatgatggagctgtgcctgtggtggttgtgtgaggcataggctcatctagcggagagtgccggtgaggtagggtatgggcctaaataggccattgtgagtcatgagcttggtctagtagaggctgatgaaaaaagttcggggcctggagaggctgctgggtggtaggagcataatgtaaaatcgagggggcgtgtaaagcttgttttccttgcaagttggatggtcccaggttttgtgtggcacccctctggaatccatttatatgaaaattccaaatattagtggggcatgggggcaagcacctgtagtctcagccacgtgggaggttggga

SEQ ID NO: 642884 - DNA, 111 bp, Homo sapiens
  misc_feature (77)..(77): n is a, c, g, or t
  misc_feature (111)..(111): n is a, c, g, or t
gcgcgccgtcaggtaccaaagacgttaccacgtaaagatcagcctcccagaacacctcatgacaatgacaccgggcngtaattaagggtgagcaagtcaccttttaccagn

SEQ ID NO: 642885 - DNA, 345 bp, Homo sapiens
ttagaattctctggctcttaaaataaaggcctgaaagagagtggagattcccctatatttccttgccctgtaaagctccaggagagagagatctggggggctccatagctgtcatcaactcctcttggcactaagttggcagtcagcaaaggaagtaaataggaggggaaaatagtttgccagggtttcctctccattttaattttcatcttcacagcagaattttcctttccacaaggggaatctgagaagtacaatgcttgcttggtataaacaaggccgggggaaattccactggcctcaggggctgatgatcgggtaagggatgctgtcgggtaccgagct

SEQ ID NO: 642886 - DNA, 237 bp, Homo sapiens
ccgtgcaaaggcttcaagatgataacttctctatgagccggcaaggtgcttgatctctcagcccagggccattcaacgcctccgggccattcaacgcctccggccattgagacgcctggcggccattcaacgcctcggaccattcaacgcctccggccattcaacgcctccgggcattcaacgccttcgggccattcaacgccttcgggccattcaacgcttcggggccattaaacg

SEQ ID NO: 642887 - DNA, 823 bp, Homo sapiens
aacggctaggtacgaggccggggttactctactaaaaatacaaaaattggccggtgtgttggtgcacgcctgtaatcacagctacttgggaggctgagacacgagaatcacttgaacccaggaggcggaggttgccgtgagcagagatcataccactacactccagcctgggcgacagagtgagactgtctcaaaaaaaaaaacaaaaaaaaaacagtggattgggactctctagagttgtccatgtgtagatgtccgcaccaaccttatgggcttgtcctaggaagcattggcagctaggatgctgctcgccttgagagccacatccttgtgacctgagccgatgccgcctccacctcccagctgctccggagtcacagtggcccacccgttatacttttgacttggcagttctcccgagcccgccccaacagccatgacccacaggggtagattttcttttttccactgattctataaagcacttttaactctaagttttttagagacagggtcttcctatgttgcccaggctggtctcaaacctactggtctcaagcaatcctcccatctcagcttcccaacgtgtcgggctttacggcttgagccaccaatgccctgttctgtcgggcctttttggagccataaattaattactttccacgcgcacgttttggtggcatcctgctctgttatccccagtacttgttcgggtgaggggggaggatccttgaccccgaagttcgaactgcctatactgtatccacaatggatcccttggccccggcggctctgtctgaaacatgaattccgtgtacgcgaa

SEQ ID NO: 642888 - DNA, 135 bp, Homo sapiens
tcgctatcatcggcacctcgctattcatcggcaccggggttggtgtaaaataggcgtagtagaagtagaggttaaggagggtgatggtggctattatagtgcggactaatagcgaggtgccgatgagtagcgagg

SEQ ID NO: 642889 - DNA, 4211 bp, Homo sapiens
gaggtttctgttagggaccgtctttgggagtgatctatctctgctctctgggggggatctttggtctggagcttttgggggggcttgtgtttggaagtttgccttcgggagatatctgtctgggacctcttagggtttctgtatctgagctttctcttttgtgtctgtcagtccaagggcagcaaaaagtatgtcctttctgaagcctttttttccgtaggtttcttcattcttttctctcttgtcttatgttcattttagccatagacttgactggagtttagagggaattgattgttgtccagatgagtcgtacaggaaagcagattgtctttttttgagacggagtcttgctctgccgcccaggctggagtgcagtggcatattcttggctcactgcaatctccgcctcctggattcaagcgattctcctgcctcagcctctcaagtagctgggattacaggcacccgccaccacgcctgactaattttttgtatgtttagtagagatgaggtttcactatgttggccagtctggtctcgaactcctgactttgtgatctgcccacctcggcctcccgaagtgctgagattacaggcgtgagccaccgtgccctgccccagattatcctttttatttgctcagtccccccagggagcagatggcttcagacagccacacaaaacactgttcctgcttaattctccatggggtcatggttaaagagaggaagctgggctgagctccctttactaattggtcctctacatcttgcgcacagaagggaacctggcccagtggccagtgactctcctctccctttatggcagcatttccaagcacctgccctgtgacagatactggctaggtactggggataacaaagacgaataaaataacagcttaccatccagtagtagacatggagacatccgtttcctctgactagcattgggatggtgctgaaaccctggaactatacattcagtttagaactatacattcagtttagaactctcagttatggacgttctgccttctgtttttttggtttttgtttttgtccaccagaaaacatctgctagtaactgccttctgtgttgatgctttctttcctcaccttacccagcgtgcttctgttcttcaaggttgaaaactaagcatggggaagagctgcaaggtggtcgtgtgtggccaggcgtctgtgggcaaaacttcaatcctggagcagcttctgtatgggaaccatgtagtgggtgagtgttgttggagggggaggaacagtggaagaagttgaaaaataaggaataggacttgatcacaacacacacaggctaaaagctgctcctggtggttttcccccctggaagaataaaacttacattgtaacagatcaactctacaacactgaacaaatccggagggagaaagccctatgtccaagataggaaagagaagctgtcatgtcacacttgtgcttagcatggaattagcataaaattaatgtccattggccgggtgcggtggatcacgcctgtaatccgagcactttgggaggctgaggcgggtggatcacctcaggtcgggagttcgagaccagcctaacgaacttggagaaaccctgtctctactaaaaatacaaaattagccgggtgtggtggcacatgcctgtaatcccagctattcgggaggccgaggcaggagaatcgcttgaactcgggaggtggaggttgcggtgagccgagattgcgccattgcactccagcctgggcaacgagagcaaaactccgtctcaaaaaaagaaagaaattaatgttcgttcccctaaacccaaatcatttcagtcctgccaggctgtcaattctctggcctcctcagccccctacattcctttctccccatttggtcagccttaagatgctctcatcactcacatttcccatctctctctccacttcagacagttttctcattttataccaggttcggagatgatcgagacgcaggaggacatctacgtgggctccattgagacagaccggggggtgcgagagcaggtgcgtttctatgacacccgggggctccgagatggggccgaactgccccgacactgcttctcttgcactgatggctacgtcctggtctatagcacagatagcagagagtcttttcagcgtgtggagctgctcaagaaggagattgacaaatccaaggacaagaaggaggtcaccatcgtggtccttggcaacaagtgtgacttacaggagcagcggcgtgtagacccagatgtggctcagcactgggccaagtcagagaaggtgaagctgtgggaggtgtcagtggcggaccggcgctccctcctggagccctttgtctacttggccagcaagatgacgcaaccccagagcaagtctgccttccccctcagccggaagaacaagggcagcggctccttggatggctgaagagctgccgttcctctttcacgatcccagccccatttcagtgtctggggctctggtagatgtgttgagggcaaagtagaggacaagctgtctttcccagtcagccagggagctccccgccaggccacgccccagccactttgctccctctcacctctgggaagtgcaaatactcttggttgacatccccttcctcagccctcccagcctactccccatcccagcttttagaggatctgctccactgtctcctggggcagttgtgggtcactgtcccttccagctgccccagacaggaagcagagtcaccacgcagcagtgtcccttcttgggtctgagttcctattataggtaggggccccaccctctgggcttcccatcagcgacacacacacacttatggcaccagcctggactccagaaaaagggtgtccaggtattgtgtgtatgcatttagttgtgcacacacaaatatgctcctatactggcattaggcgtctcctcatccctcaccctgacctttctcctgtccttttcttggctggaagaagttggcctcctgggagtgtagttttctgttttaaatcccccacccctggctgggctcagtggctcacccctgtaatcccagcactttgggaggccaaggcgggtcgattacttgaggtcaggagttcacgaccagcctggccaacattgtgaaaccccatctctgccaaaaatacaaaagttagccgggcgtagtggcacatgcctgtaatcccagctacccggggaggctgaggcaggagaattgcttgaactcagaaggcggaggctgcagtgagccgagatcgtgccactgcactccagcctggtcaacagagcaagactccatctcgaaaaaaaaaaaaaaaaattccccacccctaccaattgttttacttcctcttcctgctcagggagcagatgggcctcactggttgagatggaatagaataactgggctatgagtcaccagcccactttgtgacccagcaagacctttcccctctctgggcatcagtttctcatctgtaagatgaccagagttgcttagatgatctcctagatcctttccagttctcttgatttcgtaaagccaatggcttctccctctttaaggtgctatgccaaccagccctggaggctgggatctgccgctccctccagccaccagggggcaggagtgcactacctgctgtcagtcaccagagtggccgctcagtgcccagcccgccagcctcgctcttggaggctgctctttatcctgcctgtggttttcagctcagagctggacttctatttataagttacctgtatttatatttatatgcccgctctcatggtgaaggctggacaaggtgctcctctggcccctccttcttacctcagatgcctgaacagaacaaggcaaacccgtagcagcctctcaggagctgacaggtcctctttcggggctcaggagggtgggcacacacccagcggcctgcagagtaagcttattacccacaactgtgcccgctttgtgcttctaaggtgcacacctagcctaggtgagacactgcagccaggcaaccaccgacacacgccccttctcaaagccagaggtgagtggggcaggtgcccggggctgggtgagtggaattaggacacacacaggcttgggcttcaagttcatttattgatgcattggttggacacaataaaaccacaattgttatcaa

SEQ ID NO: 642890 - DNA, 403 bp, Homo sapiens
ctagaggactcactaacctaatcgctactatggcttgtcatatatgggatgcgtgtggaatattggatattccatgtgtgacaaaatggttgaaatggtgagctggcataagctggaccattatcagttttaattttggtgggcagtcccataaatgcaaaagttaaaatatgtttaatgacatatcgagttgactttccaggcagagcatgtgcactaattaagtgagtgttggggttctagtcctcaaaagttaatacctgtggaaggaggggatgtgcttgtgagctgacaatccaggcattgcaggataatttgtttagccagtctctgggtaagtcgaaatagtttagataaatttctccaatttaggtggacacaaatcgatgcgactagggtcagt

SEQ ID NO: 642891 - DNA, 801 bp, Homo sapiens
ccgggcgtggtggcaggcgcctgtaattccaggaggctgaggcacaagaatcgcttgaacccaggcagcagaggttgcagtgacctgaggtcacaccatagctctcaggtcctctttcggggctcaggagggtgggcacacacccagcggcctgcagagtaagcttattacccacaactgtgcccgctttgtgcttctaaggtgcacacctagcctaggtgagacactgcagccaggcaaccaccgacacacgccccttctcaaagccagaggtgagtggggcaggtgcccggggctgggtgagtggaattaggacacacacaggcttgggcttcaagttcatttattgatgcattggttggacacaataaaaccacaattgttatcaaaaagtttccctcccctccccctttttctggttctcccattggaaatgtctttaaaaaacaaaaaaaagatacagggggatactggcagggtcccatattgtggggtggggagggggcagtgctgcagtggaaaggagtttgtgacattgacattgacagcatgaaaatgggtcttgccagtgcatgtgagactgcctcccaacactcagcttcacagtggcaggggctggttgggagaagggaaagctgaatttagtgctaggaccagtttggagtgggaagctgtaggggaaagctcttcctttgggagctctgcggggggttcggtttttaagctgagtccatagtctgagggagacccacacccgccctccaagagttggggttcaggaagtcagagaaaggctaagaa

SEQ ID NO: 642892 - DNA, 103 bp, Homo sapiens
cctaccgtatcttagaagaggaagttctttctgtggatagtctgctgtgagctttttattggtaatcaatgttgagtccagttaaatgttttttttctccagt

SEQ ID NO: 642893 - DNA, 349 bp, Homo sapiens
catcatggggtctggacttggctggccgtgacctcacggactacctcatgaagatcctcacacgatagaggctattcctttgtgatcacagctcagatagaaattgtgcgagacatcaagggagaagcatgtgctatgtggccctggattttgagaatgaggatggccacaagcagcttcctcttacctccctgggaggaagagctatgaggctgcgcagatgggcttggttattacccgattggcaatgagacgcttccgctgtgcctgagtaccctacttccagaccttcctttatttggcatggatgtccgctgtgaattctatgagacaaatctacaatttccat

SEQ ID NO: 642894 - DNA, 2494 bp, Homo sapiens
agcgggacggaagctggggagcgggcaggcggcgggggcggggcctggaggagcctacaccgactctggaggaagactggagcctttgcggcggcgctgcccctcccctggtccccgcgagctcggagggcccggctggtgctgcgggggccccgggaggttgaaaactaagcatggggaagagctgcaaggtggtcgtgtgtggccaggcgtctgtgggcaaaacttcaatcctggagcagcttctgtatgggaaccatgtagtgggttcggagatgatcgagacgcaggaggacatctacgtgggctccattgagacagaccggggggtgcgagagcaggtgcgtttctatgacacccgggggctccgagatggggccgaactgccccgacactgcttctcttgcactgatggctacgtcctggtctatagcacagatagcagagagtcttttcagcgtgtggagctgctcaagaaggagattgacaaatccaaggacaagaaggaggtcaccatcgtggtccttggcaacaagtgtgacttacaggagcagcggcgtgtagacccagatgtggctcagcactgggccaagtcagagaaggtgaagctgtgggaggtgtcagtggcggaccggcgctccctcctggagccctttgtctacttggccagcaagatgacgcaaccccagagcaagtctgccttccccctcagccggaagaacaagggcagcggctccttggatggctgaagagctgccgttcctctttcacgatcccagccccatttcagtgtctggggctctggtagatgtgttgagggcaaagtagaggacaagctgtctttcccagtcagccagggagctccccgccaggccacgccccagccactttgctccctctcacctctgggaagtgcaaatactcttggttgacatccccttcctcagccctcccagcctactccccatcccagcttttagaggatctgctccactgtctcctggggcagttgtgggtcactgtcccttccagctgccccagacaggaagcagagtcaccacgcagcagtgtcccttcttgggtctgagttcctattataggtaggggccccaccctctgggcttcccatcagcgacacacacacacttatggcaccagcctggactccagaaaaagggtgtccaggtattgtgtgtatgcatttagttgtgcacacacaaatatgctcctatactggcattaggcgtctcctcatccctcaccctgacctttctcctgtccttttcttggctggaagaagttggcctcctgggagtgtagttttctgttttaaatcccccacccctggctgggctcagtggctcacccctgtaatcccagcactttgggaggccaaggcgggtcgattacttgaggtcaggagttcacgaccagcctggccaacattgtgaaaccccatctctgccaaaaatacaaaagttagccgggcgtagtggcacatgcctgtaatcccagctacccggggaggctgaggcaggagaattgcttgaactcagaaggcggaggctgcagtgagccgagatcgtgccactgcactccagcctggtcaacagagcaagactccatctcgaaaaaaaaaaaaaaaaattccccacccctaccaattgttttacttcctcttcctgctcagggagcagatgggcctcactggttgagatggaatagaataactgggctatgagtcaccagcccactttgtgacccagcaagacctttcccctctctgggcatcagtttctcatctgtaagatgaccagagttgcttagatgatctcctagatcctttccagttctcttgatttcgtaaagccaatggcttctccctctttaaggtgctatgccaaccagccctggaggctgggatctgccgctccctccagccaccagggggcaggagtgcactacctgctgtcagtcaccagagtggccgctcagtgcccagcccgccagcctcgctcttggaggctgctctttatcctgcctgtggttttcagctcagagctggacttctatttataagttacctgtatttatatttatatgcccgctctcatggtgaaggctggacaaggtgctcctctggcccctccttcttacctcagatgcctgaacagaacaaggcaaacccgtagcagcctctcaggagctgacaggtcctctttcggggctcaggagggtgggcacacacccagcggcctgcagagtaagcttattacccacaactgtgcccgctttgtgcttctaaggtgcacacctagcctaggtgagacactgcagccaggcaaccaccgacacacgccccttctcaaagccagaggtgagtggggcaggtgcccggggctgggtgagtggaattaggacacacacaggcttgggcttcaagttcatttattgatgcattggttggacacaataaaaccacaattgttatcaa

SEQ ID NO: 642895 - DNA, 2471 bp, Homo sapiens
  misc_feature (19)..(19): n is a, c, g, or t
  misc_feature (40)..(40): n is a, c, g, or t
  misc_feature (44)..(44): n is a, c, g, or t
ggcacaagtatcaccctgnggtggaaaacgtaagttggcnttcngaccacgcgtcggagcctttgcggcggcgctgcccctcccctggtccccgcgagctcggagggcccggctggtgctgcgggggccccgggaggttgaaaactaagcatggggaagagctgcaaggtggtcgtgtgtggccaggcgtctgtgggcaaaacttcaatcctggagcagcttctgtatgggaaccatgtagtgggttcggagatgatcgagacgcaggaggacatctacgtgggctccattgagacagaccggggggtgcgagagcaggtgcgtttctatgacacccgggggctccgagatggggccgaactgccccgacactgcttctcttgcactgatggctacgtcctggtctatagcacagatagcagagagtcttttcagcgtgtggagctgctcaagaaggagattgacaaatccaaggacaagaaggaggtcaccatcgtggtccttggcaacaagtgtgacttacaggagcagcggcgtgtagacccagatgtggctcagcactgggccaagtcagagaaggtgaagctgtgggaggtgtcagtggcggaccggcgctccctcctggagccctttgtctacttggccagcaagatgacgcaaccccagagcaagtctgccttccccctcagccggaagaacaagggcagcggctccttggatggctgaagagctgccgttcctctttcacgatcccagccccatttcagtgtctggggctctggtagatgtgttgagggcaaagtagaggacaagctgtctttcccagtcagccagggagctccccgccaggccacgccccagccactttgctccctctcacctctgggaagtgcaaatactcttggttgacatccccttcctcagccctcccagcctactccccatcccagcttttagaggatctgctccactgtctcctggggcagttgtgggtcactgtcccttccagctgccccagacaggaagcagagtcaccacgcagcagtgtcccttcttgggtctgagttcctattataggtaggggccccaccctctgggcttcccatcagcgacacacacacacttatggcaccagcctggactccagaaaaagggtgtccaggtattgtgtgtatgcatttagttgtgcacacacaaatatgctcctatactggcattaggcgtctcctcatccctcaccctgacctttctcctgtccttttcttggctggaagaagttggcctcctgggagtgtagttttctgttttaaatcccccacccctggctgggctcagtggctcacccctgtaatcccagcactttgggaggccaaggcgggtcgattacttgaggtcaggagttcacgaccagcctggccaacattgtgaaaccccatctctgccaaaaatacaaaagttagccgggcgtagtggcacatgcctgtaatcccagctacccggggaggctgaggcaggagaattgcttgaactcagaaggcggaggctgcagtgagccgagatcgtgccactgcactccagcctggtcaacagagcaagactccatctcgaaaaaaaaaaaaaaaaattccccacccctaccaattgttttacttcctcttcctgctcagggagcagatgggcctcactggttgagatggaatagaataactgggctatgagtcaccagcccactttgtgacccagcaagacctttcccctctctgggcatcagtttctcatctgtaagatgaccagagttgcttagatgatctcctagatcctttccagttctcttgatttcgtaaagccaatggcttctccctctttaaggtgctatgccaaccagccctggaggctgggatctgccgctccctccagccaccagggggcaggagtgcactacctgctgtcagtcaccagagtggccgctcagtgcccagcccgccagcctcgctcttggaggctgctctttatcctgcctgtggttttcagctcagagctggacttctatttataagttacctgtatttatatttatatgcccgctctcatggtgaaggctggacaaggtgctcctctggcccctccttcttacctcagatgcctgaacagaacaaggcaaacccgtagcagcctctcaggagctgacaggtcctctttcggggctcaggagggtgggcacacacccagcggcctgcagagtaagcttattacccacaactgtgcccgctttgtgcttctaaggtgcacacctagcctaggtgagacactgcagccaggcaaccaccgacacacgccccttctcaaagccagaggtgagtggggcaggtgcccggggctgggtgagtggaattaggacacacacaggcttgggcttcaagttcatttattgatgcattggttggacacaataaaaccacaattgttatcaa

SEQ ID NO: 642896 - DNA, 2906 bp, Homo sapiens
agcgggacggaagctggggagcgggcaggcggcgggggcggggcctggaggagcctacaccgactctggaggaagactggagcctttgcggcggcgctgcccctcccctggtccccgcgagctcggagggcccggctggtgctgcgggggccccgggaggttgaaaactaagcatggggaagagctgcaaggtggtcgtgtgtggccaggcgtctgtgggcaaaacttcaatcctggagcagcttctgtatgggaaccatgtagtgggttcggagatgatcgagacgcaggaggacatctacgtgggctccattgagacagaccggggggtgcgagagcaggtgcgtttctatgacacccgggggctccgagatggggccgaactgccccgacactgcttctcttgcactgatggctacgtcctggtctatagcacagatagcagagagtcttttcagcgtgtggagctgctcaagaaggagattgacaaatccaaggacaagaaggaggtcaccatcgtggtccttggcaacaagtgtgacttacaggagcagcggcgtgtagacccagatgtggctcagcactgggccaagtcagagaaggtgaagctgtgggaggtgtcagtggcggaccggcgctccctcctggagccctttgtctacttggccagcaagatgacgcaaccccagagcaagtctgccttccccctcagccggaagaacaagggcagcggctccttggatggctgaagagctgccgttcctctttcacgatcccagccccatttcagtgtctggggctctggtagatgtgttgagggcaaagtagaggacaagctgtctttcccagtcagccagggagctccccgccaggccacgccccagccactttgctccctctcacctctgggaagtgcaaatactcttggttgacatccccttcctcagccctcccagcctactccccatcccagcttttagaggatctgctccactgtctcctggggcagttgtgggtcactgtcccttccagctgccccagacaggaagcagagtcaccacgcagcagtgtcccttcttgggtctgagttcctattataggtaggggccccaccctctgggcttcccatcagcgacacacacacacttatggcaccagcctggactccagaaaaagggtgtccaggtattgtgtgtatgcatttagttgtgcacacacaaatatgctcctatactggcattaggcgtctcctcatccctcaccctgacctttctcctgtccttttcttggctggaagaagttggcctcctgggagtgtagttttctgttttaaatcccccacccctggctgggctcagtggctcacccctgtaatcccagcactttgggaggccaaggcgggtcgattacttgaggtcaggagttcacgaccagcctggccaacattgtgaaaccccatctctgccaaaaatacaaaagttagccgggcgtagtggcacatgcctgtaatcccagctacccggggaggctgaggcaggagaattgcttgaactcagaaggcggaggctgcagtgagccgagatcgtgccactgcactccagcctggtcaacagagcaagactccatctcgaaaaaaaaaaaaaaaaattccccacccctaccaattgttttacttcctcttcctgctcagggagcagatgggcctcactggttgagatggaatagaataactgggctatgagtcaccagcccactttgtgacccagcaagacctttcccctctctgggcatcagtttctcatctgtaagatgaccagagttgcttagatgatctcctagatcctttccagttctcttgatttcgtaaagccaatggcttctccctctttaaggtgctatgccaaccagccctggaggctgggatctgccgctccctccagccaccagggggcaggagtgcactacctgctgtcagtcaccagagtggccgctcagtgcccagcccgccagcctcgctcttggaggctgctctttatcctgcctgtggttttcagctcagagctggacttctatttataagttacctgtatttatatttatatgcccgctctcatggtgaaggctggacaaggtgctcctctggcccctccttcttacctcagatgcctgaacagaacaaggcaaacccgtagcagcctctcaggagctgacaggtcctctttcggggctcaggagggtgggcacacacccagcggcctgcagagtaagcttattacccacaactgtgcccgctttgtgcttctaaggtgcacacctagcctaggtgagacactgcagccaggcaaccaccgacacacgccccttctcaaagccagaggtgagtggggcaggtgcccggggctgggtgagtggaattaggacacacacaggcttgggcttcaagttcatttattgatgcattggttggacacaataaaaccacaattgttatcaaaaagtttccctcccctccccctttttctggttctcccattggaaatgtctttaaaaaacaaaaaaaagatacagggggatactggcagggtcccatattgtggggtggggagggggcagtgctgcagtggaaaggagtttgtgacattgacattgacagcatgaaaatgggtcttgccagtgcatgtgagactgcctcccaacactcagcttcacagtggcaggggctggttgggagaagggaaagctgaatttagtgctaggaccagtttggagtgggaagctgtaggggaaagctcttcctttgggagctctgcggggggttcggtttttaagctgagtccatagtctgagggagacccacacccgccctccaagagttggggttcaggaagtcagagaaaggctaagaa

SEQ ID NO: 642897 - DNA, 2440 bp, Homo sapiens
agcgggacggaagctggggagcgggcaggcggcgggggcggggcctggaggagcctacaccgactctggaggaagactggagcctttgcggcggcgctgcccctcccctggtccccgcgagctcggagggcccggctggtgctgcgggggccccgggaggttgaaaactaagcatggggaagagctgcaaggtggtcgtgtgtggccaggcgtctgtgggcaaaacttcaatcctggagcagcttctgtatgggaaccatgtagtgggttcggagatgatcgagacgcaggaggacatctacgtgggctccattgagacagaccggggggtgcgagagcaggtgcgtttctatgacacccgggggctccgagatggggccgaactgccccgacactgcttctcttgcactgatggctacgtcctggtctatagcacagatagcagagagtcttttcagcgtgtggagctgctcaagaaggagattgacaaatccaaggacaagaaggaggtcaccatcgtggtccttggcaacaagtgtgacttacaggagcagcggcgtgtagacccagatgtggctcagcactgggccaagtcagagaaggtgaagctgtgggaggtgtcagtggcggaccggcgctccctcctggagccctttgtctacttggccagcaagatgacgcaaccccagagcaagtctgccttccccctcagccggaagaacaagggcagcggctccttggatggctgaagagctgccgttcctctttcacgatcccagccccatttcagtgtctggggctctggtagatgtgttgagggcaaagtagaggacaagctgtctttcccagtcagccagggagctccccgccaggccacgccccagccactttgctccctctcacctctgggaagtgcaaatactcttggttgacatccccttcctcagccctcccagcctactccccatcccagcttttagaggatctgctccactgtctcctggggcagttgtgggtcactgtcccttccagctgccccagacaggaagcagagtcaccacgcagcagtgtcccttcttgggtctgagttcctattataggtaggggccccaccctctgggcttcccatcagcgacacacacacacttatggcaccagcctggactccagaaaaagggtgtccaggtattgtgtgtatgcatttagttgtgcacacacaaatatgctcctatactggcattaggcgtctcctcatccctcaccctgacctttctcctgtccttttcttggctggaagaagttggcctcctgggagtgtagttttctgttttaaatcccccacccctggctgggctcagtggctcacccctgtaatcccagcactttgggaggccaaggcgggtcgattacttgaggtcaggagttcacgaccagcctggccaacattgtgaaaccccatctctgccaaaaatacctgaggcaggagaattgcttgaactcagaaggcggaggctgcagtgagccgagatcgtgccactgcactccagcctggtcaacagagcaagactccatctcgaaaaaaaaaaaaaaaaattccccacccctaccaattgttttacttcctcttcctgctcagggagcagatgggcctcactggttgagatggaatagaataactgggctatgagtcaccagcccactttgtgacccagcaagacctttcccctctctgggcatcagtttctcatctgtaagatgaccagagttgcttagatgatctcctagatcctttccagttctcttgatttcgtaaagccaatggcttctccctctttaaggtgctatgccaaccagccctggaggctgggatctgccgctccctccagccaccagggggcaggagtgcactacctgctgtcagtcaccagagtggccgctcagtgcccagcccgccagcctcgctcttggaggctgctctttatcctgcctgtggttttcagctcagagctggacttctatttataagttacctgtatttatatttatatgcccgctctcatggtgaaggctggacaaggtgctcctctggcccctccttcttacctcagatgcctgaacagaacaaggcaaacccgtagcagcctctcaggagctgacaggtcctctttcggggctcaggagggtgggcacacacccagcggcctgcagagtaagcttattacccacaactgtgcccgctttgtgcttctaaggtgcacacctagcctaggtgagacactgcagccaggcaaccaccgacacacgccccttctcaaagccagaggtgagtggggcaggtgcccggggctgggtgagtggaattaggacacacacaggcttgggcttcaagttcatttattgatgcattggttggacacaataaaaccacaattgttatcaa

SEQ ID NO: 642898 - DNA, 789 bp, Homo sapiens
  misc_feature (65)..(65): n is a, c, g, or t
  misc_feature (67)..(67): n is a, c, g, or t
  misc_feature (76)..(76): n is a, c, g, or t
  misc_feature (107)..(107): n is a, c, g, or t
  misc_feature (110)..(110): n is a, c, g, or t
  misc_feature (116)..(116): n is a, c, g, or t
  misc_feature (125)..(125): n is a, c, g, or t
  misc_feature (135)..(135): n is a, c, g, or t
ctactatccaacttggtaaagtcaatcttcaatatattgtgcatgggctcttctggataactttnantggaaccanggatgaccggggggggttaatctcttccacnttnattttnaaaacccanctagaccccnagtcccttacacatcgggcaagggatatgccaagatcatccgaaacaatgggcttgaagcacatctgtaggcaagatggctgagaaatacaggagagggggggggttttggaaaggaaatctgctttggggatgatctttcaggcaatgtcaacttacttctttaatcaacatttaatatcaatggatctgggattaaaagggctgaatatgtaatgcctcgtgaagtatttaataatggcctttatttgtatttggatcaatgagggttttaaaaaaaatgggagagaaaaccactaaccttgatttttgggtggcaaaatcagataaacctggaaacataaatggaagtgcttagacatttttctagaaaaaaatgcgaaggttataaagatgatgcaaccatgattggcaagctgggacaggaggacctggattataagcggacctgggggggaacttaatggtgctgattccataggctgggtttggtaagggggatccactggcatgggagccatagttgttgtacatgggagagcggaggtgaagggcacattgtagagggatgcatgcgttcgagcaaagtggggggaggggagtctacttggtgatatgatgcgggccatatttgtggggggagggcgagggcgtc

SEQ ID NO: 642899 - DNA, 466 bp, Homo sapiens
ctgtgaaagtggtgacacttcatgtatataatactgccagggaatgaagaattgtacataatgaatccaagttgccaaaggtacattttcaagtgttaggactttataattctgtcttagatgaaaaagcttctaaaacacacgatagacatcttttctctcaaattcagctgattgctcatggtttgatgttgatgcaatatttgggagattaatgccactgaggatatggctatgtgtttgtccaacataaaccatccaaggacacttccttcacaagttagacacttgttcctctttctgaatgctcttattttatctggctgcagactacagtagctctatttcctgatgaaatctaagttgagttttaatttttagtgtttgtaaaacagatcactaaaccggggaaagtaatatgcaaaatgtgtgcttacagtggataaagtcctttaggcctttctga

SEQ ID NO: 642900 - DNA, 3361 bp, Homo sapiens
  misc_feature (434)..(434): n is a, c, g, or t
  misc_feature (439)..(439): n is a, c, g, or t
  misc_feature (621)..(621): n is a, c, g, or t
  misc_feature (640)..(640): n is a, c, g, or t
  misc_feature (659)..(659): n is a, c, g, or t
  misc_feature (705)..(705): n is a, c, g, or t
agcgggctattccgactggcaatctcgaaccactgcggctgcttcggagtgccaacagcgcccaagcagttgccctcttccttggtgcttaacttaagaaagaacagtgctgggaaggataaagatcacccaggaaggacaggggaggaggagtctgacgtagagaacacgagataagcccctcgctcttcctttttttctctgtcatctttgacttctgggataaccgggggcaaccaggtcaattatggagacacacaatcacttcgaacccagactagtgatcgctggggtataattacaagggaaaacggggtgaggagagcaaaggtctggagacggaaagtgcagacaggcaacaatgcacagaagttaacaacgagaacgcgggggtcgggggcgatgtaaggaagtcgtcatcgacgccgcgccgnttccnccacctcgcaccagacctctgaaatgccctcggagactcggcctctcctataaggacgatcgtcctctcagctggagaacaaggccatgcctcagctcctacgccaggcggaagcgggagaggaaggccgacccccaagagcgcccttcagggggtccatccggccttgatctcagatgggngggtgttgcggagggcggngcatcgcctcacagctggnggctgcatcatggcaggaacgagtttcctgagccacggagctgcangtcgcctcctctactacctgctaccggttacctcttcgcctcttggtcgtcgagcagctccggctcggtcgccgccattaccacatcgcactccgcggcagccgccatcttaccgccgggaccagagagctgggtgggaggccggcggtgaagagcacttccggttggagcatagagcagctccgcggcgcctacgcccagaagggctccctcgggctcgtctaccagagagaggctccgcttggggccagagcggcactcccgacccccggatgtccacggtggtctccgcgccggggcgggagcccagggctgtgccaggttgaaaactaagcatggggaagagctgcaaggtggtcgtgtgtggccaggcgtctgtgggcaaaacttcaatcctggagcagcttctgtatgggaaccatgtagtgggttcggagatgatcgagacgcaggaggacatctacgtgggctccattgagacagaccggggggtgcgagagcaggtgcgtttctatgacacccgggggctccgagatggggccgaactgccccgacactgcttctcttgcactgatggctacgtcctggtctatagcacagatagcagagagtcttttcagcgtgtggagctgctcaagaaggagattgacaaatccaaggacaagaaggaggtcaccatcgtggtccttggcaacaagtgtgacttacaggagcagcggcgtgtagacccagatgtggctcagcactgggccaagtcagagaaggtgaagctgtgggaggtgtcagtggcggaccggcgctccctcctggagccctttgtctacttggccagcaagatgacgcaaccccagagcaagtctgccttccccctcagccggaagaacaagggcagcggctccttggatggctgaagagctgccgttcctctttcacgatcccagccccatttcagtgtctggggctctggtagatgtgttgagggcaaagtagaggacaagctgtctttcccagtcagccagggagctccccgccaggccacgccccagccactttgctccctctcacctctgggaagtgcaaatactcttggttgacatccccttcctcagccctcccagcctactccccatcccagcttttagaggatctgctccactgtctcctggggcagttgtgggtcactgtcccttccagctgccccagacaggaagcagagtcaccacgcagcagtgtcccttcttgggtctgagttcctattataggtaggggccccaccctctgggcttcccatcagcgacacacacacacttatggcaccagcctggactccagaaaaagggtgtccaggtattgtgtgtatgcatttagttgtgcacacacaaatatgctcctatactggcattaggcgtctcctcatccctcaccctgacctttctcctgtccttttcttggctggaagaagttggcctcctgggagtgtagttttctgttttaaatcccccacccctggctgggctcagtggctcacccctgtaatcccagcactttgggaggccaaggcgggtcgattacttgaggtcaggagttcacgaccagcctggccaacattgtgaaaccccatctctgccaaaaatacaaaagttagccgggcgtagtggcacatgcctgtaatcccagctacccggggaggctgaggcaggagaattgcttgaactcagaaggcggaggctgcagtgagccgagatcgtgccactgcactccagcctggtcaacagagcaagactccatctcgaaaaaaaaaaaaaaaaattccccacccctaccaattgttttacttcctcttcctgctcagggagcagatgggcctcactggttgagatggaatagaataactgggctatgagtcaccagcccactttgtgacccagcaagacctttcccctctctgggcatcagtttctcatctgtaagatgaccagagttgcttagatgatctcctagatcctttccagttctcttgatttcgtaaagccaatggcttctccctctttaaggtgctatgccaaccagccctggaggctgggatctgccgctccctccagccaccagggggcaggagtgcactacctgctgtcagtcaccagagtggccgctcagtgcccagcccgccagcctcgctcttggaggctgctctttatcctgcctgtggttttcagctcagagctggacttctatttataagttacctgtatttatatttatatgcccgctctcatggtgaaggctggacaaggtgctcctctggcccctccttcttacctcagatgcctgaacagaacaaggcaaacccgtagcagcctctcaggagctgacaggtcctctttcggggctcaggagggtgggcacacacccagcggcctgcagagtaagcttattacccacaactgtgcccgctttgtgcttctaaggtgcacacctagcctaggtgagacactgcagccaggcaaccaccgacacacgccccttctcaaagccagaggtgagtggggcaggtgcccggggctgggtgagtggaattaggacacacacaggcttgggcttcaagttcatttattgatgcattggttggacacaataaaaccacaattgttatcaa

SEQ ID NO: 642901 - DNA, 987 bp, Homo sapiens
  misc_feature (112)..(112): n is a, c, g, or t
gaagaacacctcctgtgttccaggcgctgtgtaggcctcggagatgcgggggttcatagcaatcagctgaagtactgctgcactgagtctgtaacccttgaaccctctttgnatcgttaagatcaacttggatgctcttttaaatagtcctcctcagtatatacccccgattagacgacacgcaagtgaccgtgaaagcaaggtcgtatgcaaggtttatgaccctgtatgtgatgtgtatagatgcacggcttgcctcgtggtgactatgttccactatgggtcatacattatcattcagagctggcgcttgctcgtactggcctgtggagtcttcccctggatcttctgaatagcactttcgcgctagaatggttgacatctcacttgccatgacaactgattcctagaaataactgggcacttcttgcttggtattttgctttcctttaccagtggatgtttggggcttgggacctcgccctgtgagatttcgtcatttgctagtacttactcgcctaggtcatcctttctcctactgtcttggcgctggtgcacggcacttgattcgtttacctgatttcagccctcagtggactctatgccgtgcggccgttggctacctcttctgggagggatctccgcatgtccgccctgagctttgttgcttctgtcttgccctgggcgacatgtctctttggatccagttgggtgttcttctgaggccacctgtctgttggacgtgctgggcctgttttggctcccgtcctttttgctactccactcgttattgggaaggccgacctttgggatccacgcgcttttattcggcgccggcttggcccgcttagatcccgacactgctcgaaaccccggtgtccgggccgttacaggtccagagacacaagtgggcccccctcccttgttctctccccctgttttgcaccggcggtgttttttcaacccctcttggcgccgctgcgcacg

SEQ ID NO: 642902 - DNA, 1525 bp, Homo sapiens
tcggcgtgtgcgtgggcgttaggtgtgagttgtggtttgtgctggtggtgtggttggtggttgcgtggttggctgtgtgcttttgttggtttggtgttggttgcgtggtgcggctctgcgtggtgtgtgtttgcttgtcggtttcgtggctgtctgcttgcgtcagtatgtgtttgttcttctcgtgtatcgtgtgtgttttggtgttgtggtgtcgtcgggtgccgcgcggtgtggcgtggcgggggtgtgtgggttggtggtggtcggggtgctggttggtcggtggcgatgtgtggtcgttgtttttgtttgcggctggtgactgtcgttcgtggtcggggtgtgttgtgttgggtagttcgggtgctgatagcggtgtcgtgtggtgtttggcgtgtcgggtgtggtgtgtggggggggtgaggtggggtcgagtgtgtgtggttgggtgggtggggtgcggcgttgtgggtggttggtggtttcgtggtggtgggtttgttgtgggtttgtgtgtgttcgtttgtggttggctgggtggtgggttgttgctttgtgagtgggctgtggtctttgcgcttctggggtggtcgggtgtggttggtggtgtggttggtggtgggggcgcgggttggggggggtcgttgtgtgtttgttggtagtcggtgtgtcgcggggtgtgtggggttggtggtgtgggggagggtcgtggggggggggttgggtgtttggtggtgtttgtgtggtcgttggcggtggggggggtgttttgtcggtgggcgtggtgcgtgtgtgtggtttgtggggttgttgggtgtggggggcgcgcgctggggctcgtgcggttgctcgtcgcgcgcgcggtcgcggcggcgtcgtgctttcgtctcgcgtcggtggggggtggggtttttgtgtgtgtggttgttgtttgttggtcgggggtcggggcgcgtgggttgttgtgggtgtcgtgttttgtgttggttgtgtgtgggggagtggttggtgtcttcgctcttggtgtggcgtcgggttgtgtgcgtgtgtgtcgtgtgttgctgcttcggcgttttgggcttggctcgtcgcgcactgcgtgggggggtgtggggggggggggtttggtgttgggtggttggtgtgtgttttgtgtgttgttctgcgctccggctgggggtggggtggggtcggtgctgggggggtgagggagtgtgcttgctttctctcgtgggtgggtggggtcgagggcgccgccccgcgcgcctcccccccccccgctgttttcctcgcccccgcccctcgccctcgcggtgtggtgtgttgtgttttgtcgccctctctcttctctctcccccccccactattgatgtgttgtgccgcgcgcgcgcgcccttttgtgttttgttgtttttttctctccctcctctttcctacccccccccccccctctctctctttcttcttctcgtgcgccccccccccttctttttttatttagtatatacgccccccatgcaca

SEQ ID NO: 642903 - DNA, 2402 bp, Homo sapiens
agcgggacggaagctggggagcgggcaggcggcgggggcggggcctggaggagcctacaccgactctggaggaagactggagcctttgcggcggcgctgcccctcccctggtccccgcgagctcggagggcccggctggtgctgcgggggccccgggaggttgaaaactaagcatggggaagagctgcaaggtggtcgtgtgtggccaggcgtctgtgggcaaaacttcaatcctggagcagcttctgtatgggaaccatgtagtgggttcggagatgatcgagacgcaggaggacatctacgtgggctccattgagacagaccggggggtgcgagagcagcacagatagcagagagtcttttcagcgtgtggagctgctcaagaaggagattgacaaatccaaggacaagaaggaggtcaccatcgtggtccttggcaacaagtgtgacttacaggagcagcggcgtgtagacccagatgtggctcagcactgggccaagtcagagaaggtgaagctgtgggaggtgtcagtggcggaccggcgctccctcctggagccctttgtctacttggccagcaagatgacgcaaccccagagcaagtctgccttccccctcagccggaagaacaagggcagcggctccttggatggctgaagagctgccgttcctctttcacgatcccagccccatttcagtgtctggggctctggtagatgtgttgagggcaaagtagaggacaagctgtctttcccagtcagccagggagctccccgccaggccacgccccagccactttgctccctctcacctctgggaagtgcaaatactcttggttgacatccccttcctcagccctcccagcctactccccatcccagcttttagaggatctgctccactgtctcctggggcagttgtgggtcactgtcccttccagctgccccagacaggaagcagagtcaccacgcagcagtgtcccttcttgggtctgagttcctattataggtaggggccccaccctctgggcttcccatcagcgacacacacacacttatggcaccagcctggactccagaaaaagggtgtccaggtattgtgtgtatgcatttagttgtgcacacacaaatatgctcctatactggcattaggcgtctcctcatccctcaccctgacctttctcctgtccttttcttggctggaagaagttggcctcctgggagtgtagttttctgttttaaatcccccacccctggctgggctcagtggctcacccctgtaatcccagcactttgggaggccaaggcgggtcgattacttgaggtcaggagttcacgaccagcctggccaacattgtgaaaccccatctctgccaaaaatacaaaagttagccgggcgtagtggcacatgcctgtaatcccagctacccggggaggctgaggcaggagaattgcttgaactcagaaggcggaggctgcagtgagccgagatcgtgccactgcactccagcctggtcaacagagcaagactccatctcgaaaaaaaaaaaaaaaaattccccacccctaccaattgttttacttcctcttcctgctcagggagcagatgggcctcactggttgagatggaatagaataactgggctatgagtcaccagcccactttgtgacccagcaagacctttcccctctctgggcatcagtttctcatctgtaagatgaccagagttgcttagatgatctcctagatcctttccagttctcttgatttcgtaaagccaatggcttctccctctttaaggtgctatgccaaccagccctggaggctgggatctgccgctccctccagccaccagggggcaggagtgcactacctgctgtcagtcaccagagtggccgctcagtgcccagcccgccagcctcgctcttggaggctgctctttatcctgcctgtggttttcagctcagagctggacttctatttataagttacctgtatttatatttatatgcccgctctcatggtgaaggctggacaaggtgctcctctggcccctccttcttacctcagatgcctgaacagaacaaggcaaacccgtagcagcctctcaggagctgacaggtcctctttcggggctcaggagggtgggcacacacccagcggcctgcagagtaagcttattacccacaactgtgcccgctttgtgcttctaaggtgcacacctagcctaggtgagacactgcagccaggcaaccaccgacacacgccccttctcaaagccagaggtgagtggggcaggtgcccggggctgggtgagtggaattaggacacacacaggcttgggcttcaagttcatttattgatgcattggttggacacaataaaaccacaattgttatcaa

SEQ ID NO: 642904 - DNA, 235 bp, Homo sapiens
ttggaggacagaaataacaggtgggagagcaatctggtgtgagggaatgggtgtataaaggagccctaactcattgccactcatcttcttccaagaagtggcatcaacatacaagagtgcatgaactggatagactctgggggagttccgggctcctaaataagggaaagagaaggggcgacacagggccctgtggtttcctggtgtacgtaacgtgaactgtgctccagttacg

SEQ ID NO: 642905 - DNA, 2253 bp, Homo sapiens
tttctgttttaaatcccccaccactgtgtctgcccacttttaattaatgctatacatctacgtgggctccattgagacagaccggggggtgcgagagcaggtgcgtttctatgacacccgggggctccgagatggggccgaactgccccgacactgcttctcttgcactgatggctacgtcctggtctatagcacagatagcagagagtcttttcagcgtgtggagctgctcaagaaggagattgacaaatccaaggacaagaaggaggtcaccatcgtggtccttggcaacaagtgtgacttacaggagcagcggcgtgtagacccagatgtggctcagcactgggccaagtcagagaaggtgaagctgtgggaggtgtcagtggcggaccggcgctccctcctggagccctttgtctacttggccagcaagatgacgcaaccccagagcaagtctgccttccccctcagccggaagaacaagggcagcggctccttggatggctgaagagctgccgttcctctttcacgatcccagccccatttcagtgtctggggctctggtagatgtgttgagggcaaagtagaggacaagctgtctttcccagtcagccagggagctccccgccaggccacgccccagccactttgctccctctcacctctgggaagtgcaaatactcttggttgacatccccttcctcagccctcccagcctactccccatcccagcttttagaggatctgctccactgtctcctggggcagttgtgggtcactgtcccttccagctgccccagacaggaagcagagtcaccacgcagcagtgtcccttcttgggtctgagttcctattataggtaggggccccaccctctgggcttcccatcagcgacacacacacacttatggcaccagcctggactccagaaaaagggtgtccaggtattgtgtgtatgcatttagttgtgcacacacaaatatgctcctatactggcattaggcgtctcctcatccctcaccctgacctttctcctgtccttttcttggctggaagaagttggcctcctgggagtgtagttttctgttttaaatcccccacccctggctgggctcagtggctcacccctgtaatcccagcactttgggaggccaaggcgggtcgattacttgaggtcaggagttcacgaccagcctggccaacattgtgaaaccccatctctgccaaaaatacaaaagttagccgggcgtagtggcacatgcctgtaatcccagctacccggggaggctgaggcaggagaattgcttgaactcagaaggcggaggctgcagtgagccgagatcgtgccactgcactccagcctggtcaacagagcaagactccatctcgaaaaaaaaaaaaaaaaattccccacccctaccaattgttttacttcctcttcctgctcagggagcagatgggcctcactggttgagatggaatagaataactgggctatgagtcaccagcccactttgtgacccagcaagacctttcccctctctgggcatcagtttctcatctgtaagatgaccagagttgcttagatgatctcctagatcctttccagttctcttgatttcgtaaagccaatggcttctccctctttaaggtgctatgccaaccagccctggaggctgggatctgccgctccctccagccaccagggggcaggagtgcactacctgctgtcagtcaccagagtggccgctcagtgcccagcccgccagcctcgctcttggaggctgctctttatcctgcctgtggttttcagctcagagctggacttctatttataagttacctgtatttatatttatatgcccgctctcatggtgaaggctggacaaggtgctcctctggcccctccttcttacctcagatgcctgaacagaacaaggcaaacccgtagcagcctctcaggagctgacaggtcctctttcggggctcaggagggtgggcacacacccagcggcctgcagagtaagcttattacccacaactgtgcccgctttgtgcttctaaggtgcacacctagcctaggtgagacactgcagccaggcaaccaccgacacacgccccttctcaaagccagaggtgagtggggcaggtgcccggggctgggtgagtggaattaggacacacacaggcttgggcttcaagttcatttattgatgcattggttggacacaataaaaccacaattgttatcaa

SEQ ID NO: 642906 - DNA, 403 bp, Homo sapiens
aagacccagctctttctttggctccttttttgaagccatctttgtctgctctcctctgctgcccagaaagttccagagtgaagctcagctctagatgaacaaaaactggttgagtccagagatgcctgagttggagatgaaccttgcaaactttcctcattaccatactaaaaaccccacccaggaaggagcttatctgccatttcctacacatgtgacatatggagaagcatgatcagctacttcacagtctctgcctttactctgcctccgcatacaatgctcagccaactagcctaacgaaagctgttttcaccattgtttgggaggtactgctttgggaaactgccccagctgtcctccttacttgttgtaggtaataaaatccctttgttaaatctta

SEQ ID NO: 642907 - DNA, 635 bp, Homo sapiens
tcatgctggcgctgctggcctgatctacggtgatgttgtccagcgtcaccgtgcgtatgcccgttgccagctgctcgggctggcgtcgcctgcgggcggggcggcgggagcgctgtcctgtgcatgcgcgccgaatgcggtggccagcacgcaagcgatggtggtgtacaggatggccggaactggctgtgcggcgcaggcgccgactgggcgggtggccgctatggtgaacaggcatcggttgatcccttcccaggacaaagtgaccgaatacggtggtagctggtggtgcgggcatgcgcatggagcggggctggctgctgtccgcgcgggtgtggccagttggtgctgtgctgcgtgatcagtgtaggtcggtccggtgtgcgtgacgccgaaagcgcgctgcgtcgcgctgacgtccccctgtcttgcatgtgtccgcttcagggtagaagcgcaagccattccattccaatgaagcattgtgcgagagctatctcggcttggaatgctgcgctgcagcacctcgcgttttgcttgtaccctcgaaagtgacggcgtgatacggcaaacgctgcggcattggggcggtactgtgctacgtggccgatgggatggccaaagatgttgcgcac

SEQ ID NO: 642908 - DNA, 2375 bp, Homo sapiens
agcgggacggaagctggggagcgggcaggcggcgggggcggggcctggaggagcctacaccgactctggaggaagactggagcctttgcggcggcgctgcccctcccctggtccccgcgagctcggagggcccggctggtgctgcgggggccccgggaggttgaaaactaagcatggggaagagctgcaaggtggtcgtgtgtggccaggcgtctgtgggcaaaacttcaatcctggagcagcttctgtatgggaaccatgtagtgggttcggagatgatcgagacgcaggaggacatctacgtgggctccattgagacagaccggggggtgcgagagcaggtgcgtttctatgacacccgggggctccgagatggggccgaactgccccgacactgcttctcttgcactgatggctacgtcctggtctatagcacagatagcagagagtcttttcagcgtgtggagctgctcaagaaggagattgacaaatccaaggacaagaaggaggtcaccatcgtggtccttggcaacaagtgtgacttacaggagcagcggcgtgtagacccagagcaagtctgccttccccctcagccggaagaacaagggcagcggctccttggatggctgaagagctgccgttcctctttcacgatcccagccccatttcagtgtctggggctctggtagatgtgttgagggcaaagtagaggacaagctgtctttcccagtcagccagggagctccccgccaggccacgccccagccactttgctccctctcacctctgggaagtgcaaatactcttggttgacatccccttcctcagccctcccagcctactccccatcccagcttttagaggatctgctccactgtctcctggggcagttgtgggtcactgtcccttccagctgccccagacaggaagcagagtcaccacgcagcagtgtcccttcttgggtctgagttcctattataggtaggggccccaccctctgggcttcccatcagcgacacacacacacttatggcaccagcctggactccagaaaaagggtgtccaggtattgtgtgtatgcatttagttgtgcacacacaaatatgctcctatactggcattaggcgtctcctcatccctcaccctgacctttctcctgtccttttcttggctggaagaagttggcctcctgggagtgtagttttctgttttaaatcccccacccctggctgggctcagtggctcacccctgtaatcccagcactttgggaggccaaggcgggtcgattacttgaggtcaggagttcacgaccagcctggccaacattgtgaaaccccatctctgccaaaaatacaaaagttagccgggcgtagtggcacatgcctgtaatcccagctacccggggaggctgaggcaggagaattgcttgaactcagaaggcggaggctgcagtgagccgagatcgtgccactgcactccagcctggtcaacagagcaagactccatctcgaaaaaaaaaaaaaaaaattccccacccctaccaattgttttacttcctcttcctgctcagggagcagatgggcctcactggttgagatggaatagaataactgggctatgagtcaccagcccactttgtgacccagcaagacctttcccctctctgggcatcagtttctcatctgtaagatgaccagagttgcttagatgatctcctagatcctttccagttctcttgatttcgtaaagccaatggcttctccctctttaaggtgctatgccaaccagccctggaggctgggatctgccgctccctccagccaccagggggcaggagtgcactacctgctgtcagtcaccagagtggccgctcagtgcccagcccgccagcctcgctcttggaggctgctctttatcctgcctgtggttttcagctcagagctggacttctatttataagttacctgtatttatatttatatgcccgctctcatggtgaaggctggacaaggtgctcctctggcccctccttcttacctcagatgcctgaacagaacaaggcaaacccgtagcagcctctcaggagctgacaggtcctctttcggggctcaggagggtgggcacacacccagcggcctgcagagtaagcttattacccacaactgtgcccgctttgtgcttctaaggtgcacacctagcctaggtgagacactgcagccaggcaaccaccgacacacgccccttctcaaagccagaggtgagtggggcaggtgcccggggctgggtgagtggaattaggacacacacaggcttgggcttcaagttcatttattgatgcattggttggacacaataaaaccacaattgttatcaa

SEQ ID NO: 642909 - DNA, 262 bp, Homo sapiens
tggtagagacagggttgccatgctatgttgcccatgctggtctcaaactcctgggctcaagcaatcctcccacctcagcctcccaaactgctgggattacaggcatgagccaccatgcctaccccaaattgtatgctttaaaatggtgagttttacgatatgtgaattatgtatcaacttttttaaatgtggaatgacatatgcccaaagatatacattggggaaaacatcaaagagtaggtcgacgcggccgcgaatttag

SEQ ID NO: 642910 - DNA, 120 bp, Homo sapiens
tttctattcatttggttttctcagctttcctgcagaaggtcttttcaccctccttggttcacatttcattcctcaggccattttcattcaattttgtgtgtcagcacacattgcacacgg

SEQ ID NO: 642911 - DNA, 1462 bp, Homo sapiens
  misc_feature (1099)..(1099): n is a, c, g, or t
ggcacgagctcgtaagcctccttattcgagccgagctgggccagccaggcaagcttctaggtaacgaccacatctacaccgttatcgtcacagcccatgcatttgtaataatcttcttcatagtaatacccatcataatcggaggctacggcaacgtgactagattccccgtaataatcggagccccgcgatatggcgttacaccacgcataaacagacataagcattctgacatcttacccccactctcatcctacatccatgcatcgcactctgcataatagatggaggcacggagcaaggaaacaaggtagcaacagaacatacaccatccacataaagcgcgggccaatacatacccacaccatgagagaccaacacgacaagcacacatacaccactacatatctaccatatacacactagaacaggatatcatcacgtcatacatcgttcaggggccatacaagtaacacatcacaaacaaaatgaatcaaatcactcaaaaccacaccatgaacaataaaacacaagtaacaaaaaacgccaccaatcatacgaacatggaatcctgatcacaacaatcacaagacacagatccaagatacaaatcatacgcatatacatgcataccacgagaatcacaataagcatgacatgggacaaatcaacatcatacgtacacgtaacaacagaaacacgagaagacatcaaaaaaacaacactatctaacagaacacacgacagagaaaacagcaggaagaacacaccaaaataacataataaccaaaaaaccatcagtatcatgtacataccaacgtgtcaacacacatgcaacgcataaccataatacgataaatcccataccgacagagaccaactggacacataaaagacacaccacataactcagagcacacatacagtaaacaccaggcacaaacaaaacagaaaccacgtcagggcaataccaatagcacataaaatgaacccatgaagccaaacagaaacaaaccaacagtgacacaaccataaagagaaaaacacacaggaagagacaaacaacgacacacaacatatcatcaacacacaacagacnaagcaacaagcatcacacacaaaaagcaaagccactacccacaccacccacaaacaaaacacaacacaacacacaacaccacagccggaaaagagaaacagacaacacaccacaaacacacacaagaaacaaaacaagaaaacaaacagacacagagacacgagcaaccaaggaacacacgcacaacaaaccacaagataactaacttcgaaaaagaccaccaacaacacctagaacaacagaaaaccaagcacccacgaagagacacaaaaaagaaacaacacgaaacaaacaaagaaaaactactaacacaaccaccacacacaccaacagaacaacaagacaaccacaaaaaacaaagcc

SEQ ID NO: 642912 - DNA, 112 bp, Homo sapiens
tatcttttaattttttaatccaattttggatgggatttccacgttctgaaaaactgtacttaaaaacggttaaaagggtaaattttatgtatatattacaatagaagaatgc

SEQ ID NO: 642913 - DNA, 224 bp, Homo sapiens
cagacagtctgcacttgacaatgcaacgttagcctacgtaattcgcactctatcatcgtatcactctggtaacgcttgtactaacaagggtataggatctaccaagtacacatgtatgagcctcagctgccaggtctgtaagacgtactcctcgtcgtacagtattgccaggcgtatcgtactgcggctaatctatcgcgtattcactccgcgcacagcgatcc

SEQ ID NO: 642914 - DNA, 413 bp, Homo sapiens
tgcactaggtcccgagaatatcagaaataagtaagcaataaaactaattctggcaggaatcagggtggcaataggactagcagcacgctggggtggctttgcctaccatgagttaacgctaaagaacttggctcaaatcctagaatccttagccaccaacggagatcaggcattaaagagaattcaagagttccccagactctggaaaatgtagttgttgataacagactagcattggattatttactagctgaacaaggtggggtcttgtgcagttattaataaaacctgctgcacatatattaactctggacaggttgaggttaacattcaaaagatctatgagcaagctacctagttacatagatataaccagggcactgcccccaactatatctggtcaaccatcaaaa

SEQ ID NO: 642915 - DNA, 223 bp, Homo sapiens
tggaggggaccgcggatagagggtcacagtccaggtcacgcatggcacagtacagtgtacgggagtcaatttcgtgatctgtgtgacagtaggaatgaggcaaaaacacaagggggcccgggaaggacttcactaagaactccccgggaaggggctcccggccagcagggtggcaggagagcagacagagccagtggcgagggaagaggcggtacagcacacg

SEQ ID NO: 642916 - DNA, 282 bp, Homo sapiens
  misc_feature (196)..(196): n is a, c, g, or t
  misc_feature (203)..(203): n is a, c, g, or t
tttaaatatcccatttcccttgctcttggtcctcctcctatccccctatggtatttctcctcctcttcctcaaggtccaggctttttgtgtaaaggcatttgtctcatctttgtcagtcgtggttcctgacgttcacctctgggtctgctggtagaggactgagagatgtgtggttttgtaggaagggggtgtgtntgggggntagtggggaatcccatttttttgcatcactgtgaggtagcttcaggccctttccctggagaaataattgcttcgcagaa

SEQ ID NO: 642917 - DNA, 350 bp, Homo sapiens
gtgtggggtaatctgggcgtattcagaaaagatatattgcagctaaagggggctgagagggtctttttttccctcagggttgctgaataaactgtgtgtttgtatgcctgcattttgtctgtgaattgtcacatgaggtcaggtgtggaaattcccacatgtggtgtcattttggtgctcagacatcagattttcagattagggatgcccaacctatatatgtgtaatttacttattatttatttatttattgaaatgaggtctcactctgtcacccaggctggagtgcagtggcgctatctcagctcactgcaacctccgcctcctgggttcaagcatttctcctgcct

SEQ ID NO: 642918 - DNA, 681 bp, Homo sapiens
caggaggcggaggttgcagtgagctgacatcgtgccactgcactctagtctgggtgacagagcaagactccatctcaaaaaaaaaaaaaaaaaaaatttttggtaaaccctagggggtttataaacaacagaaatcagttccagtttgggagggctggagaagcccaagatgaaaggcaccagtagatgcaaccctcttttggtaaggggtgaggggtcccatgatgagggcttgtgccccttgcccttgtgaccgggatgacctccaaaatgccccaccttaattaccatcccctttgcaggtgaggacttaacgcaggtgggtttgggggggacgttgctcaggccacagcaggcgtgcattgaagagccagttgagcctcatggagcccctcgggttcagccaggattctgacatttgacgcccacgctttgaagaatcaaagacagggggggccttgggagatgtgaagtggggttctgacgcggggccccaaagacctgtctccgacgtgagctgccttgaaggccctgtgggtaattcctcagttgcgtgcaaggcctcgtggctgtggagagcctccccgttgtgcacagttctctctttgtgccagggcaagcgttgtggggcagccaccaggttggggcagaggaggaaagcagaggaagacctccagaaag

SEQ ID NO: 642919 - DNA, 854 bp, Homo sapiens
  misc_feature (439)..(439): n is a, c, g, or t
agcgggggggaatccgaacgtgtttgcggaaaggagtcggggttccatcttgtacatcaccccagcgcagctttctggtagaaatggaatccgaggcatcataatgtggcacgcagaattgaccaatatgatgtagcatagatgaagctaatagctgagagcacattggaaagaataatgtttaacaagagtgaaggacgcttacatgatgaagataaggcgttagaatgaaaactttctcgctgaataatacagtataagcatcagggagaccatgttgaactcatgagttagtgactgatggggcaaacagaacaagcatggacgtaggtgtgtagtatagtgtgcatctaaatctagtacgaaaaatgcgagctggggttccaggctagagttgaatgccgtcagtcttctacaaataaacatgtggaggctggtntccgatataccagctcgagagtcaggaacttgaaatggcggcattacgcccccatggataacactgagtaggagcaagataatgaggcagtgtacgcgtagaaaaattcaatgctgagcatgtgggctggaagtgtgttaaacgcctaatgtcaaagagcgcgagatgaattgcaacggatgacttacctttatgcaaagtgggtccagggaggcaatacctggacaaggaagcatgtttgggagtgttgggttcactagtagtgctttgttggatgcaacgtgtatgtaaagcgtgttcagcgaaaggctaacatgcttcaaatggaccatgttaaaacaaaggaattcattcgataaataggccgtggtagcaaatgcggcttggaaggcaagaaaggcaaccttagaaaaag

SEQ ID NO: 642920 - DNA, 485 bp, Homo sapiens
ttccattgtgtgatgttgcagaagagcatgagtccagggtttaaaaatatgtacttttcatacaacatggtcatgaaagaaagtctacttcatctgggactcaaatgaagaatcaacgtattccaaagtcaattgtgctggacttaatgaaagagggcatatcgctctttaatgtagcacatatctaatagattttctggcacaattttgacaagacacaattttcatcttatgggctgactttagaacctaacttctcctctgattctagattcatcttcattgtagaagacaatggaaaagcaacagcatccttcaagttttcttggatataacctgcagtgctattgagatttaggactggaaaatagcagaaaccaactagagctagctgaagcataaagaaaagaagatactggttgggggtattttataaaaaactgtatctgtacatgcaggtgtgaggatgcaaaggaagcaatgac

SEQ ID NO: 642921 - DNA, 377 bp, Homo sapiens
aacagttgcgagtcataacctaatctagcatgaggcactgtctcatgcacattgcaactacagtttcttcacttcactggaatacgtccaggtagccgacttgcgagctgatcgactgctggaatgaccgtcgaaactgtccgggcctggtctagtccatgttggaggcgatggcgggtgatggagagagagcatcgaaggtggcgctgggctgtgcgtagggcgagggcgccgttgacgctgtcctgcggcgtggtctgtgtcatagggactaggtggccgaggagccgttctgaatctgctggggagccagggttgcaggttgaggaccgtgcagctggagaccctgtggggcgctgatgttcctgtttgagagc

SEQ ID NO: 642922 - DNA, 474 bp, Homo sapiens
cgatttagtacttgaaaagatcatctaaagcgtgatcgagaagagccttcacgactctttcaaaatgagtatagtggtcactataagaatatagagaataccgtgtaacgaactttcagattgtgagtcgtagatcaataatcctcctagtgggttataatgctcttgatcaccctcctcatcttggcactacaaagtcatcgatgttataagcatctccatcttcatcagattcataattatcctcttcttcctcctcatcaacttcatcactgctggggcaagattcctttgcagagtcctcaaaatctctaccactactgcgtctctgacgagatctttgtattgagagttctttgagcttctgaagttttgctcgctttagtgcagctaatgttttttcaggagtcttttgctccatttccactgaagaaccttcatcatcaaccactctacggggacgtttaacaccaa

SEQ ID NO: 642923 - DNA, 259 bp, Homo sapiens
cgactcaaggatcagctctaatttcttttgacttgcgggatattgttgatgtaaatcaggatgaattaatgagcattgttggcaatgatttaaggcggcgttgtgctggtttaaagcttgcttcccgtattgttggaattgcgacggcgaatagagttcagttggatgacgccggggtacttcaaagtatgtctgatttcatgcggagattatcggtattgaggcaagtagctttaacaacccttcagatcgataagga

SEQ ID NO: 642924 - DNA, 281 bp, Homo sapiens
gcacaacgtttaagaaggattggggaagaatcctccaccaggattgctcaaacactgaactacagacaaccactattttatttaaataaggcgccagcttcctaaaagaatacattctctaataaaaatagctaattattctgaatgattaaatggtttcctccacaatttacatcacaccatgtaaattttagcagtaccatctgatcctaccagcacatcatgctattcctttcatagagccttcagagattcattgctaaacaaattccctaagttgg

SEQ ID NO: 642925 - DNA, 877 bp, Homo sapiens
  misc_feature (695)..(695): n is a, c, g, or t
tctgctgagggggcaggcggagccttgaggaaaccgcagataagttattatctctttgacagatagagattaattacacactacttaaagaaatatagtcaataggtgactacgatattcgcttagacgttaagtcgttaagcgtaatatgaatagctttaagacttattaagagaataatatgagagatcattaaggcaatgatgataagtctatgagggtaaggaaatagatataaaaggtttactaaagacatgacgggaggttgagtatgaacgcttcgttcatggaagtaaacataatgtattataaagagtaaaaatagacgagacaaggtactatcgatgagcccacgaagttggaagtacacatatagtaagggtgcaagtgcgtattttagcacttaccagatgggcacaggtggaccttacatacgagcgttcacaagtattagtattcaaaaagttcgtaagtggtgatttaaaaggatcaacaatctgtgaacgcgctgcattcttatctcacacataaggagaatttaaacccgggaaggtgcattaaaaaggaccttgcaacatccgatgaccgcagggcagaatccgcggtcatttaagagctctagtttaacgcattctcactaaacgcgaccacgaagactgcgccaccgattaatggggaacggtggtaggataganaacaccttgtgggacgtaaagataagaccgtttgcatggtgggctagacgtggaactcacagaacgtacgggacgggggaagtacaccgaataggagacagacttgcggaaattaagaaagataaccaacaatactttttcgactggcaccaatgatcctgtttacaccctgaaaagtagga

SEQ ID NO: 642926 - DNA, 314 bp, Homo sapiens
ccggtatttagctttagaagaaatttacctcccatttagagctgcattcccaaacaactcgactcgtcgaaggagctacgtgcaaggtgccaaccggtcacatacgggattctcaccctctatgacgtcctgttccaagaaacttagaccggccgctgcctagaagcatcctctacaaattacaactcgggcttgcgccagatttcaaatttgagctgttgccgcttcactcgccgttactagggcaatccctgttggtttcttttcctccgcttattgatatgcttaagttcagcgggtatccctacccgatc

SEQ ID NO: 642927 - DNA, 324 bp, Homo sapiens
  misc_feature (1)..(1): n is a, c, g, or t
  misc_feature (61)..(61): n is a, c, g, or t
  misc_feature (77)..(77): n is a, c, g, or t
  misc_feature (79)..(79): n is a, c, g, or t
  misc_feature (83)..(84): n is a, c, g, or t
  misc_feature (91)..(91): n is a, c, g, or t
  misc_feature (94)..(94): n is a, c, g, or t
  misc_feature (108)..(108): n is a, c, g, or t
  misc_feature (131)..(131): n is a, c, g, or t
  misc_feature (133)..(133): n is a, c, g, or t
  misc_feature (145)..(145): n is a, c, g, or t
  misc_feature (155)..(155): n is a, c, g, or t
  misc_feature (171)..(172): n is a, c, g, or t
  misc_feature (191)..(191): n is a, c, g, or t
  misc_feature (195)..(195): n is a, c, g, or t
  misc_feature (208)..(208): n is a, c, g, or t
  misc_feature (217)..(217): n is a, c, g, or t
  misc_feature (221)..(221): n is a, c, g, or t
  misc_feature (225)..(225): n is a, c, g, or t
  misc_feature (238)..(238): n is a, c, g, or t
  misc_feature (244)..(244): n is a, c, g, or t
  misc_feature (273)..(273): n is a, c, g, or t
natttaaaaatattttattttttagaaaataaagcatttaaccatcccaaactgcagttanacctgccccagccctnantgannccacttnttntggccaaaggtttntgggctgtgctgggaccctagtntnagctccccgggnggccaggttnatgccaggcccctganncagcccccttaagccagcnaggnagggtccccgganaccctgggnacanagangagaagcaggganagcaanagggaagggtcaaaaaatgccagcccggnggccctcggacgctgcaagtgcgttcagctgccagccctcctgacctccca

SEQ ID NO: 642928 - DNA, 155 bp, Homo sapiens
tgcagaacttgacagttgggtactgtgcggcaaggcagatcatgcacccattcatggcttcgttccttggattcccatcttcttaattttgacccttgttgccattgcttttttgttcttatccatcatgtctaaaaacccttttccactggaga

SEQ ID NO: 642929 - DNA, 230 bp, Homo sapiens
taaaaagcagcattcccagggcccttggaaacagttggccctgtaaggggcttgctccccaaaacccatcctaaaaggggttgtaatggggaaaacgtcttccttttttattgcccctttttatttatgggaacaactgtttgtcttttttggtatcttttttaaactgtaaagttcaattgtgaaaatgaaaatcatgcaaataaattatgcgattttttttcaaagta

SEQ ID NO: 642930 - DNA, 165 bp, Homo sapiens
tgcagcatttgttttattttggtagtttggaactgaccccgcaatatccccaaagtatgcaaatagttgcaaaaatgtgttttttgccatagtaaatatgagtatttccaataaactatgatattacttttgtaaggaaatagaataaaatgtaaatatttttta

SEQ ID NO: 642931 - DNA, 127 bp, Homo sapiens
agagccactagtagcaggctgcaaacagagccatgtagcagtgaggcgttgctcttcttccctggtgtccccatctacctattaccgcatctagccgacagtctcagacctacctatttcacaatcg

SEQ ID NO: 642932 - DNA, 604 bp, Homo sapiens
ttaaattcagctatcccaagaaaaacccaatacatgaaatcattacaagtattttttagaatcagtcagcaaagatcattctggtcaaacacttcaaagttaaggtcactaagaaagcactaactcctcccttctgttaactaatcactgtaaagcagcccaactctcctttctacctacctcagattaatatttttctccatggacagatttccgtgctcagggatatataataggggagaaaaaaaaataccacacaagtgtcagtaagcaccaaaaagctaagtattcagcacagggagggaatccacatatgagaaaacatttgacagctcttgcctgccaaaagccatttaatctgcttcataaacataatctgcttcataaacattaccctgagcgagtggttcgatggatctcctacaccgagtcctaaccgggaaacacaatcaaccgaaccgtcccgactctttcaggcaatcaggaagaccgggagaattattagacgctgacgtccgcagggccaggagctgagaaaagggtaaacagtatactcgcaggtaggttgaaaaaaacaaaacaacaacatatacacacacacacg

SEQ ID NO: 642933 - DNA, 1045 bp, Homo sapiens
tatttatttcatcacaaatagcactttttattggccactatttgaagtctgaacttataaacagatcctgttggactggtggtctcatatccatcagctcgtccaacttatagcacctgtctcgtccccaggtggctttcccaaaactactgccttcaccatgaagctccatgagcttccccaattcaaactggggcttctacagcatttttactttctctaacagaagacattcatggagaggcatacatagatgggcaagcctttcctatgttctttcccaatgctgctcgggaaatcaattaatggaaccacttcttctcaaggtcattgtgtcgtgccacctctcgggtcatgaattcccatcaactcttactctccggaatatgtggccgggaccgtgtagagatgcttgagccataagaaggtctcccgatatctgaatgcgtggacgttattaagataaaaccaaccacagaaacagacgaaaggcaagttacaccatgcggatagatctgtgcactatccaacagttgagactctacaaatcatgtgtctctgaccattttttgtgaaccagtgtgtaacacaccactttgtgtgtcaccagcggtgtttaggacactcccagtgcccacgtgggaacaggtttgagtccgagagcaagctttttaacccccgtgtaataacactatttgacgcggtaaaagtccaggctttgtgcaaatatgtttccataccaatagtggagcactcttctgcagtccaatctcttggcaagcattccacagctgaaaaagatgctctccatgttctaaaacgcccgacgcagcaacccgccgtgtgagaaacccccgtactgatatgttgtccagtatgtggggggatacccccgtggggggtcccccgctgggcagtgaacgagaagcagatcctttgtccccaaaaacatttcgcgtagtaattctatgtgaacaccactaacgcatagggtatggtgttcacacccagttactaccaccaaagctctgcgtctttacgaaaa

SEQ ID NO: 642934 - DNA, 265 bp, Homo sapiens
cgatctgaggtctggaacgatcgagacaaggcgagacagttctaccatagtgcgggtacagagatagaggctaacaatgaaatatgaaagcattaaagaacaaaaataaaaaggcacaaacaactttaaattaacttagataactgtgcatatatatatatatacacacacacacacacacacaatatttacaatagtaaattttaaaacaatctggtcgtgttacaggacaaattcacgttgccacaaggctgtccagctctaa

SEQ ID NO: 642935 - DNA, 834 bp, Homo sapiens
tagagcattcgtatgacgacttgcgggcctacacagggtaattgaagttgctcgatagttgtcgcttgatggagatcctgttgcatgactagctgctttgggatgttcatcgacgcaagtaaacagatacgcctgggggcatagcagaggatgttgtagaaatattgtccaatttcgaagttcgtgcggtcatgattgtttgcctcatacccaaggagtcattgtgagcatcagaatcatattgcctcgcaccgctccgtgtgtggacttaaatacccagaaagctcctccgtcaagttagatttgttaacaaaatatcatatgaccggaataaataattccagtgggatggtggatgcccggagcattaccagtgttagcaaaatggcaaaatttcatatagcatttaaacgtttgtactttcaagagctaagacgtctacatgatgtccacaggaaaattattgaaggcttccacagccacccagaaggtccaaactatacaacaattaacttcagtgggatctcaaatttgtcttaaacatccaaccaatctttctacctcattgttacatgtcttgactaacttattcaccaattgctataattacacatttaggttaacaacgaatttccagcctggtaaaacattgacccttggacccattttgtcacgacctatattcaactatatgttacccccaatatattgtttgccaggtaaccgggcgggaaaaactgcagcacaatttttttagtcttggcaacggcctgtcttttaaacttaacctgggttcccgaagtgaattgcgttcacaacatgaagtctttggcg

SEQ ID NO: 642936 - DNA, 268 bp, Homo sapiens
  misc_feature (161)..(161): n is a, c, g, or t
  misc_feature (169)..(169): n is a, c, g, or t
  misc_feature (189)..(189): n is a, c, g, or t
  misc_feature (238)..(238): n is a, c, g, or t
  misc_feature (242)..(242): n is a, c, g, or t
aacctttaattttgaaaagattagcattgggctgggtgcagtggctcacacttataatcccctgcactttgggaggccaaggtggtcagctcacctgaggtcaagagttcaagaccagcctggccaacatggcgagcgaagccccatctctactaaagatnacaaattngccgggtgtggtggcgcacncctggtgatccgagctactcagtggtctgaggccggcgaatcacctgcncccnggaggcagaggctgtagtgagccaag

SEQ ID NO: 642937 - DNA, 123 bp, Homo sapiens
  misc_feature (2)..(2): n is a, c, g, or t
anatcgtggctgtagggtacaaaacggaacaagcaccctacagtcagacggacgcacgatgtggttaaggctcgtacgtatatatatgtgtagaggctcacacacgcgcacacgcacataagg

SEQ ID NO: 642938 - DNA, 326 bp, Homo sapiens
  misc_feature (20)..(20): n is a, c, g, or t
  misc_feature (149)..(149): n is a, c, g, or t
  misc_feature (169)..(169): n is a, c, g, or t
ggaatgggtgcaaccctcantgaattttggataccaaattaagtatggtggggtagtttttaaatacatttacctatatatatatattaatgaaaaattgtttccctaaactgtgaaaaggcttattaaagaaatttagaggctggatncggtgactcatgcctgtaantccagcattttgggaggctgagatgagcacatcacttgagcctaggagttcaagaccatcctgggcaacatggtgaaaccctgtctctgcaacaaataaaaaaattagccaggcgtggtgctcgtgcctgtaataccagctagttaggaggctgagg

SEQ ID NO: 642939 - DNA, 560 bp, Homo sapiens
tcttgctacccctgacatgtgagcaagtgctcagtgaaaagcggtaaagcagccagcttaggctataggagcgccaacgtccactctgaggtgaagataccaattacattcgagacttaggttcttacagttgattcctaacaaaagttcctgagtccagtatctacgatattacagcactagcaagatcagtgtctacgacatcatctattgctgctgtatcctcttcaccagtggggggagggcctgcactgtccatagagtgggctgataataggttgaacaatttcttccagttccttcttcttagctttgaagtctccaatgtcagcatcttggtgtgcttgccagccattcaatcttttcttctacagctgttaccatggtctccttatcttcagaggaaagtttacctcccagctgtgtcttatatctccaatctgatgcttcagagaataggcgtagctttccaactcattgctagtatcaatgcgctccttgagctgttggtcttcgtcagcaaacttctcagcatcatttaccatcctttcgaaggctac

SEQ ID NO: 642940 - DNA, 144 bp, Homo sapiens
  misc_feature (42)..(42): n is a, c, g, or t
  misc_feature (67)..(68): n is a, c, g, or t
ctcagggctcaacgagatcggatcgcgccgaggcaacagcgnttacctacagcgtcactgtcgatgnntgcacgagtcacaccggacctggggcaagacagtgattgaatacaagaccaccaagacctccgctgccatcatcga

SEQ ID NO: 642941 - DNA, 140 bp, Homo sapiens
  misc_feature (9)..(9): n is a, c, g, or t
tcgatctanaggatccccgcatcttgctcccatcaggtccacatgagagtacttcttcctgactgtacaatcaccccaaatcctctctactttgttgtccacatcctcatcgttactgatgggacaagactaggtaccac

SEQ ID NO: 642942 - DNA, 809 bp, Homo sapiens
gtctccggccgtttgaatgtgcgcttccgccatctttccagcctcagtcggacgggcgcggagacgcgttctggtaaggaacgcctgcgatgggtgcgcagggagtagcccccagggtccagtctacaaatgttgtttttggttgggtgatggtgggtactggggaacacaagtgagccttcgttgaaacaccgttcacgattggtgacctgggtgaacctttgtgaaggcaacggcaccggctacttgtttagggccaaccccttggggagttggttgagaacggggatttcaattccccccacattaagagtggttgtccccggaaataccaagaacacggaagggggaccgcgttattataagaacggttgtcccaagtctgttaattgggcggagcaccaagggccggggcccaagcgcgaagggacacacttcggccgcgcggggagaacctgtggacgacgggagttgcgggctttagtttagatattttccaaaatgtcgctcaaggttgggttgccccaattttcgatttaaacgttgtttgtagagcttgttttaacccattcgggagaaaggttaaccttttagcatagggacattggttgcccgttaaacagtgggcggatttaaggacggcattctggggttacggaaaggtgttgtgtggaaaaaatatatccccgcgcattagggggggtctcgtggttggggcgagaccaaaaagggtgtgggcacttattttacacgggacgccgggggaaaagaggttggaaagggcggaaagaattctcatgtttgttctt

SEQ ID NO: 642943 - DNA, 200 bp, Homo sapiens
  misc_feature (54)..(54): n is a, c, g, or t
  misc_feature (83)..(83): n is a, c, g, or t
  misc_feature (86)..(86): n is a, c, g, or t
  misc_feature (116)..(116): n is a, c, g, or t
  misc_feature (129)..(129): n is a, c, g, or t
  misc_feature (135)..(136): n is a, c, g, or t
  misc_feature (151)..(151): n is a, c, g, or t
  misc_feature (163)..(163): n is a, c, g, or t
  misc_feature (200)..(200): n is a, c, g, or t
tctgcgcgcgtgtggcgtgcgtgcgagcgatgcgcgcgcgcgagtgagagagantgcgtgtgtgtgtgttgggcgagtgtggntgnagagtgtttgtagggagagtgagagagggnatgaaattttttncgcgannttgaggcgagttggnatgcgcgaaacnttagcgtgcgagaggcgaggagaggagaggaatgacn

SEQ ID NO: 642944 - DNA, 173 bp, Homo sapiens
gactccaccttaccaccagacaaccttagccaaaccattttacccaaataaagtatagggcgatagaaattgaaacctgggcgcaattagatataggaccgcaagggaaaggttgaaaaattattacccagcccttatattaggcagggcttacccctataacctctcgcatt

SEQ ID NO: 642945 - DNA, 892 bp, Homo sapiens
gccttcttcctagcactcacaagcaaacctaactatagtactagacatcatcatggactgcatcagagaaactagaatactcgttgcgtgacactatcctgcccgaccatcagtcctaggtccatcatcgacccgtcccatccctacgcactccttataccatacacagcacgacggtcaacgcatcccgtccgcttatccagtcaagagtcaatgtgggccaccaatggctactgagaccgtacgcagtacagccgaactacggcggagctaagtgctgtcaatctcctatcatactttcccccatttattcctacgaagccagtgcgagcactgcgatctccttgacgttgacaatcgactactactcccgattagaatgcccccattcgtataataattacatcacgaagactgtcttgcatctcatgagactgtcccgcacgattaggcttaaaaacagatgcaattcccggacgtctaaaccaaaccactttcaccgctactcgaccgggggctatactacggtcaatgctctgaaatctgtggcagcaaaagcaacagatttcaatgccctatcgttcctcagcaatctaattccccctatcaaatctttgcaacatagggcccgtattttaccctactagcaacccctctctacccctctctagagtccaacaatcacgaaataatacaaccccggaggtgctcatttgtcgcgggcggatacacagggggtgccgacctgtgccagcatggttacactaggcgtctagacctcgagtccccatttacaagtcgccaaaactagtaccatgaacatctcggagaacccccttacatggacttatgctaatagattccctaacaaccatgttgaccccgcttgtta

SEQ ID NO: 642946 - DNA, 184 bp, Homo sapiens
ttacatagcactttagaaaaattcacaagtccccatccaaaaaaaaaaaaaaggaaaattatcaagggaataaaaatagacttggaacaaaagggaacatttggctgggcctggggggggcatctcaatttctatagcaccagtgattccctccccaccccaccagggagggctcacaggtgct

SEQ ID NO: 642947 - DNA, 119 bp, Homo sapiens
gactttatgctagtatacaaaattcgcacaggtaaaggcacggactctggggagactgggaagtgtcctgcagtcattcagtcgaccatgtggtagacgagctctatcatagtatgata

SEQ ID NO: 642948 - DNA, 308 bp, Homo sapiens
  misc_feature (17)..(17): n is a, c, g, or t
  misc_feature (67)..(67): n is a, c, g, or t
  misc_feature (140)..(140): n is a, c, g, or t
  misc_feature (156)..(156): n is a, c, g, or t
  misc_feature (158)..(158): n is a, c, g, or t
  misc_feature (164)..(165): n is a, c, g, or t
  misc_feature (188)..(188): n is a, c, g, or t
  misc_feature (216)..(216): n is a, c, g, or t
  misc_feature (241)..(241): n is a, c, g, or t
  misc_feature (255)..(255): n is a, c, g, or t
  misc_feature (258)..(258): n is a, c, g, or t
  misc_feature (274)..(274): n is a, c, g, or t
  misc_feature (277)..(277): n is a, c, g, or t
  misc_feature (285)..(286): n is a, c, g, or t
  misc_feature (300)..(300): n is a, c, g, or t
ggaacgtggagaccctnacgtgggctccctgcatttggttttcttttcaaaacttgggagcccccanggaggggctagtgttggtaggtcctaaacgtggttccctccagcctccccaaaatcaaccctggtgttgaaanaacgtccttttgtccntngtgggnnacaaccttggggagggtgcaaancttttcaaaaccatgggccaggtggggntgcctcagtcctgtccccttgggcncttaggaaaggggnccnttcccctttttcctanaangctgttgnnaataaacaaatggntccctgga

SEQ ID NO: 642949 - DNA, 220 bp, Homo sapiens
attgaagataaacactgcacacccacccagctctcagtgttacacatcaatatgtggaaccatctacgaaataataatgagagaaaaattctcataatataaaaaaaaattcatgtgacacaataaataatcacattataatgacaaacagaactagtgaaatccatacacctgattgtgatgcaatgatgtgggatcctcatatgactgtctgaacctt

SEQ ID NO: 642950 - DNA, 233 bp, Homo sapiens
  misc_feature (218)..(218): n is a, c, g, or t
ctgggcaatagagcaagaccctcacctcaaaaataaataaaaataaaagttatccttttggtggtgttctcactagttaactcaaagcatttgatgaaaaatatcagctctgttttagaaatagatgtttgtagcatatgtgacaactcatttgtaagagtagcgagtgaaatttggcttttggtaactgtgcctatgtacattcttatcttcagacnaagtatttgagcaga

SEQ ID NO: 642951 - DNA, 704 bp, Homo sapiens
caagttcaataaagattcttgggggtgaaaaaaaaaaaaaaaaaaaaaaaaaaaaaaaaaaaaaaaaaaaaaaaaaaaaaaaaaaaaaaaaaaaaaaaaaaaaaaaaaaaaaaaaaaaaaaaaaaacttggggggccgcttggcccaaggggtttttaacctgggcaaggtttttttttgggggggaatttggggctaattggcccattcccccttaggggggggggtttaaaaataaaggggcggggttttaaaacggggggggggggaaaacccggggggtccccaaattaaagggcttgggaaaaaacccccttttgccaggggggggaaaagggaaaggggcccccccggtgggcctttccaaaaggtggcccacctgaagggggaagggaaattggaaggggtaattttttggtaaaaatcggggtaaatttttggtaaaaaagcctattttttaacccaaggggccgaatggggaaaatccctttataattaaaaaaaataccccggataggggtggggggttttcccatttggaacaaggggccccttttaaaagaggggggcccccaccggaaagggggaaaaaccggttttatgggggggggcccccttcggggacccatcccctataaaaggtttttgggggcgggggggcccgaaggccctataatgggacccttaagggggcgcccccgatt

SEQ ID NO: 642952 - DNA, 252 bp, Homo sapiens
acatcgctaggtggagctcccggagaaactgagacaccttaagaacaccactggagaccatagtactggaaggtctttgagcagctggatgcaccatttggctcctgctttgagaatgcagcgggcactccttgcgatcaaaagcccaactgcacgctccacctgcacaagcagctcactggacacctggcaggaccctgtcttctggtgctggtgtgtgaccgagtcaggagtctggtgcccagatccccc

SEQ ID NO: 642953 - DNA, 419 bp, Homo sapiens
ggaagaagagcaaatctaccttagcttctccagagccattaagatcccccgtcttcaaagcctaacagattaagcagctctccagttcacaacctgcgcccaagtaaatgccaaagaaagtcctaaacccagccgaggccacgtctctgaaaaaactcgccaagaaaaaactaagaaattgactttacagaagtcaaaccacaccaggctaagtacaaataccttctagtactagtagacaccttctccagatagactaaggcatttgctaccgaaaacgaaaccaccaacacagtagttaagtttttactcaatgaaatcatcgttcagtataggctgcctgttgccataaactctgataatagagcagccttcacctcgcctatagctcagtcagtcagggtatgaacaacagtgca

SEQ ID NO: 642954 - DNA, 240 bp, Homo sapiens
aaccggttttttttttggcccaaaggtccccgcccccaaaaaaaggccttttggaggagggggaaaaggggaccggttttttttccccgggccccccccccccaaatggttccgggtttatttattttaaaatgggggggtttttggggaaattttgaaatgggggaaccccccctttccccccccaggttccccctaggtttccaaagggtggttttgcctaaaaggaatttttttttg

SEQ ID NO: 642955 - DNA, 364 bp, Homo sapiens
taaattaaatggcataaattaatttggcaaaagactctttataaggggctcattgtaggaaatcctgtccttcccctttgagcacaagtgttggatgaacaacagtttgctataagaaacatccagattagcccccttgcattatatttccttgggttaaaaacaactggaattttaaaccctgtagaatggataaaaattattttgtgtcataactctttgttaataaagtatttttcaccattccttgtcatcaaaaacatggttaaagtttaaaactaaaagcagcagaaaactagcttgtaaaatttatccaagtaaagggcagggtaggctgttttggggaaataaacattaaaactta

SEQ ID NO: 642956 - DNA, 287 bp, Homo sapiens
tatttaaaatcctatttaaaatatatcctattcagaattacaagaaaatgtaagaatggtttcctttttttgggactccgctcggccacccaggctggagtgcagtggcgcgatcttggctcactgcaacctctgcctcccaggctcaagcaattctcctgcctcatcctcccaagtagctgggattgcaggcgtgcaccaccgcacatagctaatttttgtaattttagaagagacagggtttcgccgcattggccaggctggtcttgaactcttgaccttaggtg

SEQ ID NO: 642957 - DNA, 149 bp, Homo sapiens
tccggctgctgcttcttcgtcatgagtggcacttccctttacgctatgtgtatcccagcacttggtgcagtgctgagtgtagtgaggattgcttgatgccccaggagttcataaccagcctgagtaacatagccatgagcccatctctg

SEQ ID NO: 642958 - DNA, 310 bp, Homo sapiens
  misc_feature (25)..(25): n is a, c, g, or t
  misc_feature (74)..(74): n is a, c, g, or t
  misc_feature (114)..(114): n is a, c, g, or t
  misc_feature (122)..(122): n is a, c, g, or t
tcgatgcgagaagacgacagaaggntggcactgcagcgcaatagtctacaagagctattccctatctagagagntatcactttctgatcagccctcataatcatttcctatcgntcctatcngtatgccctttcctaacactcacaacaaaactaactaatactaacatctcagacgcttcaggaaatagaaaccgtctgaactatctgcccgccatcatcctagccctcatcgccctcccatccctacgcatcctttacataacagacgagtcaacgatccctcccttaccatcaaatcattggccacc

SEQ ID NO: 642959 - DNA, 632 bp, Homo sapiens
ggggcacaacatgacatgtgcacacagactaggctgtccatgcaggcgacatgctgctcctgaagctcagacagcagttcccatggcagagtctagggtactgtggtgtctttcagctgagcgacaggattgccagcctccctcagcaggggcacttggtacccccataagggtggcatgccccagtccacttgttacagggcagggcagtaccacgagctagttagttgcttggaattaagaacagcctcccctagtgaggggtttcaggtgatgactgccccgtgacagtggctcagatggagacactacccatgggctcttgcttgaagcagcagatggcacgggccatggcaccgtggcccacacagccaagccagatgggttacctggctcctgcggcaggcctgcggtgacttggccagcactgcccgtgtgcgaggtggcagagcccctcctgtgcagcagcctgggcctactgcggtgcactagggaacttctccctggaacagaagaggagcaccagcctgtgcctggccgagccgagcttgtgctgtggcagctgcccttcccaagacagacgtgctgcctctcaccgcggcaggggcctttgagtccccccactttccctg

SEQ ID NO: 642960 - DNA, 167 bp, Homo sapiens
ctgagcatacgcacccagcctagagacattacttgctttcttttcgactgcgtctgacactgagtttggctcttgacgccccacgctgcactgcagacctgcgaactcgcgtcactccaaactcagccttccgggcacaagacatcctgcgactccagcctaccgag

SEQ ID NO: 642961 - DNA, 111 bp, Homo sapiens
ggcccggggactgatcaggaaaatatattcctgcataactcattttgaaccaaggattgtagtttagttttcccccttgccttcccttttgtgtgcccgcccccttggcca

SEQ ID NO: 642962 - DNA, 132 bp, Homo sapiens
cctaggctgattccgcctgagatggctcctgttcaggcggggtttatctggcggcgtgaggcctgtgagatcctgacccaagctcaggtacacccaatggtcacctgcactctcatgactcttgtggtctca

SEQ ID NO: 642963 - DNA, 755 bp, Homo sapiens
gacagtgaagctccctctgatgaagatcaactctgacatgagctccctggtagtatctttggcccatggtgccgtcatctatgcgaccaagggcatcactcggtgcctcctgaatgaaacaaccaacaataagaacgagaaggagcttgtgctaaacacagaaggaatcaacctcccagagctattcaagtatgcagaggtcctggatctgcgccggctctaatcccaaagagatccacgcgatagtcacaacacgtatggtgtgatggacgggcggggggtgatctgagaaggaagatgaggagatgggtatgtgtgggactgggatatggactcgaggtcgaccactcgacaatctctcccgtggatggcgtgataatagtgtgctatcgagggtgttaacaagccactgaatcgcttgggatccggtcaaactcttccccgcatacagcagatgacatttgaaaccagcttccagttttctgaagcaagccaccatgctgggatcccacgatgagctgaggtctccttctgcctgcttgtggtcgggaaggtcgtcaggggcggtgacaggcactgttcgagctcaagcagcctctgagatagccagctaccccggaacatctgccaagctccaggacccttggctgagggctgtggcccagcctgactttctgcatgagagggaccaggagactggaatccagggcagttccagtgaacagtacagagcacagagggaactggggcctgaa

SEQ ID NO: 642964 - DNA, 169 bp, Homo sapiens
tcagagcctccaggagagcgtccaccggccgtgccctggcacctgcgagagctcagtgcccggctctgcaccggccatcctcagcaagaacctgataggcttacaacaaaaatattcagtatactatttaacaaactaaattgagtggcagaagcaggggtaccgagct

SEQ ID NO: 642965 - DNA, 165 bp, Homo sapiens
  misc_feature (86)..(87): n is a, c, g, or t
aaaaagggggtttccccccccccccccgggggttcccggggggggggtttccccgttttgtttttttttttttttgggcccccccnnaacaaaccccccctttgggggtcccccgggttttttttttttttttttttaaaaagggggtccttttttttgggccca

SEQ ID NO: 642966 - DNA, 1625 bp, Homo sapiens
  misc_feature (1256)..(1256): n is a, c, g, or t
ctccgtgaatgctcctcttaactcaggtgtactagacccatggactactgttatcgctacctatggtcgcgatggtaaccagatgaggagtccatcgcagggtgctcgtcgagcgaacaacgcattcatgctccacgtaatgggccgtcacgatagcggtgactagatcttgattgtatctgcctcttcaatgtctagctttctgagacaatgcttcttcactggaagaccattatagctcagatccctgacacgtgagcccgccctcaatccctctctgctcggggcatggggtcgaaatgtgacactgccaactacgagcgatccaggccacgttgaacattcggccttaggcaagagtgcgccctgtcacatgatgagcatgcatagccgcgtgattccgtacgtcccattgccgtgcgagtgatacaaactccaagcgctcgtgagcccatcaactccctaaggtcctgagataagccatacacgaatgcgagaactctacatagtcaaattatccaaaggtcagcgtcggacgtgtaaatctaatctaaattaaccattagcgcgagggttgcattcttcattggtttgtgacaccgcacgttcgctaagcaagaagacgcgtacgaaatacgggtggaccttttgctggaggtttacttccaccctttttgaaacgcgaatatacttcgcgggtaaacggaggttctcaattccatcaggccagtgggctttggctagaacctaacctatggtaagaaatgtgtgtgaagattccttaactaggagcactttgtgacccaaaggagagaacgagggcgtctacggagacggtaaccaattttacgtctcttgtggtcttccaacaactttctccaacttcttatcaaccctcatttccttgttcctctctaccaattggccgggcccccgaaaagcggtaaacacctaagttgttctctcgcatcctagtgtccaaaccaaatttcctccaagattatccattttccaaacactagtgggggacaactctttttcccgaaataacgaactctcggaaactcgtgttggcgctgaggcacgtggaacccatggggcgttccactttttggcgggagagccccctcggacacttcgcgaacgggctcgattcctttggcgcacctttatgaattttaaccacccgctggggttaactaaagctcccaaatattcccccaccgtgccgttaaaaattcctaggtgtactttgngcaaggttggggcctaccttactttagggccattattaacacgttacctcccccaagagcccacaaaaaacacacacagtacaaacagctagcgaccagtagcacacgacacaccacaacaccaccgaagatataccccccccccgcaaagacagcggggccccccacataagaagtcatatacagaccggcgctcactccccgccaggcagcctaccgtccacgcatcgccaacaaacgatggaggggggcgtcccgcacataacaagaggcaggacgcatacgcacgaatcaccgtcacatcagacaacggcgcagacgaacgagacaactgggagcagctgcacgacgactgctaccaaacaccgg

SEQ ID NO: 642967 - DNA, 829 bp, Homo sapiens
ccacgcgtcggaagaggaggaagtggcgcccggaaccgagcctgggggtcttggatgcagagaggatggcgtcgtcgagccccgatgccccttgttcctgcgactgttttgtctctgtgcccccggctcagccatcccagctgtaatctttgcaaagaactcagaccggccccgagatgaggtgcaggaggtggtgtttataccagcaggcactcacgtccctgggagccggcttcagtgtacctatatcgaggtggaacaggtggggaagacacacgctgtgattctgagccgcccctcttggctgtggggagctgagatgggggccaacgagcttggtgtctgcattggaaacgaagcagtgtggaccaaagagcctgtggggcagggggaagccctgctgggtatggacctgctcaggctggcttggaacggagcagcactgcccaggaggctgttcacgtgattgcaggcttgctggaccgctatgggcagggaggcagctgccgggaggatcagagccgttctgtatcacaacactttttactgggctgatcggacagaggcgtgcgtgctggagacagtgggagcctgtgggctgtcagcggatccaggaggtgcccggaatatttccaaccagctgagcatgtacaagacattcagtgaacaccggagttccgagccatgccaggtcaggggacatcacaggcagaggtgatgagggatctcaggacaagcagagcggatttgtggcatccgggggttccgcaaagcagtatgtttcgccttgccaagacccaagctggtcattccatgtcccaaacctcgc

SEQ ID NO: 642968 - DNA, 261 bp, Homo sapiens
gtgcaggcgtggcggtgcacgcctgtagtcccagccaatcagtaggcggaggcacgagaatcgctggagagcccaggaggccacggctgcacggagccacgagttgcaccacgtgcactctagacctgagcaacacacgactccactctcaaaaccaaaaaaaaaacaactgggcgaatggcccccattatatccaagttggtgatagaggcattaattattaggtaaaggtcatataaaaattgcgggtgtattgacaaa

SEQ ID NO: 642969 - DNA, 180 bp, Homo sapiens
tggacattgcatatggtcacccagcaagtggtcccagtaactatccctgcaggccctaggtctagactcttaacctcacactgatcatatagtacctagaagacatagagcacaataacaacgtcaatacaattgtacatacaatgcaatgctacttatgttgcttgaattgcttgtaat

SEQ ID NO: 642970 - DNA, 377 bp, Homo sapiens
gaggactaataacgatacagtcagccaaactataatgatagatctagaattaggtgcaatcaaggcttataagagtgaatttcaagtagttaccagtaaagtttgtctttttcattcagcctgatgcctttaacagaaaactcagatgagtggataggtcacgtgagatggcagtgacaaaaacttcagtttaaaatgccttatggatctgtattggcattccttcccgctgatgaaatgctaggagcttttattaaattaaagctgcatttgcatgaagaagccagagaaattacggactggtttgaagataatgacgtgcatggtcggataagaagacatgccctggagttgctgtttgaccatcagtatcgtta

SEQ ID NO: 642971 - DNA, 303 bp, Homo sapiens
actaaggatcccaatgtgttgtgtgtgatgtgtgtgcagtgtgatgtgtggagtgtgcatattgcatgtgtggtagtgtgcgtgtggtcgtgtaaatctgtcaatacatgtgagcttgatgacatgtggcatgtagtgtgatggtgtgtgtgtgtagtgttgacgttgtgtgttgatgtgtgtgctgtgagtgtgcagagaggcctggggctcgaggaggggctacagctcatagtactcacccgggcggcccagttgacgaggtcatccagcttgggcaccacatgcatgcacccagggggt

SEQ ID NO: 642972 - DNA, 258 bp, Homo sapiens
  misc_feature (63)..(63): n is a, c, g, or t
  misc_feature (100)..(100): n is a, c, g, or t
gcggttctccatcagcatctgtctctctaggcagttgagatgtccttacagctccagtcatcnattcaatgaatacacacattcgacttagattctaaanactggcataatacagtgacttttcatattgtgtattttatcttttagtaactttccaaactctgtaaagtcatctcttgaagatgggtacatagcatctattccataaactgcattattaacaccaaaagtttcctttgctaatcaccggtcgacgga

SEQ ID NO: 642973 - DNA, 909 bp, Homo sapiens
gaaacgcaacgcttgagaacttggacgttcatatcgccccagtccgtgcctgggacgataacattcccgtggatgccgatcgctttggccgggcgataatacaggaacatttccaaatggcaacacacacgcgcgtgaggtgagacaagctgctctatgaccagacgaacatacctgtggggtgtgtcttggcatgtattgatctatccatgtgtggggtggactagagtccctgcaacatgatcctgggagagaatcgtgccttggatgcttggtgtacactaaggggtgttgttgtgaacagtcgcgaataataaggacgtcctttcggcaggcgtgacagaagagggctaacccgcagtggagttcgtagaatggtgtgtcatgttggcggagcatatttgtactcttgtatctgccatgtaggagagggagtcaatggtcttatgtgtgttgagggacattaacattttctgcttgtgctgtgagaatgtaatatccaatgcattcggttggaggacttgcggaagctcaatgaacaaaaagttggagaatgtaagactggagggaaataggttgggaaagaggacgccgagtggggcatggtgcctgtgattgcgctagaagcagcagggagaaggcatcagcaggactcactggatatatcaggcacagtgaaggaataaacataaattaaactgagctatggttgaggcagacattgagttgcagttgccttgtacagacctattgcgtgctggcgttttgaaaaaaggcgggacgtccccccaatatttatggcagctggtgtttagggcgatatattaagctggtgtcgaaagaagcttgaaggaagaaaccagcgtctatgggtgaacagggttaaatatggagcgcgcaggttaggga

SEQ ID NO: 642974 - DNA, 374 bp, Homo sapiens
cgggatctctgtcctcaaaaagtatacctgtgcagattttcaatcagagactgtgtgctaaatattaggctactgtgatcttaggccacctgaggcacatactatctgaaacggctatggaagggtagggccactctggactggacacatactaaagcgccaaaagacctttaacattttctgagagccaccgagtatttgccaataaatgagctctcattttttcaccttgactggccatctaacttaaacaattaataagtgtaatttccaagcaggcctggaagactggggtttacctggcccttcattaccatttaaattataggctgtccaaattggtgtgtaacaattacacgagaagctgatccgcg

SEQ ID NO: 642975 - DNA, 273 bp, Homo sapiens
aggatccctttgttcaccgcgtacgacgctcgtctttggtcgcacagcaggtcttgcctgtattttttcaccggccttcgacatgaatcacgacggcaaatgccagcctgccagaaccgattcctgcgcgttgcgtcactcgcgcgaatcgggtcatgacgctggtcgagttgctggtagcgctgttgattttggcgatcggcctgattggcgctgcggtgctgcaactcagcgcgctcaagtacaccaacacgcgatatacgttcgggtacc

SEQ ID NO: 642976 - DNA, 148 bp, Homo sapiens
catggtgggcggaggtgggtctcaaattctggaccccaagtgatcggcccactcggcctcccaaggggcgggcataacgggtgtgagccatggtgccgggcataactaattatttttggagaagacctcatggatagcacaaaagtag

SEQ ID NO: 642977 - DNA, 134 bp, Homo sapiens
ctcttggattcataccattctcctgcctcagcctcttgagtagctgggaccacaggcatgcaccaccacactcaactaatttttgtatgttaatgttagagatacgtatctctaacattacaaatagtttttac

SEQ ID NO: 642978 - DNA, 893 bp, Homo sapiens
taaccatgcaacgaaacctttattaacatttgggaacaggttcagctattactgaaactgttgtaatttctaaactttaagttgtggggcaaagtggcttattaggtgcaaagtaagtgccactcacgtgggcacgtgcgaaagtgccagtgactgtgaagaaattaacgagccacccctctaaggtcgcaggaccaggtgtgcagggtctcagactctctttctcagtgagagtgttgtgtagctcaagaaaagaggtgcgggccattcttctccaagctgtgcatgtgcctgtgcaaaagatgtgagcctctctgtgcagtggctcggggggggagatgtgccttctctttaattcttgtggaaactcgtgtggtcgcttctcaacaactttctcgaagtgggtgttccatgtgtggccttccaacctctccaagaagtgtgaagtgggctcctgtgcgcggctcgaggggactcttctccacagaacagacatctgtgcccattaaccccacaccctctctctcagacaccgtccaggagaaacaccgaggggagtgggcagagaggcctcagacaatctccccttctccgtgggaaaagtgcgtgtgggatagagttctgagaacagacgaagagttgccggctgccccattctttctccgcccagactgtgacttgatggcccctgtggcaccaaacgtattttgaagcgcgctttatgtagccagtgggacttcagctggaaaagggggaaaagatgacacaaatatcactatataattcccctgtggagaacatccgcttggggggccccactctccaacacatgttatctcttccccaagtggcgagtggtctccaaccggtgggagcgccttctccccacagtt

SEQ ID NO: 642979 - DNA, 511 bp, Homo sapiens
  misc_feature (64)..(64): n is a, c, g, or t
gatatttatgaggaaatgagtcctgagtcacatgtctaacaggtggtttggatagctttctaancatttgttcctctgagtttgaaggcagcatcaaggagttggaatttcaggacctgagtgaatagacaggaaaaagaggaggatgtttagccatagggtagaatgtggaagattgggagaaaaaagggggatgatttgaaaattggaaattgtattaaatgaaatgatggtagtgtccttcaaatagcactaaatagtcaacggtatagtttgtcacatcctgcttattgtgacagtaagaatcaggaatcgtaagccattgagatcaactgaatacagatcaggtgagtgccaatccattcaacacgtattatatgggggttggtgccaagagaagtgaccagtacacgaggatccagccctaaaggaacttgtagaccacttaggaggtaagctatgtgcatcagtaactgatacaaggatggaaggactggccacagtgtctgcg

SEQ ID NO: 642980 - DNA, 504 bp, Homo sapiens
tacttttccacaggagggttaagtttttattcatcttcctctcagttaatttatcacttttatctgactaagataactttagatcttctttattcccttggatagatagtatagtgaattgattagggcagggctttgaagccagagagtcctgggttcaaatcctggtgtggactctatctttttggcggttagaacctttaaattctctgactttctaggtgtcgtttaaatgggttaacataacccttactttatggaatgttgcaaagatgagagaggatgtatgtaaaatgttaacctattacagagcttgatatggagtagacgaattctaaaattacattgagccattttgcctatagtggtgttagaatagaaaagtatactcatacattagaattgtgcacctagagctaagtgattccagccctgtggaacccgtcaatgccagaatggcatgtaggactagatagatgaatgtcacctgaccctgtggaaaag

SEQ ID NO: 642981 - DNA, 1099 bp, Homo sapiens
  misc_feature (233)..(233): n is a, c, g, or t
cccggttaaactcggcacgaggccaagatccaggactgcccagcccaactcgggtctgctgcagtgcctcggtcatcaccctctacaccatgttatgtcacctggtcagccctatccagtatccctgaacagaaatgcaacccccatttgccaacccagctgggcaacgacgcacacgttgtgcgcagcgccccgcagggctatgagacccagtggtgggatgccccgagcanttgtgggcctcatcatcttcctcctgtgcaccctcttcatcagtctgcgctcctcagaccaccggcaggtgaacagcctgatgcagaccgaggagtgcccacctatgctagacgccacacagcagcagcacgcagccaggctggcacgcctgctgcaggcgccgggcccctttgcacaacgacgcagcgacgtgcgtcacctacagcctactccttcttccaacttctgcctggctgctggccctcactgcaccgtcatgatgacgctcaccaacctggtaccagccctggtgagaccctggactgatgatctagcacgtgcgccgccgtgtgggtgacgcactctgtgcccgcctggccagggctgctcctctacctgtgccacccttggtagcccccactcctcctgccgcaaccgcgactttccgcctgaggccgccctcacagccctgccatctggtgccttcttgctctcccttgtgtgccatcttcgagcttcgcgctgacttggccaaactttgcctctctctctctccaccgcattcagcgctatgtctctatctcctctaatcacttgactctcactctcagtgtcctggcgcttggagcctgcggctccttcatgccgttaggccaccaaggcgcccccacaagtaacccccactacgggctctccttgcgaactgctcctctactacccccccgctgcacactcctccaaatgtctgctccctcgctcccctttacctgacccctattactccctctgccttactcctatacttctagagtgctcttgggcttaagctgtgcaactcctttgtgcccccccgctcccacgcaaagttggagcgcagcacgactcc

SEQ ID NO: 642982 - DNA, 1083 bp, Homo sapiens
gggattcttttatttttaggaattccaaacagagttaacctaaactgtcatgccaaaagatcagtcttaaactttcttagcacctgtacctggtttaatgtgatcagctaatccagtgaggaaacaacaaacaaaaaaaaaaaagaaaaaaaaaatttgtgtgcggggcggcttgggcctcaaggaaaaggtttcttaaacccaatcgtttggggcggccggggccccaattgcgttaggggaaccttgggctaacggctggtccccaaaggaaaaacctgggtccagggactcagttggctgggttcccccccccaataaaaaaaaggcgccgggcggcaacccggagctggtttttggatccccaatccccagaatggaggtcttcgaggaggagcacacaaacgcgggactatcaccaagcaggcgggtccccaagggcgacgtcccagaatctacaaatttactgcccccgcgctgggagaataacaaacaacgtaagcagactagcagtacgcagactacatcaagcaaacagaggcacgaacagagtgacaaccagccagcaccagcaaccgacagcacgacaacacgcagagacaagcacacacaacagcgagacagcagcacagcatccgacaacagacacagtaacaacaacaggccgacgaccagacacgccaaactcgcaagtcgacagaaatcacagcagacgagacccgtcacggaaacgtgacgcacgtacacgacatccacagcgggcagaccagaggaaccgatgcccacacacaggccagccgagagtcagctacaggatggagacgcgctgggcacgcatcacatgagacgcatcgaagcaccgcagtcgacaccgcacagacacagacgccgcgcacacgcaacagcccagagacagagagccgccggacgtaggcgccatgccggcactgacagagccaaggatacacgagcaacagtagacggaagccgaccgcagcagcacgccacaggacgacggcgattggatgccgcaaacagagagcgacccgaccacgcgataggcgtacctgaataacgtgtgtg

SEQ ID NO: 642983 - DNA, 106 bp, Homo sapiens
tcgtaccgatttcaaaaccgacctgaggtttcagagcgcagccattggtgcgctgcagtgagtgctagcgaagctgtacctggtgggtcttgttcgaatataccaa

SEQ ID NO: 642984 - DNA, 227 bp, Homo sapiens
tgacacccattcgagaacaccagattaaaagacctccagcaatccatgattctagtatactcatctctgactggcggtatgtaagatggtgatttggattacaagaagacagacaacaatgtgcatttattaaggaacaacattctggaatactcacgacgtagtaatctatgcacacttaaaccctaaggccaagaggacacaggggcaacccacacagggaaaag

SEQ ID NO: 642985 - DNA, 981 bp, Homo sapiens
agcgggctccgaggggtttccctcggaccccgctgctaaaccccggccagcggtgagcgtctaaggctagccttgtaccccaccgagcacgtcggccatgggggagggcttattccgctgaggcggtgcggcccagcgtggctggaacggtgtgggtgtccacgatctagagcggagtactggatgccggagcatggcgtggggctgagagagcaaggagaaagagggaggactagaacgcgggcctggggaagctatcaactttcccccacggagcgggtcaccgagtagtacaggaaagcataccgaagggaacggtgccagagacagctggataacagcgagacgacctgatgcggacgtcaaaacaccggcattccacgtggaggtaaagaggaggaagacgacggcagagaagacatctcattcacacatataatataacacccaggagggaaaagcacgacgagatcggaaagacgagaaaccacaccggagaccgaataagatcgacagaaaggagccacggcacccgagaccagcaggcaagcccccagtgagcacacctaatacaagtcgacaacagggggcgagagaaggattacacagcgagatggtgtgacgagaggtggccgacaaacaagagacgaagacggacgagcaaaacacacaggaccacgtgaagaaggaaagatcgagaacccaatatggaagatactgcaggaacaagtacacgagcgaagacaggagacacgaacagagacgacaccagagacacacgccgcgaatgaaaataaagaaggggagaagaccgagcgaaacgacgaagaatacatgcaccatagagaacgagacgaagagagaaaaacacgaaagaagcaagcaaaaacggaaccaacgacaagacaaacacatgaaagaagaaaaaaaacatcaaaaaacagagaggacacaacacagagagagaaggaggggacaaac

SEQ ID NO: 642986 - DNA, 175 bp, Homo sapiens
  misc_feature (78)..(78): n is a, c, g, or t
tagaggcccaatagatggcgtgtcttcgcgcttagtactcgtgtgaagttggcggggacggttcctgtcatcttcttngggcgtattgtgaggtgtgcgtggttgcaacgcggcgcggagactttagagacaatggcagggaacctcttatccggggcaggttacggcgcctgtg

SEQ ID NO: 642987 - DNA, 271 bp, Homo sapiens
gaaaatgacatagaggcaggtttcaccgtgttaccaggatggtctcaatctcctgaccttctgatccgcccgcctcggcctcccaaagtgctgggattacaggcgtgagccaccggcacccggcccatcagtcactttttcttttctctttttttttttttctttcttttggagagggagtctccttcggtggcccaggttggaaatggcgggggtgctatctcgggctcactggcaaggcttcaccttctggggatttcaaggcatattc

SEQ ID NO: 642988 - DNA, 827 bp, Homo sapiens
atttttatgtagtgaaaatattgcaagttagtcccaaatctgttttcatatagctttatgatttcctagaaaattgagattgtgagatttccctcctaggaatatattttcgtgtctcattcaaactactccacttgcaacaactaccagcagttgagagttactgttcacatgggagatgtcactgatggatgtctgttgcacaaatgaacagtatagaaggattaaaatgattgaaaaccactgctttagaattttgaaagcatgaaaacacaccagtctttgcaggcttttcattcactctcagcctacatcctacaaatcctgttgaccccacctttaaaatacatctagaatcctaccacgttaagccagctgaatcattggcgttatttgatttcaattatttgattatcagttactgcagatgagaaatgacaaattgtaatttggtcagctgtccatttaccactctagggcatcataggaaaacagtgcctttgtgtggttacttaattcttccaaagactaatcctgttttataggactagaaactcattgtcataaacccacagtggaaaaatcttaggaatactgattcaccataacaaaactttagaggagactaatgaagttcagaatccatctgataaatgatctagaatatattcacataggtgctcagtgtctcatttcaactgaaggaagtccacaggcttgtagttagtaaacttaatagtcaagtaatacattacaattaccataggatgaatgatctgacgtaatggcctaattgggatagagtcaagcagactattttatctaaa

SEQ ID NO: 642989 - DNA, 583 bp, Homo sapiens
ccagttaaacccttttttaagggcatccagggagggggccagggatggaggggaggggttgaggaccaaaaggcagttatttttgggggggattaaccatttttcccatgaaaaggggaaacttggaatttgggtaaatcattaaaaaaacaaagggtttgttgaacttgacctcgggggggataaacatgggtatggcctttaaaaacatggccccagcagtttaagtccctttttggtcaatggtcagcaaagccttatgcacggccttggaaagcttaaggggggcctcctttgggaccccggaaaggtcagccccattgttgaaaaccttagggatgcccagttgacccaggacgcttttaaaatcataggttccaagaatggacagtttgggaaaatgaaactggaagacctgtcgggcaaaaaagaaatttaaggcttgggaacaaattcccttttgttctttttggacccaccaaagtgcaagtgttttctttttttgtttggtgttcctgggccaaatttctgaacccggggaatccgccgggtttaaacgccccaacccggtggaattccattt

SEQ ID NO: 642990 - DNA, 886 bp, Homo sapiens
taatgatgaaaaaatatgacaaaatgtcaaaaaaaaagcgctaaaaatgttgtacaaccccataagaaatccatatggtgttggcctggatagaactgtctctggattctgggtgttccttctcagagggagtgtctactatattattatatcaaccatctgggttggcttgacgaatgatggaaagggtaacaaatattctgaatttctgctagccaaggccactgagatatatgaagaagcttcgtggaaatattatagcctgaggaccagtggcatctgtcaccacttaaaccttcgtagttgaagggctatcattttaagcgatcgaggttgttctgagtggagttcagaatggaaagcacgggtataccagtcacatttgtccatggatagagatggatttgagatagcaggggagatgagtacgcatcgaacagcagtcagtcaatcatagattccatagccaccctaggaggaatcctcatattgaaccttgctcctggtacgtaactgactagattcgaattgaaactgttattcattcgagctgaggactagttgtcactaattgggttggctttacatatataaaccgcacaataaaacgtctagtggtttccaattcgaaaatgtgtatttgtaagataatgttgccttccttccacttagagtcaaaatttagttatgaggccaccgagagacaaacatgtggaggcacacctgggggggggaaaatttttaaaaaaaaggggccccccgaaaaataaaaatttgaactagggcctatttgtgcgaaagaggattgcgtttaaacaaggcgagagaaaaaatccgagggaaaatggcttgggaacaaaatttgggggaggaaaggcaaggctgc

SEQ ID NO: 642991 - DNA, 122 bp, Homo sapiens
ccggtccttatactgcctgtacagcatgtacttttaaagcctataactcttcttactattcccccattttacctgtccaacaaacagacaaggcttacacggttagtccacgaattgccccg

SEQ ID NO: 642992 - DNA, 366 bp, Homo sapiens
tcttagtaactatgatactgtgcagcaaatgagagtctgtgactgtctttcatgtttcacagccattagcgtcaatcactgataccagacactctaagtcccataaatcaaaatgcaacctcgaataaagggtgttcagagttgactttgtcctgatggaaaatgaatatccttgtagcctctatatagttaacttccaaatgtaggacaactatgtggtaacacgtttcgtgtctattcctatcaagatgagcctttaagagagggacttctattaagctcttgagctaaggaagaatacacttgattcagagtctcggagtgctcttaatcagaactatatgtattgtctcaatattaaataaa

SEQ ID NO: 642993 - DNA, 187 bp, Homo sapiens
  misc_feature (17)..(17): n is a, c, g, or t
  misc_feature (156)..(157): n is a, c, g, or t
tttcaccatatgcagtnactcctgacctcaagtgatccacctgcctcggcgtcccaaactgctaggattacaggtgtgagccaccgctcctggccttaaattttttttaaaaaaattttatttttttatagagatgaggtctcacgtgtgttgccnncaggctggtctcaatactccgtgggctcaa

SEQ ID NO: 642994 - DNA, 245 bp, Homo sapiens
gcagagtgaggctcagttgccataagaccacccccttctgcccgctaatcacaagtctgggcctttggaacttctgaccaaatggtttcaaactggggttcccacaaccccctctttgggctcaattactctgctagagcagctcacagaactcagggaaacacttatgtctattggtttgttatgaaagatattttaaaggatgcagataaacagcctgggtgacaaagcgagactctgtctca

SEQ ID NO: 642995 - DNA, 184 bp, Homo sapiens
attcttttctttccagaacatcaaagctgagaatattacattagattagcagtctctgtagatcctcagtacccgcatcgcattctaatctaatctaatatactatagttgccagttccaaaagcaaatctactgtagtgaatgggaaagtccaaacccttattcccttcagaggagccaagtt

SEQ ID NO: 642996 - DNA, 150 bp, Homo sapiens
ggaaagatataagtcaagtggtgagagggaattccaggaatgtatgagggtatacaacaagtaatcttactataactaagatcaaaagattgtggtggcgataacggtcctgacattaaagagtcaagtcagattaagacgggatattgt

SEQ ID NO: 642997 - DNA, 259 bp, Homo sapiens
  misc_feature (71)..(72): n is a, c, g, or t
aagtgttgtcgagcattaaaagaaatacaggcgctaaaacagagctagtcaatagaacattgcttgagagnnggaaatttttttttaatctgtaatgtccaataaggcagccattagctacatgcagctatttggatttgatacatggctagtgtgaaggagggactaaatttttaaaattatttttgagagagtcctgctctgttgcccatgctggaatgcagtggcactatcatagttcactgtaaccttgaactgc

SEQ ID NO: 642998 - DNA, 229 bp, Homo sapiens
tatgcgcacacatgtgtgtatatatgtcgtgtttagttgacgtcgtgtgtatgtgtgcgtgtgtgtgaattgtgtgtgtgtatgtgtggactgtgcgtgtgttcatgttcggactgtgtgtgtgtatgtaagtgtgtgtgcgtgtgtgtgactgtgtgtgcctgtgtggactgctgtgtgtgcgtggactgtgtggtgtgggtgtgtgcgtgtgtgtgaactgtgcatg

SEQ ID NO: 642999 - DNA, 589 bp, Homo sapiens
  misc_feature (589)..(589): n is a, c, g, or t
gcttcagctccgtggtcactcaggacggagagctggtgcttggggctcctggcggctattatttcttaggtctcctggcccaggctccagttgcggatattttctcgagttaccgcccaggcatccttttgtggcacgtgtcctcccagagcctctccatttgactccagcaacccagaagtacttcgacggctactgggggtactcggatggtcgtggggcgaagttccgaagggggattttcaacaataaacgaagaaatagtgtcgtcgtgtgccccacacttggagctggaccctgggagcggtggaaattttggattcctactaccagaggctgcatcggctgcgcggagagcagatggcgtcgtatattgggcattcagtggctgtcactgacgtcaacggggatgggaggcatgatctgctggtgggcgctccactgtatatggagagccgggcagaccgaaaactggccgaagtggggcgtgtgtatatgttcctgcagacgcgaggccccacgcgctgggtgcccccagcctcctgctgactggcacacagctctatgggcgattcggctctgccatcgn

SEQ ID NO: 643000 - DNA, 371 bp, Homo sapiens
  misc_feature (20)..(20): n is a, c, g, or t
  misc_feature (185)..(185): n is a, c, g, or t
aagccccttcctccacaganttgtgatcatttcccttttttcccctcctttcacaccgaggttcctgttttcctgtgcctccgaggcccccaggtggaagtgccttgttgcctttgccctttgaagtcggaacaattcctagcacctgtgggaaggtcaaggccaaaggcaaattcaaggccagnttgtgacaaacccagggttgaggcctgccccatgaaaaggttgagccccctgaaacccctgccccttgttggtacattccagaggggcaggggcctgggggatatgaagttagggaagcccctgttttgattcccccctgcccttgtcttggatccaacaccaaataaaaagaaacaagtgaagta

SEQ ID NO: 643001 - DNA, 236 bp, Homo sapiens
aaccccgggggcggtcccccccccgggtttttttcttgggccgggggggggtttccttttttccccggggaccccttttcccctttggccctttttggggccccttttaccccagtttgttcctaaaacccgggggggtccgggcccggttttcccgggtttttttgacccccggggccggccccggggcccggttaaaaaaaaattaaaaacacaaaggaccaaccaagggtaca

SEQ ID NO: 643002 - DNA, 284 bp, Homo sapiens
tcgcagtgatagttgactttggatacaaggtttggcaaaaaaaaaaaatattaacaaaatattctgtaagaatcaattggctatatggaatttaggataaagaatatttacaataaagaatatttacaataaagagtttattattatttgtaagttgtgagcaacaaacataccctttatctctgtaaaatttatacacacaaaaattaacaaaagattctgtaagaattaattggctatatggaatttaggatagaatatttacaataaagagtatttacaat

SEQ ID NO: 643003 - DNA, 128 bp, Homo sapiens
gatggccgggaactcgatcctgcctggctgctgtctctattcttctcggcctgtcagcaaagttattttgctttcaagttggaaaggcaagattaaaatacaaagttacgcccccgcagtcacttggt

SEQ ID NO: 643004 - DNA, 125 bp, Homo sapiens
gtctgatggtgatctagaggatcccagcgggaacattcactttgactggggaggtggaggtagcagtaagccgaagatcgtgccatatgcgctccagcctgggagacagagccagactctgactc

SEQ ID NO: 643005 - DNA, 750 bp, Homo sapiens
  misc_feature (151)..(151): n is a, c, g, or t
  misc_feature (620)..(620): n is a, c, g, or t
agcaacactttccccgggaggttgctgcacctccctgctcctcactttcctcatttgtggaataggaatagggtcattgtgagaattaaataagttaatatttgtaaagggtttaacagtgactagctcataatccgtcacgtagaaagtnttttcttagctcatttaataagtacctttctaacccatcactgatagcatttttcttttgcaccagacttctttctagtcattgctgggagcgtcctctcattttcctgcctccctgtagctgtcactctcactcctaaactgttggcgttctcattttggcttgcccaaatcttacgcattcttttaagtccatgttcaagtgaatcctcactgattttgttcttcattcatccccttaacagacttttatggagggtctactgtgtgcaaggtgtattatgtaggaagccttccacagttcccagagctaggtgagctctgtcatgtaggcctgtcttgtacatatcaccttcgacattgctgagcagtttgtgttggacatgtttgatctcctcccctagaatataaacagctggagagtaggatgcttattagtaggtgcttattaagctttctttaaaatgagnaagtgcacatgctaccttttatagatctgttaccttctaatgaaggcaagaacaataggaacaaacattagttttgtgtgtgtgtgtgagagagagagagacagagagtgagagagagatagagagagat

SEQ ID NO: 643006 - DNA, 363 bp, Homo sapiens
tctaacagtgtcgaatttctaggattagaggaagaggtcctccagtccagccctcctctgaatagccatggttctaggctgccggcctctgaactgtactatgtatagcagcttgtgaatagcgtgtgggtatatgctgcccctgaagacaccgtgtaaccacgttgtccattggacggctcgcagtgagctatagccagcttcataagaccctcatgggagccctccgtgttggcatccatgcctgtccaggcaacgagtgctatgtctacaaggaaccgtacataagacaaagttacatcacatggctttggcagagagcaaaggttgatagtgtcatctccatgtggctctccagcacgt

SEQ ID NO: 643007 - DNA, 575 bp, Homo sapiens
agagcgggtgagaaggcaatgcgcagcaaagtctctctgtaccaccctgtgccaggtcgctgcgctacatgtcctgaacgggcaaaacacggcgaatgtaccgcacgtacctggacacggtgaaattgctgatgaggttgcatgaactattatcctccatgaatggatcgaagcgactcctcaggggcagcgaactggagcttcagttcacaagcttcccatgcgcacatcatggttgacttcgtgcttagatagttggcatggagagcgatgctagtgatgcacatgatgatcagcatggttcagagactgttgggtggtatgccacacatgatgcgaacagtacagattgcggcagtgagcaaaactgatagcaaaagtaatataaaagtaccatgagaaccacatgaatgacttggagggcgagaaaataggtactagatttgcgtcctgatggacatcgagcaggtctctggactcacaatcgagggatctgccaccgagatctgtcgcgtgcgcaagtcttgaacatctaggccattgcaaagtttcccgttcccatgcctcaacagact

SEQ ID NO: 643008 - DNA, 762 bp, Homo sapiens
cggggcatccagcaagtaccgggcgctcacgggttgcctgagttcacccagcagatgttcgagttccaatgaacattgagtggcgcgcgttgcgaccccggcgtccacgcctctgttactcatctatcgcgtgcactgtcacatcgtgtgcctggggaccggcattggtccatggaacggagcgtgagacgagcagagtgcgtcaacgtgctagatacataccgaacaggcatgcgtactctcggtggaggctgggatgccgctcacacctaactgtgatacgaccggcgccctgtctgtagagcactcaccagctcctcggctggcctgagagactgtcgggccactcgttcattctggcagacacgcaacaggcctactccaaggaagctgttcaagcgcatcctccgagcagctcacggcacatgttccaggcgcaaggccttcaagtcactaggcacacggcggcgacgggcgataggacagagatggagttcaccgaggccgagagcaacatgaacgacttggtgtccgagtaccagcagtaccaggacgccacggcacgacgaatcaaggggagttgcgaggaggaggagggcgaggacgaggcgttaaaaacttctcgagatcagatcgtgcatccgttagtgaacttctagttgtcgctcaagcatcggtctttctacttgtaaactatggtgctcagttttgcctctgttagaaacttcacactgttgatgtaataccccggaggtcctctaa

SEQ ID NO: 643009 - DNA, 112 bp, Homo sapiens
  misc_feature (5)..(5): n is a, c, g, or t
gaggntctactacgcgctttgacgctgtttgtcatgaccgaaagagatatgcgatgcgtatactgagctgaatgatcccatgcgggacggtacgctttttgaatgaacaggc

SEQ ID NO: 643010 - DNA, 307 bp, Homo sapiens
cactcacacatccccctaaccctgtccctggtcccactccaccgcagcaaaggcatgatccagctgctcctcctgactctctgtaactttagacccagagtgggacacctgtcccccagcctgtcctccgttggtctgggcacggatgttggccagggtgcccaccttgcctgtgtccatgccctggtggctgtagaccttgtagcggatcatgaggatgatgatgaagacgagcacggaggctacgatgatgccaccgataatgatgatcatggtgccgcccaggaactggctgtggagtcgacgc

SEQ ID NO: 643011 - DNA, 738 bp, Homo sapiens
  misc_feature (237)..(237): n is a, c, g, or t
agcggccttgagacgcggcggctgacagtacaacccgcctgagctgtcctcccgctctcctccccgatgaaaggattttagatttcacatgaacggaaggaatgcaatggacaaactcccagcgttcccactgtccactccatcatcggcccttttcctgtgcggccgttgctcggcgcagtgagccatagaagagcagagcgagccaggatgcttccaaatcagcattcgtcaatnagctttgctagagcaaggtgcacaaaggagcgtcggaacgagcgatgtcttgctcatgagcagcaaagtgcaatgatttcgcatagcattatgcgctcatagccgaggaccaagagccccgtgtctatggcaacagtcagcacattgcacccacagcattattatcctcttccgcgaataggtgcgtcagcaccatcgagaagccacagttccccagggggatccccacagtgtccattccccaagcagggcgctcactttcagagctcctctctttctcctcctgtctgcgtcctggagatagttcgtcccatgagaagtccgaagaggcagggacaccacttccgttggcccttgttccccagtctgtgatgtactgtttagccggacacggaacagctgggcgaggaagaattgttgcgaactgaaagcgacttgcttggccagagtgtaacacaggcgacgtcctccatggaggaaataaacggctttgcgaaaccc

SEQ ID NO: 643012 - DNA, 255 bp, Homo sapiens
  misc_feature (251)..(251): n is a, c, g, or t
catgaatagaaatacttctttattcatgtttgcaatcgacttgagaattattttgaaatttgattttgggtttgtgagagataataagattgaagaacttcatcatttcagtgactttgcctccaactctctggaatctggctacctcttgattgatatgtcccttagcagtacttttgccagttaaggttgcgttaccctcctcattagctaaacctctttatcttgtgcctcaaaagagcttttacttntctt

SEQ ID NO: 643013 - DNA, 239 bp, Homo sapiens
  misc_feature (9)..(9): n is a, c, g, or t
  misc_feature (15)..(15): n is a, c, g, or t
  misc_feature (39)..(39): n is a, c, g, or t
  misc_feature (112)..(112): n is a, c, g, or t
  misc_feature (154)..(154): n is a, c, g, or t
  misc_feature (161)..(161): n is a, c, g, or t
  misc_feature (233)..(233): n is a, c, g, or t
gaattcggnacgagnagtgtggaaggattgcttgacgtnagaagtttgagatcagcctgggtaatacagtaagactctaactccacaaaaaattttaaaaaattagctgggnatgctagtgtgtaccagtagtcctagctactcaggaggctgnggcaggnggatcgcttgagcccgggatagtcacgattacagtgagctatgattggaccactgcactccagcctggacancagcat

SEQ ID NO: 643014 - DNA, 134 bp, Homo sapiens
tcacgcccattccacaaggcggaggaatggagtggcatccctgggggagttaagacacacgaggtttgcagtttcattttgtttcagaatcagtttggccattaaaatgggactgggttgtggacattgcgtga

SEQ ID NO: 643015 - DNA, 368 bp, Homo sapiens
cccaatgttttgatatgagttcgaggactaaacttgtaatctgttgaaaacatattttgagatttaagttattgatgcatttgtttattgtgagtaaaaagaaaacagtaaaaaatcatactcacatttccttgtttacatttgggagatcgtttatcatttctttttaatttgactgtttaagtatattagagacaaggtctcgccatgttgcccaggctggtctctaacccctggcctcaagcaatcctcccacctcagccttctaaatttctgagattacaggcatgagccaccatgcccagtctgtcttttttttttttttttttaaagacagaaagaactttgtaacacaccattttctccaa

SEQ ID NO: 643016 - DNA, 857 bp, Homo sapiens
ggctgaaggccgactgtgattccccctacccccacaaggggattttgacccctctgagggctgctctagaggattcaggccccgaagctgtcccaggtaggtccccgctgcttcccaccagccaagctgtgcctcatggagtcgatgtctagcaggcctggcgaggcggcgctgcaccgaggagaccggcgtgccacgactggttactcctcttccggacctggacggaatgtacaaagctggtagcgagtcgtcgtggatttgtcctggcgacctggggtgtgaacgagttgccttgcagttccctgaccagggtattgggagatgctgtggctagtggctgcatcgactggaggagacgaccggtcaagagtatgttcattctgggtgacaacagcactacggcagctgctgcgtggatgtgctgggtgctgaggcacgtctggagctcaggctctcgatcattttggtccctgcctggttaatgccctctcagccctgctccgactgtccgttggcttcgtgcttcgttcacgttctgtggccttgggagctctgtgtcatggcctttggggcccagcatacccatgatcccaaagtcgcctgtggtgctgcttgagtcgagcccgcgtctgtgcccaatgtcctggagaggctttagggctactcttcctgtagcccaacgggtaccctgggaagcctgcgtaagttctaccaagggccgagtataatcccaaagcaaatgtggttcccctgaagttccagaagccttattggcccctaaaaagggttggggggccgcgttccccctttgccccaaggagaggggtctaaaaaacattttggggggcgtctac

SEQ ID NO: 643017 - DNA, 207 bp, Homo sapiens
  misc_feature (9)..(9): n is a, c, g, or t
ctcgcactncacctccagcaccacctccagcacactccacactacacctccagcactacctccaccactaccacctccagcaccacctccaccactaccacctccagcaccacctccaccaccacctccaccaccaccacctccagcaccaccaggtcctttgagttttaagctgtggctcgtagttgttctggctgagcagtgggt

SEQ ID NO: 643018 - DNA, 345 bp, Homo sapiens
gctgctacttcgcagcgctccagtcatgctcttcatccgatctgccgctgacggtcggctccgtgtccccaactgtgcctccggaccagcccgaaggagtagacacatctttgtggcctgtgaagggagcccattattgccagtccactttgatgcttctgtggaggactctaccttcggtcagagctgtgagatatctcacctccctcaacctcatcctctccacagctgcctcttccctcttccttccctgctgtgaaagaagtaactacagttagggctcctattcaacacacacatgcttccctttctggtggccaccagaaagggcagaaggaccaggtc

SEQ ID NO: 643019 - DNA, 885 bp, Homo sapiens
ggcaagccccaagccttggcagcttccacatggtgttgagcctgcaggtgcacagaagtcaagaattgagatttgggaacctttgcctagatttaggaagacgtatggaagtacctggatgcccagtcaaaagtttgctgcaggggtggggccctcatggagaaactctgctagggcagtgtggaagggaaatgtggggttggagcccccacacagagttcctactgggacactgcctagtggagctgtgagaagagggccaccatcctccagaccccagaatagcagatgcaccaacagcttgcaccatgtacctggaaaaggctgtagacactcaacaccagcttgtgaaagtagctgggagggaggctgtaccctgcaaagccacaggcatggagctgcccaagaccatgggaacctacctcttgcatcactgtgacctcgatgtgagacctggagtcaaaggagatcattctggaactttaaaatttgactgcccattggatttcagacttgcatgagccctgtattgttttggccaatttctcccgtttggaatggctgtatttacccaatatctgtacccccattgtgtctaggcagtaactaccttgcttttgattttacaggatcataggtggaagggacttgtcttgcctcagatgagacttcggactgtgggttaatgggttaatgatgaaatgagttaagaactttggggggactgttggaaatgcctgattggtttcgaaatgtgagaacatgagatctatagggccaggggctgaatgactatggtaggctgttcacttaccaaacctcattgattgtatctcccattattccacgtgttgtgggagaacccaggggaggtattgactctgg

SEQ ID NO: 643020 - DNA, 421 bp, Homo sapiens
ctccatgggtgaggatacagatgtgtacaccaggcgggtagttttaaattttttggtaaaggacaggtctcacaaggtggcccaggctgggtctcaaattccgggtcttaagtgatcctcccacctcagcctcccaaaacgggatcaaggtttttatttttttgggagacaggctctttctctgtggcccaggcgggagtgcaggggctggatctcggttcactacaacctctgtctccccagctcaaatgatcctcccacctcagctttccaagcagctgggactacaggcacaggtcaccactcctcgttgatcttttcaaaaaatttaaatagagatgaggtctgtttggcccaggcgggtctggaactcctgagataaagcaatctgcccaggctgaggcaggaggatcatcggagg

SEQ ID NO: 643021 - DNA, 249 bp, Homo sapiens
atacgtcacttcagatatatcctttacagagtgctactctatcagatatgaagtgttctctacccatgtccagaactaaagactccagatagaaccagctgctgatggtctcgggaggggatatgcaaggctgtgcattcagccttcacaaagctcatttacactatgcacttccacagcctcttcccttgtgtcccttctgtcctagcacattgtttacggttgagcccgcatcctgtggaatccttt

SEQ ID NO: 643022 - DNA, 790 bp, Homo sapiens
gccaggcccgggatcgccgagcccgagctcgggcgccccgccggtcacctccgcagctggacaccagccctgcatagcccaggtagatggaagacttcggcccgaggggcgtgctccccaggcccctcccggtcctggtcctggttcccgtcagcatcatcaggggctgagagatgaggattttgagaacgaggctggagacttagagctcaggaatgagcaaaacagccaggttccatgagcctggacgcaggtgaagcaggcgcggcagtccagcctcatggccctcctgctatcacgtggcctcgttgcagtttgaggccaggaccccgtggttctccgggtgccggtccctcccaacgtcggctttgaacttgaccgtcctagggcttgacctcatctccgatggatgtccagtgcggcgcgttctgttgcgcgagtaggtggtgcacaagccctgcaggtcgccgtgtggccgtgcatgcttggaggacttcctgttccaagcggctcattgggcgttgactgccctggggacgcaagtgagctggcccagctggaggcttgtggtttgggctgggaccgacgccatggtaccgaggcccggggagcggcacgtgcgcggagcggtgctcatgcacctggaggagatgcaacataccatctctaccgacgaagacaagagtgctgccggtggtcgacgccattggctgtccctgcgccaccttggggtgcggaccaagagtggagacccagaagtcgggggaaggaattcttccggaaaaaaggg

SEQ ID NO: 643023 - DNA, 309 bp, Homo sapiens
tagggcaccagcagagccacgtacgtacgtagctggactggcgccttgagggatgcacttacccttgccctcccgagtgggtttctaggtactcacctgagggctgcacctttctgggccctacttactctgtaaactacatgggacgagagtagtgagcattctcggactcatccagaagtacactgagggtttgaggtacgaactgtccttataaatgtgatggggcctcttctactttggaggagatgcctgtgagtcaaaagcccctgccaggtggctgttctgtctctgtgtctgtgccgaggg

SEQ ID NO: 643024 - DNA, 524 bp, Homo sapiens
  misc_feature (5)..(5): n is a, c, g, or t
  misc_feature (85)..(85): n is a, c, g, or t
  misc_feature (113)..(113): n is a, c, g, or t
acaancatactgcacctgttatccagtgtgacagcagattaccaaaaaaggagtctgatgaagtgccataaacatacttggaaangtcacatggatttaaggaaagaaagaangaaagaaagaacattgtttggggtttgttgctgttgttggtttgcccttctggcgcttcttttcttgcccagtgtgccgctgggtcctttggtactggctgtgcttaaatacaaaccaatcaagccccgggcggacaaatgccctgctcttggtgctcatcactgtaatttttttcctgactttgctctcaggagcgtgagtatgtaaatatctgataatgaatagtttagtcactgtcaagaaaattaatttacattgtataactgaagactcttttcagggttaggtgatttgcattgatgtatatatagtaaaattgctgtaaaattttaaaccgattttcttaacttgatgttctttttaaactttctgtaagatacatgcaaatgataaacgttcagtcacactaa

SEQ ID NO: 643025 - DNA, 365 bp, Homo sapiens
ggcctgctcgccgtctacaccatgctgacgatagacttgctgtacgatgcgcggctgttgaacaggctgcagctctatgatcaggtgctatattttggaatggaccgccttatcattactaatcatctggaaggacttactggacatcactaggacatgaatgtaccattgtcttgttagcatcagtggcacgatggagcctacgttgcatagatgcgatctggtctttctaactcgagtgctaagatcccatactagagggaatgtgtattcatgaatggcatcctgggcatatcaagttattgaccacttgagattatactgcggcagatgaccgatgcctctataatcaaggaccattggct

SEQ ID NO: 643026 - DNA, 504 bp, Homo sapiens
  misc_feature (22)..(22): n is a, c, g, or t
  misc_feature (31)..(31): n is a, c, g, or t
  misc_feature (37)..(37): n is a, c, g, or t
  misc_feature (40)..(40): n is a, c, g, or t
  misc_feature (44)..(44): n is a, c, g, or t
  misc_feature (46)..(46): n is a, c, g, or t
  misc_feature (94)..(94): n is a, c, g, or t
  misc_feature (98)..(98): n is a, c, g, or t
  misc_feature (122)..(122): n is a, c, g, or t
  misc_feature (125)..(125): n is a, c, g, or t
  misc_feature (148)..(148): n is a, c, g, or t
  misc_feature (151)..(151): n is a, c, g, or t
  misc_feature (167)..(168): n is a, c, g, or t
  misc_feature (173)..(173): n is a, c, g, or t
  misc_feature (175)..(175): n is a, c, g, or t
  misc_feature (192)..(192): n is a, c, g, or t
  misc_feature (200)..(200): n is a, c, g, or t
  misc_feature (208)..(208): n is a, c, g, or t
  misc_feature (228)..(228): n is a, c, g, or t
  misc_feature (232)..(232): n is a, c, g, or t
  misc_feature (238)..(238): n is a, c, g, or t
  misc_feature (240)..(240): n is a, c, g, or t
  misc_feature (256)..(256): n is a, c, g, or t
  misc_feature (266)..(266): n is a, c, g, or t
  misc_feature (285)..(285): n is a, c, g, or t
  misc_feature (287)..(287): n is a, c, g, or t
  misc_feature (290)..(290): n is a, c, g, or t
  misc_feature (305)..(305): n is a, c, g, or t
  misc_feature (312)..(312): n is a, c, g, or t
  misc_feature (320)..(320): n is a, c, g, or t
  misc_feature (324)..(324): n is a, c, g, or t
  misc_feature (341)..(341): n is a, c, g, or t
  misc_feature (355)..(355): n is a, c, g, or t
  misc_feature (405)..(405): n is a, c, g, or t
  misc_feature (448)..(448): n is a, c, g, or t
tggattcattttgaaatttaanaattctaanagtaanaanaaananagtttatgctttttttttaatgaaaacaaacaagtaattttgtaaaantcanaaaacaccagtttccttctgatcncancctggatttttctgtcagctggnggntgcatttctgaccccnncccananacgtgaaagcagaaganatgatgcntctttaanaatgaaagcccaatctaaanagtnttatcncnccgtgaacagcttctncctgacccanagcaaatattaagagaaananaanatatttacaaacaanatttaanaatgcccncaanaatagagtttgcccccnaatggaaaattacncattattttgtttcaaaaagttataaatttagtgcttgaaaaatccagcnggtaagtggaaggactaacagggtctgtttctggaactgtccnccagccaatgagcctgccctgtcctggaagccatttttctttttcttttttttttc

SEQ ID NO: 643027 - DNA, 222 bp, Homo sapiens
gccggtctcagactcacagctggccttgctggtctgactcatctcccacccctctctaatctctgaaacttcccatggccccatgggatggcgatttcccctcccgtatcccatggaccatggacctggaggctggtatgtgtcctccttgcttccctcactgctgtaccctggcactgttcttcccacttacatcatgcttcatgtaccaacactctactt

SEQ ID NO: 643028 - DNA, 179 bp, Homo sapiens
ggtgttgtttctgtcctgcattagttgctgggagtagtggcttcaaattccaaccatgtccctgcaaaggacatcatctcattacattttatggcttcatagtgttccatggtgtatgtgtaccacattttctttatccagtatatcattgatgggcatgtagattgattacatgacgt

SEQ ID NO: 643029 - DNA, 642 bp, Homo sapiens
  misc_feature (380)..(380): n is a, c, g, or t
ttgctcttcgcaataaatcttgctgctgctcactctttgggtttacactacctttatgagctgtaacactcaccgcgaaggtctgcagcttcactccaagccagcgagaccaggaacgcaccaggaggaacaaacaactccagacatgccacctttaagagctgtaacactcactgcaaaggtctgtggcttcactcctaaagtcagtgagaccacgaacccaacgaaagaaactccggacacatctgaatatctgaaggaacaaactccagacacaccatctttaagaactgtaacactcaccgcaagggtctgcagcttcattcttgaagtcagcgaaaccaagaacccaccagaaggaaccaattctggacacattntggtgaccacgaagggactattacctatcactaagcgaatcaaggccatcaaactacagatggtcttacaaacggaaacccaaatgagctcaactaacaacttctaccgaggacccctggaccgacccactggccctttcactggcctagagagttcccctctggaggacactacaactgcagggccccttctttgcccctgtccagcaggaagtagctagagcagtcattgcccaattccaacagcagatggggtgcccgg

SEQ ID NO: 643030 - DNA, 297 bp, Homo sapiens
tcaaggatccccttgtcgagagacgagagagagaaagagagagggagggttctgtgggcagtggcatgacagatttgggtttctgaaagattgccagctactgggtggagcattgatttggaggtgggcaccaggaggctgttagtttttgctggcaccttagtaacagcagtgtttgccctgaagcaaaggggctaacttggaaaattactttaagaacagagacctaaacagggacgttggtggttcctgggaaggtgacttcttgacttcttggtgtcacccatctttggcttg

SEQ ID NO: 643031 - DNA, 239 bp, Homo sapiens
tagtcggtgaccatttttttaaatagtcttcattgcaattgtacaagaacacctcagatggtatgcactgaggtttgagctccttgaggctaccggcgcgattcatggcgtaccactgtgcagcacccggtcgttgccaaggttggcgtcgcgcaggctgaaggcgtagtggttgtcccagtcgagcttgcccggccattgcaccacggggccgaactgcgaactgtagacggtgtggg

SEQ ID NO: 643032 - DNA, 5808 bp, Homo sapiens
  misc_feature (129)..(129): n is a, c, g, or t
gaaggcagtttccggagggaaggggtagggttggggtgggggcgctctccgcccggtgttgcgctccttcccagaatccgctccggcctttccttcctgccgcgattcccaactttgctcaaagtcgcnggactctaagctgtcggagggaccgctggacagacctgggaactgacagagggcctggagggaaacaggccaaagacccacaggcagagttgacacggaaccccaaagcaaggaggagggctcgggcccgagaccgttcacctccccttatccctgttcccctcttcaggatggagctgacctcaagggaaagagggaggggacagcctctgccctgggaacttcgactgggcctactgctaagcgtgctggctgccacactggcacaggcccctgccccggatgtgcctggctgttccaggggaagctgctaccccgccacgggcgacctgctggtgggccgagctgacagactgactgcctcatccacttgtggcctgaatggcccccagccctactgcatcgtcagtcacctgcaggacgaaaagaagtgcttcctttgtgactcccggcgccccttctctgctagagacaacccacacagccatcgcatccagaatgtagtcaccagctttgcaccacagcggcgggcagcctggtggcagtcagagaatggtatccctgcggtcaccatccagctggacctggaggctgagtttcatttcacacacctcattatgaccttcaagacatttcgccctgctgccatgctggtggaacgctcagcagactttggccgcacctggcatgtgtaccgatatttctcctatgactgtggggctgacttcccaggagtcccactagcacccccacggcactgggatgatgtagtctgtgagtcccgctactcagagattgagccatccactgaaggcgaggtcatctatcgtgtgctggaccctgccatccctatcccagacccctacagctcacggattcagaacctgttgaagatcaccaacctacgggtgaacctgactcgtctacacacgttgggagacaacctactcgacccacggagggagatccgagagaagtactactatgccctctatgagctggttgtacgtggcaactgcttctgctacggacacgcctcagagtgtgcacccgccccaggggcaccagcccatgctgagggcatggtgcacggagcttgcatctgcaaacacaacacacgtggcctcaactgcgagcagtgtcaggatttctatcgtgacctgccctggcgtccggctgaggacggccatagtcatgcctgtaggaagtgtgagtgccatgggcacacccacagctgccacttcgacatggccgtatacctggcatctggcaatgtgagtggaggtgtgtgtgatggatgtcagcataacacagctgggcgccactgtgagctctgtcggcccttcttctaccgtgacccaaccaaggacctgcgggatccggctgtgtgccgctcctgtgattgtgaccccatgggttctcaagacggtggtcgctgtgattcccatgatgaccctgcactgggactggtctccggccagtgtcgctgcaaagaacatgtggtgggcactcgctgccagcaatgccgtgatggcttctttgggctcagcatcagtgaccgtctgggctgccggcgatgtcaatgtaatgcacggggcacagtgcctgggagcactccttgtgaccccaacagtggatcctgttactgcaaacgtctagtgactggacgtggatgtgaccgctgcctgcctggccactggggcctgagccacgacctgctcggctgccgcccctgtgactgcgacgtgggtggtgctttggatccccagtgtgatgagggcacaggtcaatgccactgccgccagcacatggttgggcgacgctgtgagcaggtgcaacctggctacttccggcccttcctggaccacctaatttgggaggctgaggacacccgagggcaggtgctcgatgtggtggagcgcctggtgacccccggggaaactccatcctggactggctcaggcttcgtgcggctacaggaaggtcagaccctggagttcctggtggcctctgtgccgaaggctatggactatgacctgctgctgcgcttagagccccaggtccctgagcaatgggcagagttggaactgattgtgcagcgtccagggcctgtgcctgcccacagcctgtgtgggcatttggtgcccaaggatgatcgcatccaagggactctgcaaccacatgccaggtacttgatatttcctaatcctgtctgccttgagcctggtatctcctacaagctgcatctgaagctggtacggacagggggaagtgcccagcctgagactccctactctggacctggcctgctcattgactcgctggtgctgctgccccgtgtcctggtgctagagatgtttagtgggggtgatgctgctgccctggagcgccaggccacctttgaacgctaccaatgccatgaggagggtctggtgcccagcaagacttctccctctgaggcctgcgcacccctcctcatcagcctgtccaccctcatctacaatggtgccctgccatgtcagtgcaaccctcaaggttcactgagttctgagtgcaaccctcatggtggtcagtgcctgtgcaagcctggagtggttgggcgccgctgtgacctctgtgcccctggctactatggctttggccccacaggctgtcaagcctgccagtgcagccacgagggggcactcagcagtctctgtgaaaagaccagtgggcaatgtctctgtcgaactggtgcctttgggcttcgctgtgaccgctgccagcgtggccagtggggattccctagctgccggccatgtgtctgcaatgggcatgcagatgagtgcaacacccacacaggcgcttgcctgggctgccgtgatcacacagggggtgagcactgtgaaaggtgcattgctggtttccacggggacccacggctgccatatgggggccagtgccggccctgtccctgtcctgaaggccctgggagccaacggcactttgctacttcttgccaccaggatgaatattcccagcagattgtgtgccactgccgggcaggctatacggggctgcgatgtgaagcttgtgcccctgggcactttggggacccatcaaggccaggtggccggtgccaactgtgtgagtgcagtgggaacattgacccaatggatcctgatgcctgtgacccccacacggggcaatgcctgcgctgtttacaccacacagagggtccacactgtgcccactgcaagcctggcttccatgggcaggctgcccgacagagctgtcaccgctgcacatgcaacctgctgggcacaaatccgcagcagtgcccatctcctgaccagtgccactgtgatccaagcagtgggcagtgcccatgcctccccaatgtccagggccctagctgtgaccgctgtgcccccaacttctggaacctcaccagtggccatggttgccagccttgtgcctgccacccaagccgggccagaggccccacctgcaacgagttcacagggcagtgccactgccgtgccggctttggagggcggacttgttctgagtgccaagagctccactggggagaccctgggttgcagtgccatgcctgtgattgtgactctcgtggaatagatacacctcagtgtcaccgcttcacaggtcactgcagctgccgcccaggggtgtctggtgtgcgctgtgaccagtgtgcccgtggcttctcaggaatctttcctgcctgccatccctgccatgcatgcttcggggattgggaccgagtggtgcaggacttggcagcccgtacacagcgcctagagcagcgggcgcaggagttgcaacagacgggtgtgctgggtgcctttgagagcagcttctggcacatgcaggagaagctgggcattgtgcagggcatcgtaggtgcccgcaacacctcagccgcctccactgcacagcttgtggaggccacagaggagctgcggcgtgaaattggggaggccactgagcacctgactcagctcgaggcagacctgacagatgtgcaagatgagaacttcaatgccaaccatgcactaagtggtctggagcgagataggcttgcacttaatctcacactgcggcagctcgaccagcatcttgacttgctcaaacattcaaacttcctgggtgcctatgacagcatccggcatgcccatagccagtctgcagaggcagaacgtcgtgccaatacctcagccctggcagtacctagccctgtgagcaactcggcaagtgctcggcatcggacagaggcactgatggatgctcagaaggaggacttcaacagcaaacacatggccaaccagcgggcacttggcaagctctctgcccatacccacaccctgagcctgacagacataaatgagctggtgtgtggggcaccaggggatgcaccctgtgctacaagcccttgtgggggtgccggctgtcgagatgaggatgggcagccgcgctgtgggggcctcagctgcaatggggcagcggctacagcagacctagcactgggccgggcccggcacacacaggcagagctgcagcgggcactggcagaaggtggtagcatcctcagcagagtggctgagactcgtcggcaggcaagcgaggcacagcagcgggcccaggcagccctggacaaggctaatgcttccaggggacaggtggaacaggccaaccaggaacttcaagaacttatccagagtgtgaaggacttcctcaaccaggagggggctgatcctgatagcattgaaatggtggccacacgggtgctagagctctccatcccagcttcagctgagcagatccagcacctggcgggtgcgattgcagagcgagtccggagcctggcagatgtggatgcgatcctggcacgtactgtaggagatgtgcgtcgtgccgagcagctactgcaggatgcacggcgggcaaggagctgggctgaggatgagaaacagaaggcagagacagtacaggcagcactggaggaggcccagcgggcacagggtattgcccagggtgccatccggggggcagtggctgacacacgggacacagagcagaccctgtaccaggtacaggagaggatggcaggtgcagagcgggcactgagctctgcaggtgaaagggctcggcagttggatgctctcctggaggctctgaaattgaaacgggcaggaaatagtctggcagcctctacagcagaagaaacggcaggcagtgcccagggtcgtgcccaggaggctgagcagctgctacgcggtcctctgggtgatcagtaccagacggtgaaggccctagctgagcgcaaggcccaaggtgtgctggctgcacaggcaagggcagaacaactgcgggatgaggctcgggacctgttgcaagccgctcaggacaagctgcagcggctacaggaattggaaggcacctatgaggaaaatgagcgggcactggagagtaaggcagcccagttggacgggttggaggccaggatgcgcagcgtgcttcaagccatcaacttgcaggtgcagatctacaacacctgccagtgacccctgcccaaggcctaccccagttcctagcactgccccacatgcatgtctgcctatgcactgaagagctcttggcccggcagggcccccaataaaccagtgtgaaccccca

SEQ ID NO: 643033 - DNA, 243 bp, Homo sapiens
  misc_feature (238)..(238): n is a, c, g, or t
ttgggaaactttttgagggacatgacctccacaagtgggaaattcccacacctgacattatgtgatgggttgccatcaaaatttagtcaaaactttgtttcttgcacaaaatgattaaaaaatattctatagaagtaccttcaggctatgtgttatgaggtgtatatgaaacataaatgaatttgatgtttagacttgggtcccatcctcaggattatcttgctctatatatgcaatntactt

SEQ ID NO: 643034 - DNA, 5854 bp, Homo sapiens
  misc_feature (129)..(129): n is a, c, g, or t
gaaggcagtttccggagggaaggggtagggttggggtgggggcgctctccgcccggtgttgcgctccttcccagaatccgctccggcctttccttcctgccgcgattcccaactttgctcaaagtcgcnggactctaagctgtcggagggaccgctggacagacctgggaactgacagagggcctggagggaaacaggccaaagacccacaggcagagttgacacggaaccccaaagcaaggaggagggctcgggcccgagaccgttcacctccccttatccctgttcccctcttcaggatggagctgacctcaagggaaagagggaggggacagcctctgccctgggaacttcgactgggcctactgctaagcgtgctggctgccacactggcacaggcccctgccccggatgtgcctggctgttccaggggaagctgctaccccgccacgggcgacctgctggtgggccgagctgacagactgactgcctcatccacttgtggcctgaatggcccccagccctactgcatcgtcagtcacctgcaggacgaaaagaagtgcttcctttgtgactcccggcgccccttctctgctagagacaacccacacagccatcgcatccagaatgtagtcaccagctttgcaccacagcggcgggcagcctggtggcagtcagagaatggtatccctgcggtcaccatccagctggacctggaggctgagtttcatttcacacacctcattatgaccttcaagacatttcgccctgctgccatgctggtggaacgctcagcagactttggccgcacctggcatgtgtaccgatatttctcctatgactgtggggctgacttcccaggagtcccactagcacccccacggcactgggatgatgtagtctgtgagtcccgctactcagagattgagccatccactgaaggcgaggtcatctatcgtgtgctggaccctgccatccctatcccagacccctacagctcacggattcagaacctgttgaagatcaccaacctacgggtgaacctgactcgtctacacacgttgggagacaacctactcgacccacggagggagatccgagagaagtactactatgccctctatgagctggttgtacgtggcaactgcttctgctacggacacgcctcagagtgtgcacccgccccaggggcaccagcccatgctgagggcatggtgcacggagcttgcatctgcaaacacaacacacgtggcctcaactgcgagcagtgtcaggatttctatcgtgacctgccctggcgtccggctgaggacggccatagtcatgcctgtaggaagtgtgagtgccatgggcacacccacagctgccacttcgacatggccgtatacctggcatctggcaatgtgagtggaggtgtgtgtgatggatgtcagcataacacagctgggcgccactgtgagctctgtcggcccttcttctaccgtgacccaaccaaggacctgcgggatccggctgtgtgccgctcctgtgattgtgaccccatgggttctcaagacggtggtcgctgtgattcccatgatgaccctgcactgggactggtctccggccagtgtcgctgcaaagaacatgtggtgggcactcgctgccagcaatgccgtgatggcttctttgggctcagcatcagtgaccgtctgggctgccggcgatgtcaatgtaatgcacggggcacagtgcctgggagcactccttgtgaccccaacagtggatcctgttactgcaaacgtctagtgactggacgtggatgtgaccgctgcctgcctggccactggggcctgagccacgacctgctcggctgccgcccctgtgactgcgacgtgggtggtgctttggatccccagtgtgatgagggcacaggtcaatgccactgccgccagcacatggttgggcgacgctgtgagcaggtgcaacctggctacttccggcccttcctggaccacctaatttgggaggctgaggacacccgagggcaggtgctcgatgtggtggagcgcctggtgacccccggggaaactccatcctggactggctcaggcttcgtgcggctacaggaaggtcagaccctggagttcctggtggcctctgtgccgaaggctatggactatgacctgctgctgcgcttagagccccaggtccctgagcaatgggcagagttggaactgattgtgcagcgtccagggcctgtgcctgcccacagcctgtgtgggcatttggtgcccaaggatgatcgcatccaagggactctgcaaccacatgccaggtacttgatatttcctaatcctgtctgccttgagcctggtatctcctacaagctgcatctgaagctggtacggacagggggaagtgcccagcctgagactccctactctggacctggcctgctcattgactcgctggtgctgctgccccgtgtcctggtgctagagatgtttagtgggggtgatgctgctgccctggagcgccaggccacctttgaacgctaccaatgccatgaggagggtctggtgcccagcaagacttctccctctgaggcctgcgcacccctcctcatcagcctgtccaccctcatctacaatggtgccctgccatgtcagtgcaaccctcaaggttcactgagttctgagtgcaaccctcatggtggtcagtgcctgtgcaagcctggagtggttgggcgccgctgtgacctctgtgcccctggctactatggctttggccccacaggctgtcaagcctgccagtgcagccacgagggggcactcagcagtctctgtgaaaagaccagtgggcaatgtctctgtcgaactggtgcctttgggcttcgctgtgaccgctgccagcgtggccagtggggattccctagctgccggccatgtgtctgcaatgggcatgcagatgagtgcaacacccacacaggcgcttgcctgggctgccgtgatcacacagggggtgagcactgtgaaaggtgcattgctggtttccacggggacccacggctgccatatgggggccagtgccggccctgtccctgtcctgaaggccctgggagccaacggcactttgctacttcttgccaccaggatgaatattcccagcagattgtgtgccactgccgggcaggctatacggggctgcgatgtgaagcttgtgcccctgggcactttggggacccatcaaggccaggtggccggtgccaactgtgtgagtgcagtgggaacattgacccaatggatcctgatgcctgtgacccccacacggggcaatgcctgcgctgtttacaccacacagagggtccacactgtgcccactgcaagcctggcttccatgggcaggctgcccgacagagctgtcaccgctgcacatgcaacctgctgggcacaaatccgcagcagtgcccatctcctgaccagtgccactgtgatccaagcagtgggcagtgcccatgcctccccaatgtccagggccctagctgtgaccgctgtgcccccaacttctggaacctcaccagtggccatggttgccagccttgtgcctgccacccaagccgggccagaggccccacctgcaacgagttcacagggcagtgccactgccgtgccggctttggagggcggacttgttctgagtgccaagagctccactggggagaccctgggttgcagtgccatgcctgtgattgtgactctcgtggaatagatacacctcagtgtcaccgcttcacaggtcactgcagctgccgcccaggggtgtctggtgtgcgctgtgaccagtgtgcccgtggcttctcaggaatctttcctgcctgccatccctgccatgcatgcttcggggattgggaccgagtggtgcaggacttggcagcccgtacacagcgcctagagcagcgggcgcaggagttgcaacagacgggtgtgctgggtgcctttgagagcagcttctggcacatgcaggagaagctgggcattgtgcagggcatcgtaggtgcccgcaacacctcagccgcctccactgcacagcttgtggaggccacagaggagctgcggcgtgaaattggggaggccactgagcacctgactcagctcgaggcagacctgacagatgtgcaagatgagaacttcaatgccaaccatgcactaagtggtctggagcgagataggcttgcacttaatctcacactgcggcagctcgaccagcatcttgacttgctcaaacattcaaacttcctgggtgcctatgacagcatccggcatgcccatagccagtctgcagaggcagaacgtcgtgccaatacctcagccctggcagtacctagccctgtgagcaactcggcaagtgctcggcatcggacagaggcactgatggatgctcagaaggaggacttcaacagcaaacacatggccaaccagcgggcacttggcaagctctctgcccatacccacaccctgagcctgacagacataaatgagctggtgtgtggggcaccaggggatgcaccctgtgctacaagcccttgtgggggtgccggctgtcgagatgaggatgggcagccgcgctgtgggggcctcagctgcaatggggcagcggctacagcagacctagcactgggccgggcccggcacacacaggcagagctgcagcgggcactggcagaaggtggtagcatcctcagcagagtggctgagactcgtcggcaggcaagcgaggcacagcagcgggcccaggcagccctggacaaggctaatgcttccaggggacaggtggaacaggccaaccaggaacttcaagaacttatccagagtgtgaaggacttcctcaaccaggagggggctgatcctgatagcattgaaatggtggccacacgggtgctagagctctccatcccagcttcagctgagcagatccagcacctggcgggtgcgattgcagagcgagtccggagcctggcagatgtggatgcgatcctggcacgtactgtaggagatgtgcgtcgtgccgagcagctactgcaggatgcacggcgggcaaggagctgggctgaggatgagaaacagaaggcagagacagtacaggcagcactggaggaggcccagcgggcacagggtattgcccagggtgccatccggggggcagtggctgacacacgggacacagagcagaccctgtaccaggtacaggagaggatggcaggtgcagagcgggcactgagctctgcaggtgaaagggctcggcagttggatgctctcctggaggctctgaaattgaaacgggcaggaaatagtctggcagcctctacagcagaagaaacggcaggcagtgcccagggtcgtgcccaggaggctgagcagctgctacgcggtcctctgggtgatcagtaccagacggtgaaggccctagctgagcgcaaggcccaaggtgtgctggctgcacaggcaagggcagaacaactgcgggatgaggctcgggacctgttgcaagccgctcaggacaagctgcagcggctacaggaattggaaggcacctatgaggaaaatgagcgggcactggagagtaaggcagcccagttggacgggttggaggccaggatgcgcagcgtgcttcaagccatcaacttgcaggtgcagatctacaacacctgccagtgacccctgcccaaggcctaccccagttcctagcactgccccacatgcatgtctgcctatgcactgaagagctcttggcccggcagggcccccaataaaccagtgtgaacccccaaaaaaaaaccacaaaacgaaccaagggaacctcataacggaaccca

SEQ ID NO: 643035 - DNA, 5768 bp, Homo sapiens
  misc_feature (129)..(129): n is a, c, g, or t
gaaggcagtttccggagggaaggggtagggttggggtgggggcgctctccgcccggtgttgcgctccttcccagaatccgctccggcctttccttcctgccgcgattcccaactttgctcaaagtcgcnggactctaagctgtcggagggaccgctggacagacctgggaactgacagagggcctggagggaaacaggccaaagacccacaggatggagctgacctcaagggaaagagggaggggacagcctctgccctgggaacttcgactgggcctactgctaagcgtgctggctgccacactggcacaggcccctgccccggatgtgcctggctgttccaggggaagctgctaccccgccacgggcgacctgctggtgggccgagctgacagactgactgcctcatccacttgtggcctgaatggcccccagccctactgcatcgtcagtcacctgcaggacgaaaagaagtgcttcctttgtgactcccggcgccccttctctgctagagacaacccacacagccatcgcatccagaatgtagtcaccagctttgcaccacagcggcgggcagcctggtggcagtcagagaatggtatccctgcggtcaccatccagctggacctggaggctgagtttcatttcacacacctcattatgaccttcaagacatttcgccctgctgccatgctggtggaacgctcagcagactttggccgcacctggcatgtgtaccgatatttctcctatgactgtggggctgacttcccaggagtcccactagcacccccacggcactgggatgatgtagtctgtgagtcccgctactcagagattgagccatccactgaaggcgaggtcatctatcgtgtgctggaccctgccatccctatcccagacccctacagctcacggattcagaacctgttgaagatcaccaacctacgggtgaacctgactcgtctacacacgttgggagacaacctactcgacccacggagggagatccgagagaagtactactatgccctctatgagctggttgtacgtggcaactgcttctgctacggacacgcctcagagtgtgcacccgccccaggggcaccagcccatgctgagggcatggtgcacggagcttgcatctgcaaacacaacacacgtggcctcaactgcgagcagtgtcaggatttctatcgtgacctgccctggcgtccggctgaggacggccatagtcatgcctgtaggaagtgtgagtgccatgggcacacccacagctgccacttcgacatggccgtatacctggcatctggcaatgtgagtggaggtgtgtgtgatggatgtcagcataacacagctgggcgccactgtgagctctgtcggcccttcttctaccgtgacccaaccaaggacctgcgggatccggctgtgtgccgctcctgtgattgtgaccccatgggttctcaagacggtggtcgctgtgattcccatgatgaccctgcactgggactggtctccggccagtgtcgctgcaaagaacatgtggtgggcactcgctgccagcaatgccgtgatggcttctttgggctcagcatcagtgaccgtctgggctgccggcgatgtcaatgtaatgcacggggcacagtgcctgggagcactccttgtgaccccaacagtggatcctgttactgcaaacgtctagtgactggacgtggatgtgaccgctgcctgcctggccactggggcctgagccacgacctgctcggctgccgcccctgtgactgcgacgtgggtggtgctttggatccccagtgtgatgagggcacaggtcaatgccactgccgccagcacatggttgggcgacgctgtgagcaggtgcaacctggctacttccggcccttcctggaccacctaatttgggaggctgaggacacccgagggcaggtgctcgatgtggtggagcgcctggtgacccccggggaaactccatcctggactggctcaggcttcgtgcggctacaggaaggtcagaccctggagttcctggtggcctctgtgccgaaggctatggactatgacctgctgctgcgcttagagccccaggtccctgagcaatgggcagagttggaactgattgtgcagcgtccagggcctgtgcctgcccacagcctgtgtgggcatttggtgcccaaggatgatcgcatccaagggactctgcaaccacatgccaggtacttgatatttcctaatcctgtctgccttgagcctggtatctcctacaagctgcatctgaagctggtacggacagggggaagtgcccagcctgagactccctactctggacctggcctgctcattgactcgctggtgctgctgccccgtgtcctggtgctagagatgtttagtgggggtgatgctgctgccctggagcgccaggccacctttgaacgctaccaatgccatgaggagggtctggtgcccagcaagacttctccctctgaggcctgcgcacccctcctcatcagcctgtccaccctcatctacaatggtgccctgccatgtcagtgcaaccctcaaggttcactgagttctgagtgcaaccctcatggtggtcagtgcctgtgcaagcctggagtggttgggcgccgctgtgacctctgtgcccctggctactatggctttggccccacaggctgtcaagcctgccagtgcagccacgagggggcactcagcagtctctgtgaaaagaccagtgggcaatgtctctgtcgaactggtgcctttgggcttcgctgtgaccgctgccagcgtggccagtggggattccctagctgccggccatgtgtctgcaatgggcatgcagatgagtgcaacacccacacaggcgcttgcctgggctgccgtgatcacacagggggtgagcactgtgaaaggtgcattgctggtttccacggggacccacggctgccatatgggggccagtgccggccctgtccctgtcctgaaggccctgggagccaacggcactttgctacttcttgccaccaggatgaatattcccagcagattgtgtgccactgccgggcaggctatacggggctgcgatgtgaagcttgtgcccctgggcactttggggacccatcaaggccaggtggccggtgccaactgtgtgagtgcagtgggaacattgacccaatggatcctgatgcctgtgacccccacacggggcaatgcctgcgctgtttacaccacacagagggtccacactgtgcccactgcaagcctggcttccatgggcaggctgcccgacagagctgtcaccgctgcacatgcaacctgctgggcacaaatccgcagcagtgcccatctcctgaccagtgccactgtgatccaagcagtgggcagtgcccatgcctccccaatgtccagggccctagctgtgaccgctgtgcccccaacttctggaacctcaccagtggccatggttgccagccttgtgcctgccacccaagccgggccagaggccccacctgcaacgagttcacagggcagtgccactgccgtgccggctttggagggcggacttgttctgagtgccaagagctccactggggagaccctgggttgcagtgccatgcctgtgattgtgactctcgtggaatagatacacctcagtgtcaccgcttcacaggtcactgcagctgccgcccaggggtgtctggtgtgcgctgtgaccagtgtgcccgtggcttctcaggaatctttcctgcctgccatccctgccatgcatgcttcggggattgggaccgagtggtgcaggacttggcagcccgtacacagcgcctagagcagcgggcgcaggagttgcaacagacgggtgtgctgggtgcctttgagagcagcttctggcacatgcaggagaagctgggcattgtgcagggcatcgtaggtgcccgcaacacctcagccgcctccactgcacagcttgtggaggccacagaggagctgcggcgtgaaattggggaggccactgagcacctgactcagctcgaggcagacctgacagatgtgcaagatgagaacttcaatgccaaccatgcactaagtggtctggagcgagataggcttgcacttaatctcacactgcggcagctcgaccagcatcttgacttgctcaaacattcaaacttcctgggtgcctatgacagcatccggcatgcccatagccagtctgcagaggcagaacgtcgtgccaatacctcagccctggcagtacctagccctgtgagcaactcggcaagtgctcggcatcggacagaggcactgatggatgctcagaaggaggacttcaacagcaaacacatggccaaccagcgggcacttggcaagctctctgcccatacccacaccctgagcctgacagacataaatgagctggtgtgtggggcaccaggggatgcaccctgtgctacaagcccttgtgggggtgccggctgtcgagatgaggatgggcagccgcgctgtgggggcctcagctgcaatggggcagcggctacagcagacctagcactgggccgggcccggcacacacaggcagagctgcagcgggcactggcagaaggtggtagcatcctcagcagagtggctgagactcgtcggcaggcaagcgaggcacagcagcgggcccaggcagccctggacaaggctaatgcttccaggggacaggtggaacaggccaaccaggaacttcaagaacttatccagagtgtgaaggacttcctcaaccaggagggggctgatcctgatagcattgaaatggtggccacacgggtgctagagctctccatcccagcttcagctgagcagatccagcacctggcgggtgcgattgcagagcgagtccggagcctggcagatgtggatgcgatcctggcacgtactgtaggagatgtgcgtcgtgccgagcagctactgcaggatgcacggcgggcaaggagctgggctgaggatgagaaacagaaggcagagacagtacaggcagcactggaggaggcccagcgggcacagggtattgcccagggtgccatccggggggcagtggctgacacacgggacacagagcagaccctgtaccaggtacaggagaggatggcaggtgcagagcgggcactgagctctgcaggtgaaagggctcggcagttggatgctctcctggaggctctgaaattgaaacgggcaggaaatagtctggcagcctctacagcagaagaaacggcaggcagtgcccagggtcgtgcccaggaggctgagcagctgctacgcggtcctctgggtgatcagtaccagacggtgaaggccctagctgagcgcaaggcccaaggtgtgctggctgcacaggcaagggcagaacaactgcgggatgaggctcgggacctgttgcaagccgctcaggacaagctgcagcggctacaggaattggaaggcacctatgaggaaaatgagcgggcactggagagtaaggcagcccagttggacgggttggaggccaggatgcgcagcgtgcttcaagccatcaacttgcaggtgcagatctacaacacctgccagtgacccctgcccaaggcctaccccagttcctagcactgccccacatgcatgtctgcctatgcactgaagagctcttggcccggcagggcccccaataaaccagtgtgaacccccaaaaaaaaaccacaaaacgaaccaagggaacctcataacggaaccca

SEQ ID NO: 643036 - DNA, 509 bp, Homo sapiens
tgcgcagcgtgcttcaagccatcaacttgcaggtgcagatctacaacacctgccagtgacccctgcccaagggcagtggctgacacacgggacacagagcagaccctgtaccaggtacaggagaggatggcaggtgcagagcgggcactgagctctgcaggtgaaagggctcggcagttggatgctctcctggaggctctgaaattgaaacgggcaggaaatagtctggcagcctctacagcagaagaaacggcaggcagtgcccagggtcgtgcccaggaggctgagcagctgctacgcggtcctctgggtgatcagtaccagacggtgaaggccctagctgagcgcaaggcccaaggtgtgctggctgcacaggcaagggcagaacaactgcgggatgaggctcgggacctgttgcaagccgctcaggacaagctgcagcggctacaggaattggaaggcacctagaggcaacagcacagcaggcctccgccctgcctggccacagg

SEQ ID NO: 643037 - DNA, 749 bp, Homo sapiens
ggtcccaggtaacgcagcgagctggatcccctactctgcgggcggcgcgaggcgtctggctcttcgcggcggcggtcgaggggacacggggagcgcggtggcgctgggatggcaatcgaggagtgaggagccagggaggggcgtcgggggagcagggacctaaggtgaaaggcggtccggggcgggaatctcgacgcagggtttggtacgttttcgcgcgagcacgtttgtggacatgatggcagccatgtcgtgacacgtgtccattgcccattatgagcacttatgattcatccatgcaagacattaatagcttcttcgcgaacccaattctgactctcacataacgaaaccgagacctgataccagatccgacatggcctgagggtgtccttgacggtgcagttcggaagtgcttccaccgcgtgtgacttcatcttcaacatgtcctgtgaactgaccatgggcgtgccattcacagaggcaatatctctggtgcacgccggaccatcccgaagctaaaacgtactcttaccttaggtgcgcataaggcttactgccaggaagtaattagtatgtcagataaacggaggctgagggggcaatccggagacgcgatcatcttcactctcctctccactggcgataaatgtatgcgcgggagacgctcagtagtgggtgaatcgtggtaaccaggtttgtgtcggccccacctccgtgtgggtgatatcttatgcggcgagtggatt

SEQ ID NO: 643038 - DNA, 6141 bp, Homo sapiens
  misc_feature (129)..(129): n is a, c, g, or t
gaaggcagtttccggagggaaggggtagggttggggtgggggcgctctccgcccggtgttgcgctccttcccagaatccgctccggcctttccttcctgccgcgattcccaactttgctcaaagtcgcnggactctaagctgtcggagggaccgctggacagacctgggaactgacagagggcctggagggaaacaggccaaagacccacaggcagagttgacacggaaccccaaagcaaggaggagggctcgggcccgagaccgttcacctccccttatccctgttcccctcttcaggatggagctgacctcaagggaaagagggaggggacagcctctgccctgggaacttcgactgggcctactgctaagcgtgctggctgccacactggcacaggcccctgccccggatgtgcctggctgttccaggggaagctgctaccccgccacgggcgacctgctggtgggccgagctgacagactgactgcctcatccacttgtggcctgaatggcccccagccctactgcatcgtcagtcacctgcaggacgaaaagaagtgcttcctttgtgactcccggcgccccttctctgctagagacaacccacacagccatcgcatccagaatgtagtcaccagctttgcaccacagcggcgggcagcctggtggcagtcagagaatggtatccctgcggtcaccatccagctggacctggaggctgagtttcatttcacacacctcattatgaccttcaagacatttcgccctgctgccatgctggtggaacgctcagcagactttggccgcacctggcatgtgtaccgatatttctcctatgactgtggggctgacttcccaggagtcccactagcacccccacggcactgggatgatgtagtctgtgagtcccgctactcagagattgagccatccactgaaggcgaggtcatctatcgtgtgctggaccctgccatccctatcccagacccctacagctcacggattcagaacctgttgaagatcaccaacctacgggtgaacctgactcgtctacacacgttgggagacaacctactcgacccacggagggagatccgagagaagtactactatgccctctatgagctggttgtacgtggcaactgcttctgctacggacacgcctcagagtgtgcacccgccccaggggcaccagcccatgctgagggcatggtgcacggagcttgcatctgcaaacacaacacacgtggcctcaactgcgagcagtgtcaggatttctatcgtgacctgccctggcgtccggctgaggacggccatagtcatgcctgtaggaagtgtgagtgccatgggcacacccacagctgccacttcgacatggccgtatacctggcatctggcaatgtgagtggaggtgtgtgtgatggatgtcagcataacacagctgggcgccactgtgagctctgtcggcccttcttctaccgtgacccaaccaaggacctgcgggatccggctgtgtgccgctcctgtgattgtgaccccatgggttctcaagacggtggtcgctgtgattcccatgatgaccctgcactgggactggtctccggccagtgtcgctgcaaagaacatgtggtgggcactcgctgccagcaatgccgtgatggcttctttgggctcagcatcagtgaccgtctgggctgccggcgatgtcaatgtaatgcacggggcacagtgcctgggagcactccttgtgaccccaacagtggatcctgttactgcaaacgtctagtgactggacgtggatgtgaccgctgcctgcctggccactggggcctgagccacgacctgctcggctgccgcccctgtgactgcgacgtgggtggtgctttggatccccagtgtgatgagggcacaggtcaatgccactgccgccagcacatggttgggcgacgctgtgagcaggtgcaacctggctacttccggcccttcctggaccacctaatttgggaggctgaggacacccgagggcaggtgctcgatgtggtggagcgcctggtgacccccggggaaactccatcctggactggctcaggcttcgtgcggctacaggaaggtcagaccctggagttcctggtggcctctgtgccgaaggctatggactatgacctgctgctgcgcttagagccccaggtccctgagcaatgggcagagttggaactgattgtgcagcgtccagggcctgtgcctgcccacagcctgtgtgggcatttggtgcccaaggatgatcgcatccaagggactctgcaaccacatgccaggtacttgatatttcctaatcctgtctgccttgagcctggtatctcctacaagctgcatctgaagctggtacggacagggggaagtgcccagcctgagactccctactctggacctggcctgctcattgactcgctggtgctgctgccccgtgtcctggtgctagagatgtttagtgggggtgatgctgctgccctggagcgccaggccacctttgaacgctaccaatgccatgaggagggtctggtgcccagcaagacttctccctctgaggcctgcgcacccctcctcatcagcctgtccaccctcatctacaatggtgccctgccatgtcagtgcaaccctcaaggttcactgagttctgagtgcaaccctcatggtggtcagtgcctgtgcaagcctggagtggttgggcgccgctgtgacctctgtgcccctggctactatggctttggccccacaggctgtcaagcctgccagtgcagccacgagggggcactcagcagtctctgtgaaaagaccagtgggcaatgtctctgtcgaactggtgcctttgggcttcgctgtgaccgctgccagcgtggccagtggggattccctagctgccggccatgtgtctgcaatgggcatgcagatgagtgcaacacccacacaggcgcttgcctgggctgccgtgatcacacagggggtgagcactgtgaaaggtgcattgctggtttccacggggacccacggctgccatatgggggccagtgccggccctgtccctgtcctgaaggccctgggagccaacggcactttgctacttcttgccaccaggatgaatattcccagcagattgtgtgccactgccgggcaggctatacggggctgcgatgtgaagcttgtgcccctgggcactttggggacccatcaaggccaggtggccggtgccaactgtgtgagtgcagtgggaacattgacccaatggatcctgatgcctgtgacccccacacggggcaatgcctgcgctgtttacaccacacagagggtccacactgtgcccactgcaagcctggcttccatgggcaggctgcccgacagagctgtcaccgctgcacatgcaacctgctgggcacaaatccgcagcagtgcccatctcctgaccagtgccactgtgatccaagcagtgggcagtgcccatgcctccccaatgtccagggccctagctgtgaccgctgtgcccccaacttctggaacctcaccagtggccatggttgccagccttgtgcctgccacccaagccgggccagaggccccacctgcaacgagttcacagggcagtgccactgccgtgccggctttggagggcggacttgttctgagtgccaagagctccactggggagaccctgggttgcagtgccatgcctgtgattgtgactctcgtggaatagatacacctcagtgtcaccgcttcacaggtcactgcagctgccgcccaggggtgtctggtgtgcgctgtgaccagtgtgcccgtggcttctcaggaatctttcctgcctgccatccctgccatgcatgcttcggggattgggaccgagtggtgcaggacttggcagcccgtacacagcgcctagagcagcgggcgcaggagttgcaacagacgggtgtgctgggtgcctttgagagcagcttctggcacatgcaggagaagctgggcattgtgcagggcatcgtaggtgcccgcaacacctcagccgcctccactgcacagcttgtggaggccacagaggagctgcggcgtgaaattggggaggccactgagcacctgactcagctcgaggcagacctgacagatgtgcaagatgagaacttcaatgccaaccatgcactaagtggtctggagcgagataggcttgcacttaatctcacactgcggcagctcgaccagcatcttgacttgctcaaacattcaaacttcctgggtgcctatgacagcatccggcatgcccatagccagtctgcagaggcagaacgtcgtgccaatacctcagccctggcagtacctagccctgtgagcaactcggcaagtgctcggcatcggacagaggcactgatggatgctcagaaggaggacttcaacagcaaacacatggccaaccagcgggcacttggcaagctctctgcccatacccacaccctgagcctgacagacataaatgagctggtgtgtggggcaccaggggatgcaccctgtgctacaagcccttgtgggggtgccggctgtcgagatgaggatgggcagccgcgctgtgggggcctcagctgcaatggggcagcggctacagcagacctagcactgggccgggcccggcacacacaggcagagctgcagcgggcactggcagaaggtggtagcatcctcagcagagtggctgagactcgtcggcaggcaagcgaggcacagcagcgggcccaggcagccctggacaaggctaatgcttccaggggacaggtggaacaggccaaccaggaacttcaagaacttatccagagtgtgaaggacttcctcaaccgtgagcctcccacgtgtcccaggccatgtggttgtcccctttggcaactcccggtgtctgtatctcccttggttcatacttgagcctcagggactacactggattagtgtttatgatcccttgactggctcctgagttattgcccatatgtggtcccaggtccatgttcttgagtctgagccccttgtatagtccctgtccttgtgattatatccttatgcctggtaacaaacccctatcccatgtacatgtcctgagtccataccccaaaactgtatcctcatgcccatgctggagaatctatgttcttaagttcttgctgtgtccctatagaggagggggctgatcctgatagcattgaaatggtggccacacgggtgctagagctctccatcccagcttcagctgagcagatccagcacctggcgggtgcgattgcagagcgagtccggagcctggcagatgtggatgcgatcctggcacgtactgtaggagatgtgcgtcgtgccgagcagctactgcaggatgcacggcgggcaaggagctgggctgaggatgagaaacagaaggcagagacagtacaggcagcactggaggaggcccagcgggcacagggtattgcccagggtgccatccggggggcagtggctgacacacgggacacagagcagaccctgtaccaggtacaggagaggatggcaggtgcagagcgggcactgagctctgcaggtgaaagggctcggcagttggatgctctcctggaggctctgaaattgaaacgggcaggaaatagtctggcagcctctacagcagaagaaacggcaggcagtgcccagggtcgtgcccaggaggctgagcagctgctacgcggtcctctgggtgatcagtaccagacggtgaaggccctagctgagcgcaaggcccaaggtgtgctggctgcacaggcaagggcagaacaactgcgggatgaggctcgggacctgttgcaagccgctcaggacaagctgcagcggctacaggaattggaaggcacctatgaggaaaatgagcgggcactggagagtaaggcagcccagttggacgggttggaggccaggatgcgcagcgtgcttcaagccatcaacttgcaggtgcagatctacaacacctgccagtgacccctgcccaaggcctaccccagttcctagcactgccccacatgcatgtctgcctatgcactgaagagctcttggcccggcagggcccccaataaaccagtgtgaaccccca

SEQ ID NO: 643039 - DNA, 110 bp, Homo sapiens
tcctcggagcaggctggagtaaagggcccttgagcaagccagtttgccgccattatttatattccacacgtcctgttttatccgcccgtgcaacttttagtttaaccgtt

SEQ ID NO: 643040 - DNA, 3994 bp, Homo sapiens
ttgtaggagataccaggctcaaggcagacaggattaggaaatatcaagtacctggcatgtggttgcagagtcccttggatgcgatcatccttgggcacaggtcaatgccactgccgccagcacatggttgggcgacgctgtgagcaggtgcaacctggctacttccggcccttcctggaccacctaatttgggaggctgaggacacccgagggcaggtgctcgatgtggtggagcgcctggtgacccccggggaaactccatcctggactggctcaggcttcgtgcggctacaggaaggtcagaccctggagttcctggtggcctctgtgccgaaggctatggactatgacctgctgctgcgcttagagccccaggtccctgagcaatgggcagagttggaactgattgtgcagcgtccagggcctgtgcctgcccacagcctgtgtgggcatttggtgcccaaggatgatcgcatccaagggactctgcaaccacatgccaggtacttgatatttcctaatcctgtctgccttgagcctggtatctcctacaagctgcatctgaagctggtacggacagggggaagtgcccagcctgagactccctactctggacctggcctgctcattgactcgctggtgctgctgccccgtgtcctggtgctagagatgtttagtgggggtgatgctgctgccctggagcgccaggccacctttgaacgctaccaatgccatgaggagggtctggtgcccagcaagacttctccctctgaggcctgcgcacccctcctcatcagcctgtccaccctcatctacaatggtgccctgccatgtcagtgcaaccctcaaggttcactgagttctgagtgcaaccctcatggtggtcagtgcctgtgcaagcctggagtggttgggcgccgctgtgacctctgtgcccctggctactatggctttggccccacaggctgtcaagcctgccagtgcagccacgagggggcactcagcagtctctgtgaaaagaccagtgggcaatgtctctgtcgaactggtgcctttgggcttcgctgtgaccgctgccagcgtggccagtggggattccctagctgccggccatgtgtctgcaatgggcatgcagatgagtgcaacacccacacaggcgcttgcctgggctgccgtgatcacacagggggtgagcactgtgaaaggtgcattgctggtttccacggggacccacggctgccatatgggggccagtgccggccctgtccctgtcctgaaggccctgggagccaacggcactttgctacttcttgccaccaggatgaatattcccagcagattgtgtgccactgccgggcaggctatacggggctgcgatgtgaagcttgtgcccctgggcactttggggacccatcaaggccaggtggccggtgccaactgtgtgagtgcagtgggaacattgacccaatggatcctgatgcctgtgacccccacacggggcaatgcctgcgctgtttacaccacacagagggtccacactgtgcccactgcaagcctggcttccatgggcaggctgcccgacagagctgtcaccgctgcacatgcaacctgctgggcacaaatccgcagcagtgcccatctcctgaccagtgccactgtgatccaagcagtgggcagtgcccatgcctccccaatgtccagggccctagctgtgaccgctgtgcccccaacttctggaacctcaccagtggccatggttgccagccttgtgcctgccacccaagccgggccagaggccccacctgcaacgagttcacagggcagtgccactgccgtgccggctttggagggcggacttgttctgagtgccaagagctccactggggagaccctgggttgcagtgccatgcctgtgattgtgactctcgtggaatagatacacctcagtgtcaccgcttcacaggtcactgcagctgccgcccaggggtgtctggtgtgcgctgtgaccagtgtgcccgtggcttctcaggaatctttcctgcctgccatccctgccatgcatgcttcggggattgggaccgagtggtgcaggacttggcagcccgtacacagcgcctagagcagcgggcgcaggagttgcaacagacgggtgtgctgggtgcctttgagagcagcttctggcacatgcaggagaagctgggcattgtgcagggcatcgtaggtgcccgcaacacctcagccgcctccactgcacagcttgtggaggccacagaggagctgcggcgtgaaattggggaggccactgagcacctgactcagctcgaggcagacctgacagatgtgcaagatgagaacttcaatgccaaccatgcactaagtggtctggagcgagataggcttgcacttaatctcacactgcggcagctcgaccagcatcttgacttgctcaaacattcaaacttcctgggtgcctatgacagcatccggcatgcccatagccagtctgcagaggcagaacgtcgtgccaatacctcagccctggcagtacctagccctgtgagcaactcggcaagtgctcggcatcggacagaggcactgatggatgctcagaaggaggacttcaacagcaaacacatggccaaccagcgggcacttggcaagctctctgcccatacccacaccctgagcctgacagacataaatgagctggtgtgtggggcaccaggggatgcaccctgtgctacaagcccttgtgggggtgccggctgtcgagatgaggatgggcagccgcgctgtgggggcctcagctgcaatggggcagcggctacagcagacctagcactgggccgggcccggcacacacaggcagagctgcagcgggcactggcagaaggtggtagcatcctcagcagagtggctgagactcgtcggcaggcaagcgaggcacagcagcgggcccaggcagccctggacaaggctaatgcttccaggggacaggtggaacaggccaaccaggaacttcaagaacttatccagagtgtgaaggacttcctcaaccaggagggggctgatcctgatagcattgaaatggtggccacacgggtgctagagctctccatcccagcttcagctgagcagatccagcacctggcgggtgcgattgcagagcgagtccggagcctggcagatgtggatgcgatcctggcacgtactgtaggagatgtgcgtcgtgccgagcagctactgcaggatgcacggcgggcaaggagctgggctgaggatgagaaacagaaggcagagacagtacaggcagcactggaggaggcccagcgggcacagggtattgcccagggtgccatccggggggcagtggctgacacacgggacacagagcagaccctgtaccaggtacaggagaggatggcaggtgcagagcgggcactgagctctgcaggtgaaagggctcggcagttggatgctctcctggaggctctgaaattgaaacgggcaggaaatagtctggcagcctctacagcagaagaaacggcaggcagtgcccagggtcgtgcccaggaggctgagcagctgctacgcggtcctctgggtgatcagtaccagacggtgaaggccctagctgagcgcaaggcccaaggtgtgctggctgcacaggcaagggcagaacaactgcgggatgaggctcgggacctgttgcaagccgctcaggacaagctgcagcggctacaggaattggaaggcacctatgaggaaaatgagcgggcactggagagtaaggcagcccagttggacgggttggaggccaggatgcgcagcgtgcttcaagccatcaacttgcaggtgcagatctacaacacctgccagtgacccctgcccaaggcctaccccagttcctagcactgccccacatgcatgtctgcctatgcactgaagagctcttggcccggcagggcccccaataaaccagtgtgaaccccca

SEQ ID NO: 643041 - DNA, 6220 bp, Homo sapiens
  misc_feature (129)..(129): n is a, c, g, or t
gaaggcagtttccggagggaaggggtagggttggggtgggggcgctctccgcccggtgttgcgctccttcccagaatccgctccggcctttccttcctgccgcgattcccaactttgctcaaagtcgcnggactctaagctgtcggagggaccgctggacagacctgggaactgacagagggcctggagggaaacaggccaaagacccacaggcagagttgacacggaaccccaaagcaaggaggagggctcgggcccgagaccgttcacctccccttatccctgttcccctcttcaggatggagctgacctcaagggaaagagggaggggacagcctctgccctgggaacttcgactgggcctactgctaagcgtgctggctgccacactggcacaggcccctgccccggatgtgcctggctgttccaggggaagctgctaccccgccacgggcgacctgctggtgggccgagctgacagactgactgcctcatccacttgtggcctgaatggcccccagccctactgcatcgtcagtcacctgcaggacgaaaagaagtgcttcctttgtgactcccggcgccccttctctgctagagacaacccacacagccatcgcatccagaatgtagtcaccagctttgcaccacagcggcgggcagcctggtggcagtcagagaatggtatccctgcggtcaccatccagctggacctggaggctgagtttcatttcacacacctcattatgaccttcaagacatttcgccctgctgccatgctggtggaacgctcagcagactttggccgcacctggcatgtgtaccgatatttctcctatgactgtggggctgacttcccaggagtcccactagcacccccacggcactgggatgatgtagtctgtgagtcccgctactcagagattgagccatccactgaaggcgaggtcatctatcgtgtgctggaccctgccatccctatcccagacccctacagctcacggattcagaacctgttgaagatcaccaacctacgggtgaacctgactcgtctacacacgttgggagacaacctactcgacccacggagggagatccgagagaagtactactatgccctctatgagctggttgtacgtggcaactgcttctgctacggacacgcctcagagtgtgcacccgccccaggggcaccagcccatgctgagggcatggtgcacggagcttgcatctgcaaacacaacacacgtggcctcaactgcgagcagtgtcaggatttctatcgtgacctgccctggcgtccggctgaggacggccatagtcatgcctgtaggaagtgtgagtgccatgggcacacccacagctgccacttcgacatggccgtatacctggcatctggcaatgtgagtggaggtgtgtgtgatggatgtcagcataacacagctgggcgccactgtgagctctgtcggcccttcttctaccgtgacccaaccaaggacctgcgggatccggctgtgtgccgctcctgtgattgtgaccccatgggttctcaagacggtggtcgctgtgattcccatgatgaccctgcactgggactggtctccggccagtgtcgctgcaaagaacatgtggtgggcactcgctgccagcaatgccgtgatggcttctttgggctcagcatcagtgaccgtctgggctgccggcgatgtcaatgtaatgcacggggcacagtgcctgggagcactccttgtgaccccaacagtggatcctgttactgcaaacgtctagtgactggacgtggatgtgaccgctgcctgcctggccactggggcctgagccacgacctgctcggctgccgcccctgtgactgcgacgtgggtggtgctttggatccccagtgtgatgagggcacaggtcaatgccactgccgccagcacatggttgggcgacgctgtgagcaggtgcaacctggctacttccggcccttcctggaccacctaatttgggaggctgaggacacccgagggcaggtgctcgatgtggtggagcgcctggtgacccccggggaaactccatcctggactggctcaggcttcgtgcggctacaggaaggtcagaccctggagttcctggtggcctctgtgccgaaggctatggactatgacctgctgctgcgcttagagccccaggtccctgagcaatgggcagagttggaactgattgtgcagcgtccagggcctgtgcctgcccacagcctgtgtgggcatttggtgcccaaggatgatcgcatccaagggactctgcaaccacatgccaggtacttgatatttcctaatcctgtctgccttgagcctggtatctcctacaagctgcatctgaagctggtacggacagggggaagtgcccagcctgagactccctactctggacctggcctgctcattgactcgctggtgctgctgccccgtgtcctggtgctagagatgtttagtgggggtgatgctgctgccctggagcgccaggccacctttgaacgctaccaatgccatgaggagggtctggtgcccagcaagacttctccctctgaggcctgcgcacccctcctcatcagcctgtccaccctcatctacaatggtgccctgccatgtcagtgcaaccctcaaggttcactgagttctgagtgcaaccctcatggtggtcagtgcctgtgcaagcctggagtggttgggcgccgctgtgacctctgtgcccctggctactatggctttggccccacaggctgtcaagcctgccagtgcagccacgagggggcactcagcagtctctgtgaaaagaccagtgggcaatgtctctgtcgaactggtgcctttgggcttcgctgtgaccgctgccagcgtggccagtggggattccctagctgccggccatgtgtctgcaatgggcatgcagatgagtgcaacacccacacaggcgcttgcctgggctgccgtgatcacacagggggtgagcactgtgaaaggtgcattgctggtttccacggggacccacggctgccatatgggggccagtgccggccctgtccctgtcctgaaggccctgggagccaacggcactttgctacttcttgccaccaggatgaatattcccagcagattgtgtgccactgccgggcaggctatacggggctgcgatgtgaagcttgtgcccctgggcactttggggacccatcaaggccaggtggccggtgccaactgtgtgagtgcagtgggaacattgacccaatggatcctgatgcctgtgacccccacacggggcaatgcctgcgctgtttacaccacacagagggtccacactgtgcccactgcaagcctggcttccatgggcaggctgcccgacagagctgtcaccgctgcacatgcaacctgctgggcacaaatccgcagcagtgcccatctcctgaccagtgccactgtgatccaagcagtgggcagtgcccatgcctccccaatgtccagggccctagctgtgaccgctgtgcccccaacttctggaacctcaccagtggccatggttgccagccttgtgcctgccacccaagccgggccagaggccccacctgcaacgagttcacagggcagtgccactgccgtgccggctttggagggcggacttgttctgagtgccaagagctccactggggagaccctgggttgcagtgccatgcctgtgattgtgactctcgtggaatagatacacctcagtgtcaccgcttcacaggtcactgcagctgccgcccaggggtgtctggtgtgcgctgtgaccagtgtgcccgtggcttctcaggaatctttcctgcctgccatccctgccatgcatgcttcggggattgggaccgagtggtgcaggacttggcagcccgtacacagcgcctagagcagcgggcgcaggagttgcaacagacgggtgtgctgggtgcctttgagagcagcttctggcacatgcaggagaagctgggcattgtgcagggcatcgtaggtgcccgcaacacctcagccgcctccactgcacagcttgtggaggccacagaggagctgcggcgtgaaattggggaggccactgagcacctgactcagctcgaggcagacctgacagatgtgcaagatgagaacttcaatgccaaccatgcactaagtggtctggagcgagataggcttgcacttaatctcacactgcggcagctcgaccagcatcttgacttgctcaaacattcaaacttcctgggtgcctatgacagcatccggcatgcccatagccagtctgcagaggcagaacgtcgtgccaatacctcagccctggcagtacctagccctgtgagcaactcggcaagtgctcggcatcggacagaggcactgatggatgctcagaaggaggacttcaacagcaaacacatggccaaccagcgggcacttggcaagctctctgcccatacccacaccctgagcctgacagacataaatgagctggtgaggttgaagtgttgggtggggcaggtgggtgtagatgttcctctcacagggccctgacttgttctgtgcctggcaggtgtgtggggcaccaggggatgcaccctgtgctacaagcccttgtgggggtgccggctgtcgagatgaggatgggcagccgcgctgtgggggcctcagctgcaatggggcagcggctacagcagacctagcactgggccgggcccggcacacacaggcagagctgcagcgggcactggcagaaggtggtagcatcctcagcagagtggctgagactcgtcggcaggcaagcgaggcacagcagcgggcccaggcagccctggacaaggctaatgcttccaggggacaggtggaacaggccaaccaggaacttcaagaacttatccagagtgtgaaggacttcctcaaccgtgagcctcccacgtgtcccaggccatgtggttgtcccctttggcaactcccggtgtctgtatctcccttggttcatacttgagcctcagggactacactggattagtgtttatgatcccttgactggctcctgagttattgcccatatgtggtcccaggtccatgttcttgagtctgagccccttgtatagtccctgtccttgtgattatatccttatgcctggtaacaaacccctatcccatgtacatgtcctgagtccataccccaaaactgtatcctcatgcccatgctggagaatctatgttcttaagttcttgctgtgtccctatagaggagggggctgatcctgatagcattgaaatggtggccacacgggtgctagagctctccatcccagcttcagctgagcagatccagcacctggcgggtgcgattgcagagcgagtccggagcctggcagatgtggatgcgatcctggcacgtactgtaggagatgtgcgtcgtgccgagcagctactgcaggatgcacggcgggcaaggagctgggctgaggatgagaaacagaaggcagagacagtacaggcagcactggaggaggcccagcgggcacagggtattgcccagggtgccatccggggggcagtggctgacacacgggacacagagcagaccctgtaccaggtacaggagaggatggcaggtgcagagcgggcactgagctctgcaggtgaaagggctcggcagttggatgctctcctggaggctctgaaattgaaacgggcaggaaatagtctggcagcctctacagcagaagaaacggcaggcagtgcccagggtcgtgcccaggaggctgagcagctgctacgcggtcctctgggtgatcagtaccagacggtgaaggccctagctgagcgcaaggcccaaggtgtgctggctgcacaggcaagggcagaacaactgcgggatgaggctcgggacctgttgcaagccgctcaggacaagctgcagcggctacaggaattggaaggcacctatgaggaaaatgagcgggcactggagagtaaggcagcccagttggacgggttggaggccaggatgcgcagcgtgcttcaagccatcaacttgcaggtgcagatctacaacacctgccagtgacccctgcccaaggcctaccccagttcctagcactgccccacatgcatgtctgcctatgcactgaagagctcttggcccggcagggcccccaataaaccagtgtgaaccccca

SEQ ID NO: 643042 - DNA, 3246 bp, Homo sapiens
caccttggccgcgttgtcctcttcaaagtcctcatccacctccagccgatggaccaccccactggtgatcgtggggttgcttacaaccccacgatcaccaaggttcactgagttctgagtgcaaccctcatggtggtcagtgcctgtgcaagcctggagtggttgggcgccgctgtgacctctgtgcccctggctactatggctttggccccacaggctgtcaagcctgccagtgcagccacgagggggcactcagcagtctctgtgaaaagaccagtgggcaatgtctctgtcgaactggtgcctttgggcttcgctgtgaccgctgccagcgtggccagtggggattccctagctgccggccatgtgtctgcaatgggcatgcagatgagtgcaacacccacacaggcgcttgcctgggctgccgtgatcacacagggggtgagcactgtgaaaggtgcattgctggtttccacggggacccacggctgccatatgggggccagtgccggccctgtccctgtcctgaaggccctgggagccaacggcactttgctacttcttgccaccaggatgaatattcccagcagattgtgtgccactgccgggcaggctatacggggctgcgatgtgaagcttgtgcccctgggcactttggggacccatcaaggccaggtggccggtgccaactgtgtgagtgcagtgggaacattgacccaatggatcctgatgcctgtgacccccacacggggcaatgcctgcgctgtttacaccacacagagggtccacactgtgcccactgcaagcctggcttccatgggcaggctgcccgacagagctgtcaccgctgcacatgcaacctgctgggcacaaatccgcagcagtgcccatctcctgaccagtgccactgtgatccaagcagtgggcagtgcccatgcctccccaatgtccagggccctagctgtgaccgctgtgcccccaacttctggaacctcaccagtggccatggttgccagccttgtgcctgccacccaagccgggccagaggccccacctgcaacgagttcacagggcagtgccactgccgtgccggctttggagggcggacttgttctgagtgccaagagctccactggggagaccctgggttgcagtgccatgcctgtgattgtgactctcgtggaatagatacacctcagtgtcaccgcttcacaggtcactgcagctgccgcccaggggtgtctggtgtgcgctgtgaccagtgtgcccgtggcttctcaggaatctttcctgcctgccatccctgccatgcatgcttcggggattgggaccgagtggtgcaggacttggcagcccgtacacagcgcctagagcagcgggcgcaggagttgcaacagacgggtgtgctgggtgcctttgagagcagcttctggcacatgcaggagaagctgggcattgtgcagggcatcgtaggtgcccgcaacacctcagccgcctccactgcacagcttgtggaggccacagaggagctgcggcgtgaaattggggaggccactgagcacctgactcagctcgaggcagacctgacagatgtgcaagatgagaacttcaatgccaaccatgcactaagtggtctggagcgagataggcttgcacttaatctcacactgcggcagctcgaccagcatcttgacttgctcaaacattcaaacttcctgggtgcctatgacagcatccggcatgcccatagccagtctgcagaggcagaacgtcgtgccaatacctcagccctggcagtacctagccctgtgagcaactcggcaagtgctcggcatcggacagaggcactgatggatgctcagaaggaggacttcaacagcaaacacatggccaaccagcgggcacttggcaagctctctgcccatacccacaccctgagcctgacagacataaatgagctggtgtgtggggcaccaggggatgcaccctgtgctacaagcccttgtgggggtgccggctgtcgagatgaggatgggcagccgcgctgtgggggcctcagctgcaatggggcagcggctacagcagacctagcactgggccgggcccggcacacacaggcagagctgcagcgggcactggcagaaggtggtagcatcctcagcagagtggctgagactcgtcggcaggcaagcgaggcacagcagcgggcccaggcagccctggacaaggctaatgcttccaggggacaggtggaacaggccaaccaggaacttcaagaacttatccagagtgtgaaggacttcctcaaccaggagggggctgatcctgatagcattgaaatggtggccacacgggtgctagagctctccatcccagcttcagctgagcagatccagcacctggcgggtgcgattgcagagcgagtccggagcctggcagatgtggatgcgatcctggcacgtactgtaggagatgtgcgtcgtgccgagcagctactgcaggatgcacggcgggcaaggagctgggctgaggatgagaaacagaaggcagagacagtacaggcagcactggaggaggcccagcgggcacagggtattgcccagggtgccatccggggggcagtggctgacacacgggacacagagcagaccctgtaccaggtacaggagaggatggcaggtgcagagcgggcactgagctctgcaggtgaaagggctcggcagttggatgctctcctggaggctctgaaattgaaacgggcaggaaatagtctggcagcctctacagcagaagaaacggcaggcagtgcccagggtcgtgcccaggaggctgagcagctgctacgcggtcctctgggtgatcagtaccagacggtgaaggccctagctgagcgcaaggcccaaggtgtgctggctgcacaggcaagggcagaacaactgcgggatgaggctcgggacctgttgcaagccgctcaggacaagctgcagcggctacaggaattggaaggcacctatgaggaaaatgagcgggcactggagagtaaggcagcccagttggacgggttggaggccaggatgcgcagcgtgcttcaagccatcaacttgcaggtgcagatctacaacacctgccagtgacccctgcccaaggcctaccccagttcctagcactgccccacatgcatgtctgcctatgcactgaagagctcttggcccggcagggcccccaataaaccagtgtgaaccccca

SEQ ID NO: 643043 - DNA, 2216 bp, Homo sapiens
cttcagaggatcctctccccgtacgcccaacgagttcacagggcagtgccactgccgtgccggctttggagggcggacttgttctgagtgccaagagctccactggggagaccctgggttgcagtgccatgcctgtgattgtgactctcgtggaatagatacacctcagtgtcaccgcttcacaggtcactgcagctgccgcccaggggtgtctggtgtgcgctgtgaccagtgtgcccgtggcttctcaggaatctttcctgcctgccatccctgccatgcatgcttcggggattgggaccgagtggtgcaggacttggcagcccgtacacagcgcctagagcagcgggcgcaggagttgcaacagacgggtgtgctgggtgcctttgagagcagcttctggcacatgcaggagaagctgggcattgtgcagggcatcgtaggtgcccgcaacacctcagccgcctccactgcacagcttgtggaggccacagaggagctgcggcgtgaaattggggaggccactgagcacctgactcagctcgaggcagacctgacagatgtgcaagatgagaacttcaatgccaaccatgcactaagtggtctggagcgagataggcttgcacttaatctcacactgcggcagctcgaccagcatcttgacttgctcaaacattcaaacttcctgggtgcctatgacagcatccggcatgcccatagccagtctgcagaggcagaacgtcgtgccaatacctcagccctggcagtacctagccctgtgagcaactcggcaagtgctcggcatcggacagaggcactgatggatgctcagaaggaggacttcaacagcaaacacatggccaaccagcgggcacttggcaagctctctgcccatacccacaccctgagcctgacagacataaatgagctggtgtgtggggcaccaggggatgcaccctgtgctacaagcccttgtgggggtgccggctgtcgagatgaggatgggcagccgcgctgtgggggcctcagctgcaatggggcagcggctacagcagacctagcactgggccgggcccggcacacacaggcagagctgcagcgggcactggcagaaggtggtagcatcctcagcagagtggctgagactcgtcggcaggcaagcgaggcacagcagcgggcccaggcagccctggacaaggctaatgcttccaggggacaggtggaacaggccaaccaggaacttcaagaacttatccagagtgtgaaggacttcctcaaccaggagggggctgatcctgatagcattgaaatggtggccacacgggtgctagagctctccatcccagcttcagctgagcagatccagcacctggcgggtgcgattgcagagcgagtccggagcctggcagatgtggatgcgatcctggcacgtactgtaggagatgtgcgtcgtgccgagcagctactgcaggatgcacggcgggcaaggagctgggctgaggatgagaaacagaaggcagagacagtacaggcagcactggaggaggcccagcgggcacagggtattgcccagggtgccatccggggggcagtggctgacacacgggacacagagcagaccctgtaccaggtacaggagaggatggcaggtgcagagcgggcactgagctctgcaggtgaaagggctcggcagttggatgctctcctggaggctctgaaattgaaacgggcaggaaatagtctggcagcctctacagcagaagaaacggcaggcagtgcccagggtcgtgcccaggaggctgagcagctgctacgcggtcctctgggtgatcagtaccagacggtgaaggccctagctgagcgcaaggcccaaggtgtgctggctgcacaggcaagggcagaacaactgcgggatgaggctcgggacctgttgcaagccgctcaggacaagctgcagcggctacaggaattggaaggcacctatgaggaaaatgagcgggcactggagagtaaggcagcccagttggacgggttggaggccaggatgcgcagcgtgcttcaagccatcaacttgcaggtgcagatctacaacacctgccagtgacccctgcccaaggcctaccccagttcctagcactgccccacatgcatgtctgcctatgcactgaagagctcttggcccggcagggcccccaataaaccagtgtgaaccccca

SEQ ID NO: 643044 - DNA, 198 bp, Homo sapiens
tcagtagtacataggtcctcactttgctgaacttggctatcctgccatgctccatgacactacctgcagctccagttaatcattcacagtggatgccaacgtcgtgtcataccggggaagttccccagaagtaggccggccttgtgtgcggttaccattttttgggattaatcatcaccgggtttgactccgagaaat

SEQ ID NO: 643045 - DNA, 1965 bp, Homo sapiens
tttctgatacccccaaacagtggctcaagacgctggccgataccccccacacattggtgcaggacttggcagcccgtacacagcgcctagagcagcgggcgcaggagttgcaacagacgggtgtgctgggtgcctttgagagcagcttctggcacatgcaggagaagctgggcattgtgcagggcatcgtaggtgcccgcaacacctcagccgcctccactgcacagcttgtggaggccacagaggagctgcggcgtgaaattggggaggccactgagcacctgactcagctcgaggcagacctgacagatgtgcaagatgagaacttcaatgccaaccatgcactaagtggtctggagcgagataggcttgcacttaatctcacactgcggcagctcgaccagcatcttgacttgctcaaacattcaaacttcctgggtgcctatgacagcatccggcatgcccatagccagtctgcagaggcagaacgtcgtgccaatacctcagccctggcagtacctagccctgtgagcaactcggcaagtgctcggcatcggacagaggcactgatggatgctcagaaggaggacttcaacagcaaacacatggccaaccagcgggcacttggcaagctctctgcccatacccacaccctgagcctgacagacataaatgagctggtgtgtggggcaccaggggatgcaccctgtgctacaagcccttgtgggggtgccggctgtcgagatgaggatgggcagccgcgctgtgggggcctcagctgcaatggggcagcggctacagcagacctagcactgggccgggcccggcacacacaggcagagctgcagcgggcactggcagaaggtggtagcatcctcagcagagtggctgagactcgtcggcaggcaagcgaggcacagcagcgggcccaggcagccctggacaaggctaatgcttccaggggacaggtggaacaggccaaccaggaacttcaagaacttatccagagtgtgaaggacttcctcaaccaggagggggctgatcctgatagcattgaaatggtggccacacgggtgctagagctctccatcccagcttcagctgagcagatccagcacctggcgggtgcgattgcagagcgagtccggagcctggcagatgtggatgcgatcctggcacgtactgtaggagatgtgcgtcgtgccgagcagctactgcaggatgcacggcgggcaaggagctgggctgaggatgagaaacagaaggcagagacagtacaggcagcactggaggaggcccagcgggcacagggtattgcccagggtgccatccggggggcagtggctgacacacgggacacagagcagaccctgtaccaggtacaggagaggatggcaggtgcagagcgggcactgagctctgcaggtgaaagggctcggcagttggatgctctcctggaggctctgaaattgaaacgggcaggaaatagtctggcagcctctacagcagaagaaacggcaggcagtgcccagggtcgtgcccaggaggctgagcagctgctacgcggtcctctgggtgatcagtaccagacggtgaaggccctagctgagcgcaaggcccaaggtgtgctggctgcacaggcaagggcagaacaactgcgggatgaggctcgggacctgttgcaagccgctcaggacaagctgcagcggctacaggaattggaaggcacctatgaggaaaatgagcgggcactggagagtaaggcagcccagttggacgggttggaggccaggatgcgcagcgtgcttcaagccatcaacttgcaggtgcagatctacaacacctgccagtgacccctgcccaaggcctaccccagttcctagcactgccccacatgcatgtctgcctatgcactgaagagctcttggcccggcagggcccccaataaaccagtgtgaaccccca

SEQ ID NO: 643046 - DNA, 808 bp, Homo sapiens
ccgtaagtagtcagaaatatccccagctaaaacccgtatgattcatacataacatatatctatactgtgatgatcacagtgccagggctactaaaagaaagaaggatctcgatatattggctgccagcgataggtatcttatctctcgaccacattaaagactctcagacgtgtcctcgtctctgctggctatcgatgcgagacaggtccgaatacctacacgtgcggtcacgctactaagaatgagtcctcaacacacttgacaatgcctgcaactaagcatcgtctaaatgctgacagaatgctattttatcaaggtttctgttctcactcttaatactgtctcattgcatgatctggtagtcatcgaagatgccttctcgtgaagttctggctgacagacctctgagaatctgcaggcttgtcaagatctagcttcacaatctgtctatcccatgcagaacaggaacaacaagtatgtataacagaccacttcctgagtagaagagtgtctttgtgaaaaggtcacgattgacgactcacaaacctgcagttgtgtacccatcatgtattccatcctgtcggactcttgtcaacactctgtaccaagggtctcgattttttcacgaaattaaacttgcaacacagtccagctgtataacacatggcaactggtaggattcacctcaaccatgggtccccaaatttctagtccacaatctttgctggaagactgacgacgtaaagatgaaaactgccgggccacaagtccaccctatataccgataatgaaccctcgagggcatta

SEQ ID NO: 643047 - DNA, 208 bp, Homo sapiens
gagccggccgtctgttctatagatgtaaaccgagaagccattatttggaagccaaactcctttgcaacgtgggaggatcgtttgagcccgggaagtcaaggctgcagtgagctgtgactctgccagtgcactccaacctttttcaaaaatgttgctgctgtttctctctttgttgctgtgatccgcttcactccaacggggaggaacg

SEQ ID NO: 643048 - DNA, 847 bp, Homo sapiens
  misc_feature (45)..(45): n is a, c, g, or t
  misc_feature (104)..(104): n is a, c, g, or t
  misc_feature (110)..(110): n is a, c, g, or t
  misc_feature (114)..(114): n is a, c, g, or t
  misc_feature (134)..(134): n is a, c, g, or t
  misc_feature (167)..(167): n is a, c, g, or t
  misc_feature (239)..(239): n is a, c, g, or t
  misc_feature (309)..(309): n is a, c, g, or t
  misc_feature (313)..(313): n is a, c, g, or t
  misc_feature (326)..(326): n is a, c, g, or t
  misc_feature (336)..(336): n is a, c, g, or t
  misc_feature (355)..(355): n is a, c, g, or t
  misc_feature (357)..(357): n is a, c, g, or t
  misc_feature (530)..(530): n is a, c, g, or t
  misc_feature (550)..(550): n is a, c, g, or t
  misc_feature (626)..(626): n is a, c, g, or t
  misc_feature (662)..(662): n is a, c, g, or t
  misc_feature (746)..(746): n is a, c, g, or t
  misc_feature (751)..(751): n is a, c, g, or t
  misc_feature (763)..(763): n is a, c, g, or t
  misc_feature (774)..(774): n is a, c, g, or t
gcgtgttaattacaaagaacagtgaggagcatagaggtggtgaantttccaaacagggaaccaggatccacagccccaaggcccaggggtccggccacccaggnaggagnaacnccgtaataaataatggagtngggggcagggggtcagggctgcccctgcttctncttgactgaaaaccgcttctttctcgctgccagcatctcatagaaggggtccacactcacagcccgcctggntggacttgatccactcgtccttctcctcctgcgtgggggccgagatccggtacaccatgtggtttccctnccanccactcggccgtncgcctcagtnttgcaggctttgatgagcngncccttgttagttggggatgtaagttcaaagcagttcggtttccgaggggtcagtccacctctcggatgcccagattctccagggggatgattcctcggggctccttgtccgtggtgtactcaaagtagtaaaggcagttgtctgtgaggataaaccagcgccgcttccacgtnttcacccggccccctcccancttcaggagccagccctcccggtccgggtagaagaaggtgtgaggtaaggtcattcccgttatcctcaggaatctngaagggctctatttcggatgcttgttgtacaggttncctgagcagctcctcaggcaggtccccgccctccgttgatgccccgggtttcatggccacaaagcgctccaggcccggcttgtnccggnacatatggattntagtatactanttgttcgatcattatgcggcgaagacagcacaaagcacgtgtttgtggactggaaacccaaggttgcacagca

SEQ ID NO: 643049 - DNA, 403 bp, Homo sapiens
  misc_feature (14)..(14): n is a, c, g, or t
  misc_feature (30)..(30): n is a, c, g, or t
  misc_feature (81)..(81): n is a, c, g, or t
  misc_feature (92)..(92): n is a, c, g, or t
  misc_feature (101)..(101): n is a, c, g, or t
  misc_feature (122)..(122): n is a, c, g, or t
  misc_feature (138)..(138): n is a, c, g, or t
  misc_feature (178)..(178): n is a, c, g, or t
  misc_feature (291)..(291): n is a, c, g, or t
gtcaccggaggggntggcctggcccttccntggcctcccctggtttcgggttggcctcctttggcctccccttccctaaantcccccttccntttccccancttcccttgtccaaaaccccnttcacttccccctgcnctctcttcggtttcccctttcccttcattctttccctgcncctcctgccctacttcccctgcctcctttcctttaccctcttgtcttagtctattttctgttgctgtaacccacagattggataatggataattttaaagaaaagagatttantcgctgggcgtggtggcttatgcttcaaatcccagcattttgggaggccgaggcaggaggatcgcttgagcccatgaattcgagaccaaccctgggcaacataataagaccc

SEQ ID NO: 643050 - DNA, 2620 bp, Homo sapiens
ggtcggcggtttcctgcttcaaccagtgcttggacggaacccggcgcctcgttccccaccccggcccggacgcccactagcaccagcccctccgagtacaccatcattcacacgacacgccgtcgcgcacctgaccacccaaggaccaccacgacccggccgacgctccgacgcgcccagcgacacgcccaacacgacacagccgacccgccgccccctcatccatctagcatcagcacagacacaatgcaccgaaccggacgattcccacccactcgcacagggatgactgccaagaacaacataccacatcaccaagagcaccactcaagcaacgcgtcccgaccacaagtctaacgcccggccccagcagtccaaaccccccttgtcgtaaagagcacttccactaaccggccacattcgccattaaccggcatcgtgtaaaccccgttggcgctaccccacactgcgctccctatataacagttaaccaatgattcgggaaacccccggtacgggcaaattggcaagctcgctggcgcgggccaccaaattacgctagcggcacaacacgcgacaaaaccccggtcatcactagcgagcacccaccacgacgagacaacacagtacaaacaaactgatatcgatgacgaccatacattcgacacagacagcccaacacataacaagaaatcgacactacatcctagcaacaatacggctgagacccacggcccagcccacaccaccaagggggcgaacccaacccagcaccgtagcggccgcacccacgccacgcgacacaccaaccaaacaacagacctccggcaacgcgccacgagccctaacgcacaccgcaccccgcgccccgcgccacaggacagcaaagacagccaaaccaacactcacagcaccgacaccaccggaccaccacgcgcggcacaccgtcctggaagcctgagcagacaaccacgtcacagcgacaacgcacacgccgtataccacatgacgcagcacgacgcacgacacgacgatgcccgcaaggagaagaggaaaacgcatataaacagtttaaccacaacctacgagacgaaaacacccagcacaccactgccccgcaacaacgcgcacagcgcccacccattgcggaccacactgacaacaaacaccgctcccgacacaacgccaacattctggggcacacgccccacacaaacaccgccaacacagcgccccaccggagcagccagcgccaacacgcacgtcgccaacaaccaccactagtgggacaacctacagccaaacccactgagccgcggcccacaccgaccacgatagtccagctatagccgccacacacacgccctcgcacacaccccaacccgataccccacctgacgccgccaaccaaacacgccgcacacaccaagaaccaaccgatgcagtgcgccctctggaccaacaacagcgctaaccccccacagcgcccacacactccccccccgactgtaaaccgcagccccgtgaggggcgacagcacaaacacaccacgacctgaggccgcaccacatagcaccacacagccaccagcaccacaccctgcgcggcacgcaacagaccacccgaacatagcaccccacgaggcacgacacccgcacgtaccaacaccaaacacacaaacacccagtcgccacaccagaccagaccacgagccccagccaaaacaagaccataacaactgcacgcaaacaccgccaaattcagcgaacaacgaccgaccaccacgcgagcaacatacgcaggaccaaccagcgcaaccagacaaagagaccccagaagaatgtatcgtcgaagcccccccacgtcagcgacgcaaccaacaagcctgagcacacagcgaccgccacagacatggaaagcgcatggaaacaacacaacaacagagcgcccccaccccacctgcatcgacaccgacagcacacaacagacgcaaaaaaaagcatgtccgagagccaggaacgaacaactagtcgaaacacaccagcatcaaactaaaccagcatactcggtaccacaactacacacacacagaccacccaatcaacgtgggacgaccagacgaaccccacactgagacagaacactacacgaccgcagctcagcgcaaaggcaaacgaccacccgcgagccacgccaccacacatcgacagacaacaacaaagacatacacgctaacgacacaccacccagatagctgcatgcgcaccacacttagcgagcgcacacaccaccatctaccagccccaacgagccacacggcatcatgcgaggaggagacagagccagctagacagcgaggcacgcaccggaccgcccacacaccccgcaccccaccgtggacgagccgacacaaacagccgaaagccacaaactacagcgccgctcagcaagacgtactaccacaagcacatgaaggcacaccaaccgacgacagctgcacgcaccccgacgacccacgcccaaccatcgcgtaggctgacaccaccaacagagaagacgacgacgatgcccacgaccagcaccacgccagtcgaggccgataacgaggccagccgccacg

SEQ ID NO: 643051 - DNA, 388 bp, Homo sapiens
  misc_feature (135)..(136): n is a, c, g, or t
  misc_feature (262)..(262): n is a, c, g, or t
  misc_feature (270)..(270): n is a, c, g, or t
  misc_feature (278)..(278): n is a, c, g, or t
  misc_feature (310)..(310): n is a, c, g, or t
  misc_feature (362)..(362): n is a, c, g, or t
ctcacacccaaagcaagtgacagaggcagctggaacgagatcgcctatggtacgagctctggagcagtacgagagattgtgcaacacccacagacagttgggacaggacctcagctctttcggactttcacagtnnaccgaagtcccgaaacagaaagcatgctatcagagaagcatcttgtatcagtcagtgcagataatatgtcatgtccggacgtggacagcaacacgattcatgggaaagatctttactcatccggtnctactccnttagcganattcaagatactattcctggaggagacagaangtgatggcagctattcctctggaaatgacataggacctttaggagagcgagnctatcaacatgggtttatccagagag

SEQ ID NO: 643052 - DNA, 186 bp, Homo sapiens
tttttttttttccgggcccccccccccccttttggaaaaaggggcccccggccctttggggggccatttttttttttcccctggggggggggggggggggaaaaaaaggggtttttcctgggggggcctgggggggccctttttttcccccccgggggggggtttaaaaaagttttttttttttta

SEQ ID NO: 643053 - DNA, 130 bp, Homo sapiens
aatcctagcactttgggaggtcaaggagggaggatcacttgggcccaggagttcaaggccagcctgggcaacattagcgggacgctgtctgtacaaaaaatattttttttaaataaacgatattatgagg

SEQ ID NO: 643054 - DNA, 191 bp, Homo sapiens
tgccgggattacaggcgtgagccactgcgcctggacaaaataatttttaagggaaataaatgtgagcatttagaagccttactgttttaaaccagggtagttgggcaggcttcagtcacagtctataactgtagcttatttgttcaaatattctactgtggtctctttcttttaacgttttgttttgttga

SEQ ID NO: 643055 - DNA, 118 bp, Homo sapiens
agttgaggatgagctcaggttagctgcatgcacttgataggcagtggcctgtctcctcacttgagtgcaaggtccatcgaccaaagccctgtactgatcactactcatgtccagccag

SEQ ID NO: 643056 - DNA, 594 bp, Homo sapiens
  misc_feature (36)..(37): n is a, c, g, or t
  misc_feature (395)..(395): n is a, c, g, or t
  misc_feature (470)..(470): n is a, c, g, or t
  misc_feature (503)..(503): n is a, c, g, or t
  misc_feature (509)..(509): n is a, c, g, or t
  misc_feature (511)..(511): n is a, c, g, or t
  misc_feature (517)..(517): n is a, c, g, or t
  misc_feature (528)..(528): n is a, c, g, or t
catgccagccgccatcagctacacttcggttcagtnncgaccgacagaagcacggcaccagtacagaccgccaagaagaaatggtgacgaattggcttgtccgtaatcctgactacacacgttccaatctgaagtacaaagacgttgccaagagtggttacaagggcgagcacatcaaggacggtggaggatttgccaagctgttgcaggctgtagaagctggcgatatccaagctggtgacgttgttctttgcgaagcaatggaccgtgctgggcgtttggaatctttggacatgctcaccaaggttattgccccaattctgtatgctggtgtgtcgatcatcaccctagacgataacacggcgtatacgaaggcaagtgttaacacgcctcanattcacttgctattggcaaagattcaagctgcacacgggtacagtcaggctctgagtgaccgtatcaaatccaantacgccacacgcattaagaacgccaaagagacnggtaangnaaaacncaatacgcctntctggcttaacagcgacggtgagcctaatggaactggcgtgcctttgattaaagcaagcatttgaa

SEQ ID NO: 643057 - DNA, 192 bp, Homo sapiens
ctgactctgcaacactagaaaactaacaaatgagcaacactataaagagtagaggtagtctcattgggtgtaactttcaacccattctgcttgtggttagacttataactttgctaacgatgtaatttactaaggcttgaaatggtattctaacagtgagttcattgtcttgaggataatctgatttataag

SEQ ID NO: 643058 - DNA, 325 bp, Homo sapiens
ggacgtggtgaaggaggatgccttctacagttgggagagtagcaaggaccccgctgagcagcagggcaagggtgtggcccttaaatctgtcacagccttcttcaagtggctccgtgaagcagaggaggagtctgaccacaactgagggctggtggggccggggacctggagccccatggacacacagatggcccggctagcgcctggactgcaggggggcggcagagccgcggtgcagatgggtcctgtagattgatgtgtcttaactaataaagtgctaagaggcaggatgcttgggcttcctggccccctcagaatgcgcagt

SEQ ID NO: 643059 - DNA, 111 bp, Homo sapiens
tggatccatcggcgccttttttaactggtcctttctgtgcactttatgtttgttttcgtcttgtctggtttgagatggagtctcgctctgtgccgaggtgagtgcggtggc

SEQ ID NO: 643060 - DNA, 90 bp, Homo sapiens
gaaatatggtttatcaatatttactattgatatatatgttcaggtaactttacacttacaatgaattcatggatttgttagcagcatagg

SEQ ID NO: 643061 - DNA, 214 bp, Homo sapiens
gatacaaaggagagggaaaactatctggtccacatgacactactaccatatataccaggtcccacatcttaccaccccttccccatcactgtcctcagagagacgctgttaacagctccttgaggtgattctctcaggcttgattgtagatactctcgctgtcaagatctgatgctgactctcatcttccgtgattcgttctttacctcacctg

SEQ ID NO: 643062 - DNA, 335 bp, Homo sapiens
ccacatatgcctccttttgaggtgttggttttgctttgttttgttttgttttgggtggtttgtatggttgttgagatggagtttcactcgtgttgcccaggttggagcgcaatggctcgatcttggcttacggcaccctcccccttccgggttcaagtgattctcctgcttcagcctcccgagtggctgggattgcaggcgtggtggtgcacgcctttaatcccagctactccagagactgcgcaaggagaatcgcttgaacccaggaggcagacgttgcagtgagccaagatcgtgccactcactccagcctgggtgacagcaagactgtctca

SEQ ID NO: 643063 - DNA, 621 bp, Homo sapiens
gagcgttcagaggatcctccaacgctgctcacaaaactatctgaaaaaacagagaaaaggctaaagaaaaaagaaaaatgaacagagcatctggcaagtgggggcccaaatttcagggggcctaaaaggcttggtacttgggagtcccagggaagggcagacttgtggagagaagctggtggctggttcacagggaacaaatataaatggtttggtaactaccagaaggggctctcgccatcacttagttaaaggctaattaaatgagatacctctttacctatcaggcatagataagaaggttggataaggtacaacgtgggcagtgttatggggaaacacagcttccgggggggggggaggacagacgggtagttggagacgggggacagaggttgatttggtggtgcacggactctgattcagcacttccatttctagagtatctcatgggggggaccatacacaggcagatacgttcaagggaatgctcacgggggcttggtttaatagtaagaagcccaaacgactcacatgcacacatgtcagggcctaggtaaattatttattggggttcccagacaatgaaatactgtgtccccattaaagaaggtaataagt

SEQ ID NO: 643064 - DNA, 542 bp, Homo sapiens
  misc_feature (36)..(36): n is a, c, g, or t
gaggccccggggccccaccatttctcccagttcccnccccgttttgggaggagggttaaggggcccggtcccaggaaggtcttccaaaacccccttgcgttttttgttaaggaagacccgggggcccctttgggggatttccttaaaagggggtttcccaccccgggggggggggtttccaattaggaaaggggttggtggggcaaaaaaacccccttttcccaaaaggggggtttttttttcattggggttccccggccccttgaaacagggggccaaaacaaaaaggggttggaagacctttgggaaaattttcccggggccagggttttctttttttttttttttaggaccttccccccccccccaaaaaaccgggggggggaaattaggtttcccgggtggcccttttttttttgggggttttttcccccccctttttcccccttggccctggttaaacaggccgggaaaggggggggggggggtaatttttttttaaaaagggggggataaaaaacccccaatggggggggcccgga

SEQ ID NO: 643065 - DNA, 1138 bp, Homo sapiens
ggatgggcggggcaggcgcgcggggattgcggcgaggatgcgagcgcgccgagcgagtagagaacatcggtatccacggcacgataagatttccaagtgagacacaagtgtctggtgtcaagctactagtctgttgctctcttctaatcccagtatccttcagaggtgcacgggatgcacaccagggcagagctgactgcttctgggcgggatggcacgagtgcggcatgcaagggaatgccggtttgatgctaattctgcaagttgcaaccctcactaatggccgtgagtcggaagcgctgtgttggagcctagatgcgaatgtcgaggatgttgtaggcaccactggtttacttgcagcgagtgcttgcaccaaataaggggccccaaggagctcatacgtgttgcccaatacagtacagccaacacatgccaccctttggccccagggttgccatgttggacaaagcccctaattagcccaagtcttccgctcatcaataccaccctattccggggctaaggcgtatgaagcggctacgtcattaaagcccagtgccaaggtaactaggcacccagcgatactcagtcgaccacacccggtgctcaactccagatagtgaaggaccgcctatcgctgggacgaaacactggcgccccaaagaccaatgaactaagcttgcgtgggtcccaagttgcagaactgtgggggcaaagctgcacagcgacaacggcctagatggttgaaaccgttggaccacgcccccttgacggggcaagcaacctctttcacattggctgacatgagcgtggcggccaaccatcccatggtttgcacacactgtgcgtaccctaactgggtcccgttcactcaggcatacacatcacatacccaaagatcccccctggcccgggcacacacggtattccacagctgcgaaagtggtcatgtacaacccaacagcaccttggatttacccccctccaagcgcgcttctcctatcgagtaagtaattaacatcttacgcctcgtacagtatgcccacacgtcacatgtgaatctgtagttcgcttgggtctccattagtgctgacatgccactgtcaaacacattggcacctgccgtcattatatacac

SEQ ID NO: 643066 - DNA, 248 bp, Homo sapiens
ggctcggtacctttttataactcttgaccatcatctagttacggagcatccacttttcacccctgggccataaccatttgacgcatgaaaaatcatcaaattataatatcatggcttatacttttgatagcttctgcccggagcatggcggtaagagcttctcattttcaattgattcattgggggagaaaatatacacggctgtcctagactttctatgacacacaatttgcttgtccggggttgtt

SEQ ID NO: 643067 - DNA, 629 bp, Homo sapiens
agtatacctcgaaagagaagggtggctgtgagtacagaagtcgagatccctaatctaagatcaaggaagaagactgtggtgtggaccgtgactcctgggatacgtaagataagcctgccaagtgaacgacccctatgacatcctcgtgggagcgtgtaaaacccccggaagggaagcacaatctggtcaaaattggcctgtgccggtacgaaatagctctagaagtaatagatcaacactcatgaatttcctacaaagggatcaagaatcttccaggtgaggccttgaggactcagaagttacaacacaggctttcctgcgggcccaaagtaggccttgaggtcaaaacccgatgactgaagggacacctgtacaggcaccatactggctaagtgcttggatgaggcagcgagcgagggagtgcatggcccagatcaaggcttaaggacaaacgcttggaccctgcaacctgttcccagcatttaccaggctctcaccccatgcgtgctgactcaatactgcacccgtgatctctcgcagaaggctggtggggcgatagctgacctcccggggtgcttgctcccaccctcctcctgcgagggtccgcgtcgtttctatccgtggctgcg

SEQ ID NO: 643068 - DNA, 124 bp, Homo sapiens
tccccattactactagtttactacttggtcatcttattgaatcttaacatgggcgggtgcagtggttcacacctaataaccgtcaaccaatgtgtggagcgccgggttaccgatgctcgatatt

SEQ ID NO: 643069 - DNA, 358 bp, Homo sapiens
agtgaatgaagaaaagctgaaagcattccctctgagaacaggaacaatacacggctgctagctttcactacgggcgcttcagcacagtacggggggtcctagccagagctatctgacaagagaaagagataaagggcatccacatcagtaaagaggaagtcaaactgttgctgtttgctgatatgattgtttacctagaaaaccctaaagcctcctccagaaagctcctggaactgataaaagaattcagcaaagttcccggacacaaaattattgtacactaatcagcacctcttctgtacaccaacagtgaccaagttgagaatcaaatcaagaatcaaccccttttacaatagct

SEQ ID NO: 643070 - DNA, 120 bp, Homo sapiens
atgcggtcgactctagacggactccctcacggttgagcgcgcatcagtaagcggtcagtaagcggagcggctgctgggggtatgttgtgttgattcatttaatctgtgctcgcttactga

SEQ ID NO: 643071 - DNA, 1057 bp, Homo sapiens
acaagttggcttttattatccatgttcaacctggggagaaagctcggccacagacctgtgctacggggggggttacaaggtcatgtggcgggcgcccgtcccgggtgggttctccgggtacacgttccgaggcacgtgccgcgcaagtggggagtgcaagtgtcctttcaagcggaaagtgcgtgcctcgagggtggtgttatcacggccgccggtgtgataacattcagcgtggaggcgccaggacacacagggtgcccgccaggtgggcgttcgcataagtgtctttcgagagtccaaagcgcccgaggggttctccaagcagagaatagtctcctcaagcacagagaaaagagaaaagtgtgtggaagcgcggagtgtgcctctttgaaatatgctcctcccgattgtgcgagagagaagacaccagagggtgctctgaaaagaggggcacacacaaaactgtggtgttgcgcccagtgtgggcgcgagaaatactctcacgagggcgcgcaagagttcacacgggaggctccacacaagagaaggcaccagaggagacgaggaggcccacacgaagggggagcaggagacgaagcggcgggagggagagtatcaacacgcgacagggggtatctcccttcgtgaccagaaggggacacaggcggcacatcttcgggggctctcctcacaacaagagggcgaccaacacaacacaagcaagggtgtgttgtgcgcaccgcaacagaaggtgttgtgctctcccaccgaagagcgtttcctagctacttccgccggtggagaaagtttaccccgccagaagaggggggggggaacacacgtggcaagtctcctccaattctcccgaggtgtggacaaccggacaacaaggaaaaaatctttccaacgaggaggggagtctcctccactttctattttcccccgaaggtgctgcggatcttccacaacgccgttgttgtggactttggtctccccgaaggctctgcgctttccgacgggtgtgcgtccccaacccgccgcttttcgctgcttcgga

SEQ ID NO: 643072 - DNA, 189 bp, Homo sapiens
ttatcacaccaacaatgactaactcaaactagctcaaaacaaatataaccatacacaacattaatggactgaactgatctctttatagaagctatccctaagtcatttttattgccacaactaacctcctcggactcctgcctcactcatttacaccaaccacccaactatctattaacctgacctaag

SEQ ID NO: 643073 - DNA, 649 bp, Homo sapiens
agttccctttgtctttactttctgagatcaggcttgtatataagagaaaattaccttcagtagtgaacttttactaggctagggaaatggacaggtaactagccaaacttgtgtatcacgtttaacacatgaaccttacatcaacctctgggcatttccccccactgaggctaatcacagtttacccaggaagttaaaagtaagctctaactagttcctcttaaaacactttactagagattttgttagaaagtgttctatgcttaacacttcagcaccatggctgagcttaaattctcaactctaagcaacagaagttttagaaagtcactttgcacccggtgcggtggctcacgcctataatcccaacactttgggaggccgagacaggcagattgcctgagctcaggagtttgagaccagcctgggcaacacagtgaaaccctatctctactaaaatgcaaaaaaaattagccgggcatggcggcatgcacctgtagtcccagctgcttgggaggctgaggcaggagaattgcttgaacccgggaggcggaggttgcagtgagctgagatcgtgccactgcactccagcccgggcaacagagcaagactccatctctaaaaaaataaataaatcaccagatggtga

SEQ ID NO: 643074 - DNA, 154 bp, Homo sapiens
aattactcattcatttttttattcattatgtcaggctatgtataagtgctgagaataacaagataaattatagtataatctctggcctcaagattcaataattggtgaaaggagacagatatataatcaatatgtacagtagattgtaattatg

SEQ ID NO: 643075 - DNA, 806 bp, Homo sapiens
ggccgcggttagtccctgctggcaccccactgcgagcatgtgcgttccctgcggggagtcggcccccgagcttgccggcttcaccctcctaatgccagcagctatcatgtggaaatgtgggccagcttgcaacggagtctgagttattctctacactgaatatgtctaagattggttacttctataccgattgtcttgtgccaaatggttggaagagcaatccatatgcgaccacagaaggacacattcaagcagaagcttagcataagatgctgaagtataacatcaaagccattctgtgaaaaagctgctttcctgggtgaacgagcagtggctgtgccagagtcatggttctttcaagcagtcattcatatcagcgtagtgatctgcagcttcgtaggtactcccttccggtacctacttacaccttccatgcaatgaaagtgttcaaaataagataaagagccttaactgggaagacatggaagaatagatgccggtgcacttcctgaagagtagatgattccgagttttgtatccggattccgggaggaggtatcacaaaaacactctatgatgaaagctgttctaaagaagatccaacatggcagttcgtgctgacaattggttcagaaggggacaacatcccagatgcattaggtcgttgttgagtatcttaatgagtggcttcagatactcaaaaccagcttgtacagtgcgtattataggttaagcctcttctaggtcgtgggtgtattcattaactcgcactttatattactacctaagtagaacagtaagtgaac

SEQ ID NO: 643076 - DNA, 285 bp, Homo sapiens
ggaagcagctccaggttctcctgtatgtaagccttgggaagaggcaggccagcagtgagcgaggggccgcgcccgtgcatcgtgagagccctgacaggggcaacaagcagccaccacgtgggggacagaggccgggaataccgggcataagagggtaaagaaaacttttccattaccaagtgtctagctccaacatccttgcttccgtacacttacaagacccttctggtgccaacaatgcttgatgtgcgcatccgtgtcttgcaattgatggagtgaatttgc

SEQ ID NO: 643077 - DNA, 778 bp, Homo sapiens
cacggtggctcacgcctataatcccagcactttgggaggccgaggcaggcggatcatgaggtcaggagctcgagaccaacctgaccaacgtggtgaaaccccgtctctactaaaaacacaaaaatcagccgggcgtggtggcgcgtgcctgtaatcccagctactcaggaggctaaggcaggagaatcacctgaacacttgaacctgggaggcagaggttgcagtgagctaagatcgtaccactgcactgggtgacagagcaagactccatttcaaaagaaaaaaaaaaaatttaagagaataaagagaaaatcggaaaaacgagttttaaagtatagtgtgtgaaataaggggtaactcttccagagggtggcagaaatataacaaaagaaacctttaagagcttaaattaaggccggaacgcccatatagcttcagcgttcgtggtaatctcccgaggaacattgggacgaggctgtggagatcaagcgcaaattcacgttggaaggctcaaggaaagttctggaaaacacaaggccgtggcgcacacacagtgtgtgaaaaacccacacggatcactcggtccgtaaagagaacttaccaaaaagactcaggcctgggggagcaatagggagaggagaccacccaaattccgcgggaaagagatcccacaagagaataacgcacacataaagggggcaactaaaagggaaacgagggagacaaccgggagccccaaaacccccaaagggaagcgcgcaagagaagggctcggaac

SEQ ID NO: 643078 - DNA, 1069 bp, Homo sapiens
ttgatcaggaagaactagacaagaccaagcctatttggaccagaaaccctgatgacatcacccaagaggagtcatggcagcaattctacaagcagcctcactcaatgcactgggcaagacccacttggcagtcaagccacttttctgtcagcaaggtcaagttggcaattccagggcattcgctcatttattcctcgatcgggctccactttgacctcttttgcagaacaagaagaaaaagaacaacatcaaactctatgtccgccgtgtgttcatcatgagacagatgtgatgagttgataccagcagtatctccaattttcatccgtggatgtgggttgactctcgcagcgaatctgccccttgaacatcatcccgcagcaaatgctccagcaagagccaacaatcttggaaagtcattcggcaacaaacattatgtgcaagcaaagtcgccttgaagctctatctctagcagctcggccaagcaagcaccaaggagccacatactagcaagcaacacataccatcatggcagagccatttcctccttagcaacagacatctacaaaggccattcggggcaaatccccgcacgcagagcacgtcacaaattaaacccggagcggacgcgcacgtgggtcgttggcaaggacttggcaatgcccgcctcagttccagcataacacccatccaccccaagatccctggcgaaacagacagtgcaccgccactggcaccacacacataacatggaatcaaggaaaggatcacatggatataacgctcaggaccacttggaaacggagaggaaccaaccgaagcacagcgggatacaccaaagacactgacgtttagaaacgaaatccaaacacatgggagcagtgaacagaaaggacaaaaacgaaaccacacagaggactggagacccacacacgattcagggcgcagtcgagacggggaggggcacgacaggaagaaatggcggagacacaaactcgagagagggacattactcagaacagacgatggcggatcaaaaaatacaaatacaacgccacgacacgcccgc

SEQ ID NO: 643079 - DNA, 527 bp, Homo sapiens
gagagagaactgcagccgaatctgtttggactcagatcaacatggaacgaagagagtgaaagtgaaagtgagcaacgtattgattctgaggagtcggacagccggggaggctcctcatcagatggatgacatcaaagtgttccagaatgaggttaaaggaacactacagtggtccacaagaggagaacatttcttgtgacaatctcatactggaaatcaactctctcaagtatgcctataacataagtctaaaggaggtgatgcgggtactgagccacgtggtcctggagttccccctgcaacagatggattccccgcttgactcaagccgctactgtgccctgcttgctacctctgctaaaaggcctggagccctgtaattaggaactacatacagcgcgcagccaaccatttggaagcgttagcagccattgaggacttcttcctaagagcatgaagctcttggatattccatggcccaggtattgctgcctttctaccaggtggagatcctggcttgaggaaac

SEQ ID NO: 643080 - DNA, 258 bp, Homo sapiens
cacatgtgtggtatctgaaacttgctgaagtgttataactaggggagctttgggctgagattatgggtttttctaaatatagaatcatgtcgtctgcaaacagagatagtttgatttcctctcttcctattgggatgccctttatttctttctcttgcctgatcctctggctaggatttccaatgttgaatataagtggtgagaggtgacatgcttttcttgtgctggttttcacggggaatgcttccagctttggct

SEQ ID NO: 643081 - DNA, 137 bp, Homo sapiens
gcggcccaaagacccacttgcgtctattagtatggaaccataggcatttgtttttttaagctttatctttccttgttgcatccggaccaagaaaatatctttgataatgagaatgacggcgcctgtgggcttcatgt

SEQ ID NO: 643082 - DNA, 933 bp, Homo sapiens
ggagtaactgagattataggcagtgcaccatcgacacctggctaatttctgtatttttagatagagacaagggtttcacctagtattggtcaggctgggtcttgaaacatccttgcaccgtcgatgatccacccaccctcgagctagaggtgctggagattacagagcgtgtgagactcagacacgcccgtgccatgaaatattttgacttaataaatgtgtgaataatcctattcgagtgtgcttgtgggcttttggtgttggtggtcatctattggatgtaatgtggttctatctatttaacctattgggtgcaatacatggccgtctctagtgtatcctgtttcgtggacgactcgggcgtgaggatgtgaaacacggggttccgagctacgtgcgggccctaccatgtgaaaaactgcttctgaccctaccgtgggttctccccaatgcatatttcaatggcctaatttttctaaagacctgtcctcggagagatcaggcttgggggagaatgtacagccagggactttgccagcgcacatcatgaaacccgtggaggcataagatgtcgtcggtgtggtatgtgttggacttccaaaagacatcgagggcgattagtgccgtggtaccagtgttgagccccaccgcgagagtgtggggttttctcaaaagaatgtcttttgtgggacactgtccttagggtgagaaattcggggaccccgggcgtctctccggagacctatcccggcaaaaaatgtgtcgcgtcttcgaggaggctaattttcactacaggggtgtgctactagaaagaacaccacacaccagaggtgtccacacgggaggcctccagagggagaaaaagttcaagacacttttgtttcgctgacagcatttgtcaaccgcgccgtaaaattttcggagcgatagtga

SEQ ID NO: 643083 - DNA, 332 bp, Homo sapiens
  misc_feature (280)..(280): n is a, c, g, or t
gggcgagcgctacccgcggcccccgcgcggccctccccacaaagggccgcggagctgcgtggccgccgccgccgtgccgtggctcgcctccgcgggcgcggaaatttgttgcacttcttggggcttgtttatttgttgttttttctctgggtttcttatttttttcgttattttggacaaaatgtcggtccgtgatataaaaattgagcgaggaaccttggtggcattgggagctttgcagacagtttttccaagagataacttcaccaagcatgtccangtgaatttaggcaaagcgtccgatgaatgaagaaagccccgagcaccaaagc

SEQ ID NO: 643084 - DNA, 724 bp, Homo sapiens
  misc_feature (249)..(249): n is a, c, g, or t
ggcacgagctgatatgctctgtgaagctgggcgatttggtcagaagacaggtaagggctggtatcagtatgacaagccactgggtcgcatccacaaacctgatccctggctttctgagtttctgtcacagtatagagaaacccatcacatcaagcagcgctccatcagcaatgaggaaatcctggagcgttgcttatattcccttatcaacgaggcattccgcatcttggaggaggggatggccgctanccagagcacattgatgtcatctacttgcatgggtatgggtggccaaggcacgtgggtgggcccatgtactatgctgcctcagttgggctgccacagttctagagaaattgcagaaatattacagacagaatcctgacatcccccagctggagcccagtgactacctgaggaggctgggttgcccagggaagccctcctctgaaagaatggcaaagcttggcaggaccccatagcagcaaactgtgattcagccttctgcattttgccatgtatggtggcatctaatttcagtgtgattcattcctaaaatccaaacagatttctctgaagtacaaatgattgatttgctgctgttgctgctgctgctggtggtggtggtgctaaatggtcagcaaaagcccctctctgtatcttcctacctcataattctaatggccagatttcaggaatgtgttttctatacctctgacggtac

SEQ ID NO: 643085 - DNA, 220 bp, Homo sapiens
gccacttgacactaacaccatcgagggcaattaatcaggagacaagtaaatataaccgctctgctcttaacgtcacacactacagggtaattctgtcattctctagcactcacttaagaagcttgtaggttagcaccatttcagtttctctagttcagccagtgtcttgtccttagtgattgctccgccttcctgcagttcaatttctcctaggactcta

SEQ ID NO: 643086 - DNA, 517 bp, Homo sapiens
agtagagatggcggtggtgatggttcacagcagtgtgaatgtacttaatgccatggagatgtatacctacagatgattcaaatagtacatttatgttgtgtatattttaccacaatgagaaaacccaatgaaattagttagttgaaatcagaataaaatgttgagcaaaaaccttttaaatagattttattttatcaggattcagagcattataactttggccagctataaaaatgactaggattcttgcatgcatgcgcgtatacacatgtacacaattttcaatggaaagatggtaaaacacattcatttaagttgtaaaaattttgttagaaaattatgaggaaaagactaaaaagatatcttaggctggcgtggtggctcacacctgtaatcccagcaactcgggaggctgaggcgggagagtcgcctgaacctgggaggcggaggttgcggtgagctgagatcgtgccatttcactccaacctgtgcaacaagaggaaaactccatctcaaa

SEQ ID NO: 643087 - DNA, 340 bp, Homo sapiens
  misc_feature (326)..(326): n is a, c, g, or t
aagatggagtctcactctattccaggctggaatgcagtggcacaaatctcagctcactgcaacctccgcctcccaggttcaaacaattctgatgcctcagcctcccgagtagctgggattactggtacacaccaccacgcctggctaatttttgtatttttagtagagatggggtttcaccatgttggtcaggctggtctcgaactcctgacctcaggtgatccacccacgttggcctctcaaagtgctgggattacatgcatgagcaaccacgcttggcctaccatactatttttgaagtaaacattctccattacctattactngtagataatacact

SEQ ID NO: 643088 - DNA, 211 bp, Homo sapiens
  misc_feature (5)..(5): n is a, c, g, or t
  misc_feature (11)..(11): n is a, c, g, or t
  misc_feature (111)..(111): n is a, c, g, or t
  misc_feature (114)..(114): n is a, c, g, or t
gaccnccggancccctacacgccccaaagcccagtctctggccgtgatgttgctgctcgttgcgcttctggcgccgacgttgttgttggtcgcggtttgcggcgcgcgganggncgcgtgtttgctctgattccaggctgggcgtgctggccctgaaagcggggcgggtgctggcctatctgggcttggcggccgccctggccgcctgcct

SEQ ID NO: 643089 - DNA, 852 bp, Homo sapiens
cgcaatagatatagtaccgcaagggaaagatgaaaaattataaccaagcataatttatagctatggattaacccctataccttctggccataattgaatgacctagaaataactttgctaaggagagcctaatagcgtaagaaccccgaataccagacgagctacctaagaacagctagaggagcacacccgtcatatgtatgcaaaatagtgggaagatccataggtagaggcgaaaaaccttaccgtagcctggatgtatagcgtggtagtccaaagatagaatctatagttcaactctataaatttgtcccacagaatcctctaaatcggcctgtgtaactttaactgtctagtccacagaggaaacagctctttggacactaggaaaaaaccttgtagagagagtacctacattttaggacccatagtaggcctaccatgcagccacctagttggaagaaagcgtcgaatgctcaaatccactacgctagaagaatccccaaacatataagtgaattccgtcatacccaaagtgtggaccaaattctatccaccctatagaagaactaaatgttaggtataaacgtatacattgagaaaactattcctcctcggggataaagcctgtgtcagattaaaacagctgaactgacaatttaacagcccaattatctactagtcaaaccacaagtcattacttacccgtcactgtgcaagcccaaacacaggcatggtcaataaggaaggtgtattcaacacgtaacggaactccgggaaatcgtcccggctggttaccaaaaaaattactttgggatacacaggtttagaggaccgcctgtccagggcaat

SEQ ID NO: 643090 - DNA, 870 bp, Homo sapiens
caaaagctttttttttgtgcccctgattttatttttctaactgacttgtgttctcttatgatcatgtgatttgttttctttagcctgttacatgctgggttacattgatatttgaatgcctaaccagccttacatacctggaatacgtggtcagggtatattattctttttataactttgttgggtttgatttgctaatatcttgttgagtatttttatatgtgtattcatgagagagattggcttatagttttctcttataatgttgtttttgacccatgtgttatttagaagtatgttcttttaatctccaaatatttgggatttttttgcacctgtctttgtgttgcagatttctagtttaattctgtgtggtctaagagcatactgtctatgatttatgttatttggaattcgttaagatattttttatgacccagaatatggtcttcttggttcagtgtaagtttaagaaaaatgtgtattctgctgctgttgaatgaagtagtcttattatacaaacccattagatcaccctgatgctttctgtatttaatgcactcgctttacggaacgatgttacacttaactattctgcaaattacctgttattagcttctcacgtttccctcctgattattttgccagaatttttccccctgcttgggttcttaccaggagtgactggttaaccccttgattccggaggtattgtattgttgtttcttcccaaaacacagggtgcgggccccattacagagtcttgctataagggatcaacgggggaaggagcacataatatatattggaggcacggaggtattcgccttcgcaggagaagcgctaaccataccattatgaaaggtcggg

SEQ ID NO: 643091 - DNA, 1056 bp, Homo sapiens
  misc_feature (285)..(285): n is a, c, g, or t
gacgaaacagcaaggagcatgtcgaggaaagatcaagaacgaccaggatttgactgcaccatccgacagacacttgactcgttccgagtaatggcagacaaaatgatcagtgcgtaggggcacggagcacttgagcgtctcaccagagtacagcaagatgcctgaacgacgtaatccccctgtgacactacgtgaccttactcaattgcgtaggcttgatcttctagttcacatcgacattggaacgagtgcgagccagaacaggttaacttcccttgttgagcnacgcgaatcatggatcgagatgggatgagagaggaataggatctatcgtccacctatcaaccctgcggcattggggcatccatgtgcgatgaaaacgtattcgctggattcgcctctcccaaaatctcatggtgagacaacgatgctgccagtgtcgacgggaaccgcttgctagatgctggagccgacgagactgatggcgaggccccatgtttcacctgagggacaccaattgtcgctcatgccttcactaagatatggggagatgtaattgtagagtgcaacttgtggtatggccaacatagagtcgcaataatcgtgtggaacactccggtgatatcgtgtagacaggtggttgtaagagggcagatctatgcggagtaagctgtagtagtaggtatcaagtagctccggatgtggagagagcaatgataacatgggagacggtgctgttgtaggtagctggacattgcatcgaggtggtttccatgttttggatgagtagatgggaaacttctgtgtggacgctaagttggcacacatgaatgacttcggacaagagtagatgttggagagaatattggtgtacccgttgaagtggagtatggagtgattaatacttcgtagatttgttgggcccttggtccccaatatttgggagtgaagatattgcttgtctttcaaaattttgggcgagtctgaaggaaattttaaggctgtttttaaggggttgggggaaaatgtagtccataaaaagcagagggaattatt

SEQ ID NO: 643092 - DNA, 120 bp, Homo sapiens
tctagcggatcccttacttagtagtgccgggcacggagctcatacgtagtaatccagcacttatgggaggctgaggcaggtggatctcttgaggccaggagaatggcgtgaacacgggag

SEQ ID NO: 643093 - DNA, 1094 bp, Homo sapiens
agggtagccctggctgaggctcggaggtcctcccgggctgttcagagggccccaagcggtagccacgttctgatacttggctagaatgccatggggacgtgtgatgcttgtggtgtaatggtggagtggccctgagtggagtgggtcatgactgctttagtgaaatgagttaatgctgaagaggggtgagtgggataggactgaatgaaacctgaagggaaagctcagggcctgccaactttccatgcttgcatgctggctggactttcacgtttccatttccctactgtggccccttcttggccttggtgggccggagggccggccggccgggagattggcccaaggttcacggtccagcgcttggcctggcgaaggttccggtgtaacggccggtgcgccaggttgtgtctctcgagagagacgtttcaccctgtgtgtacgggttcccagggggcgcacccttggcgacccatttgtggaccgaccaggatttcagctagatggctgtgctttgctgtgaccccattttacttaagccttgcagatcgtttcctagagaattccagcctttttggggagcccctcatctggaccccgttggtggtcgttttccttcacattcccgaattggcctgtgagtaactttgcgcagacttggacactgactttgggcaaaaaacttctgttgtcgcccttaacagtttcagaccccagaaaggaaccttcggcggggtccaacagcggttcacctttccacgaaccgttccgagaccggctttggggcccgtgactggtggcttgggttcccccagaaaaaccagcgacaaggcgtcaacttggcaaacgcctggggtgcggctcccaggcaattatttccagcgctaaaatgtacatccgacgcacatgtcttcacactggagcttaaagacccgtaacggaattcctttttctattgcaacccgaggggcttgtgcaggttgatctttccacttgtgcggcaaaaaaccattgtattggtctgtgcacctggtttgcgcacacgtttccacaggggtggccccccgactgtcaacgtccctcgggtggttatt

SEQ ID NO: 643094 - DNA, 318 bp, Homo sapiens
cagacagaagataaaacgctaccagagactactagatatggtcaggagatgtaactaaacaaattgtagaaatatcaacatgaaatgatggacaaaaatcccatttaatatagatcattgagcaataaaggatatgaaaccaatagatataaatattcaattcagtctttccggaatgtgttgttagactacgaatccatccaacacagggcccccgatcgagggagcaaccccggaggagtgcggtcatggttgcgtgtacattggttctgtcctgtggcggccggaggtgagggactgtggtgagacatcatctgg

SEQ ID NO: 643095 - DNA, 325 bp, Homo sapiens
  misc_feature (171)..(171): n is a, c, g, or t
ttcccccccaaattttttttttgggggccccccccccccctaaaccggcccccaaattccggggaaaaacccccccccccccgggccccccaaaggggttttttttttggggggttcccccccgcccccacccccctgggccacccccgggtttaaaaccccctccggggnaaaagggggtttttgggggggcccccctttttttacccgcccccccctaaaagaaccccccccttgggggattttgggggtggggtttaagccccttggggggccaacccaatttaatttttttttttaaaaaaaaaggggcctttttccttta

SEQ ID NO: 643096 - DNA, 331 bp, Homo sapiens
gcgtcgaccaaggttatgactaaattgaaaaatgcgacaagaggccaggcgtggtggctcacgtctgtaatctcagcactttgggaggctgagacgggcgaatcacgaggtcaggagtttgagaccagcctgaccaacaaggtgaaaccccatctctactaaaaatacaaaaattagatgggtgtggcggtgcacacctgtaatcccagctactcaagaggctgaggcaggagaatcgcttgaacctaggagatggaggttgcagtgagccaagatcgcaagatcgcatcattggcactccatcctgggcgagagagcgagactccatctc

SEQ ID NO: 643097 - DNA, 741 bp, Homo sapiens
taccctcctccttccgtgtgtccctccgtgaggaggagggagtggactgatgtgcccccataccgcccccacacacagcccagtgagaaggtgagcagtattgattaggagatccgactctctgtacctcactgctggatgacaatgaccaatgacatgatcctttcaaagcccggtgtgtcatctggatatgtgcccccaccagtggccactccattcagttccaatgtccagataccaatgcctgcatgcctggtggtgcacatgcaccccatgaccatccttgtgaagtccccttccagctccacagactctgccccaggttcctggctcctggctcagagccaagacacagttccatgttcagccccagccccagcccaatgcctcaggtccaactccatgtccagtcccagacccagagctgtgtctttggctaacacccagaccctgatgggcccccagcctcatctccggctaccagcccctaagttttctccagtgactcctaagtttactacctgtggctaccaagttcagtccatggagccccaggtggatcttgggtcacaaaccaaatcaagaaatagggggcacaccgaaagctactttctgctggcacagggctcagcactcaactcacagcttcactatgccagcaagggagagcccgagtgcagcaagagcacccagagccacacggtcgaacacacagtgcgcctggccaggctgtctaagagg

SEQ ID NO: 643098 - DNA, 113 bp, Homo sapiens
ctggatatatgtgaggagtttgctaatacaatgcccgtcaggccacctacggtgaaaagaaagatgaatccgtaggagctcacgagcaactgcagctagatcatgttcactat

SEQ ID NO: 643099 - DNA, 264 bp, Homo sapiens
cggaggttgagaaggctcgcagttattgagaggagtactcatctgcagctggagctagactgagttccagttcttatggtgaaataggtcattttcttctcagaattatggcagactcagatacctgaaataagacggaaactaaaaaggacattcgcatgtctgagtgctgataactgtggacttgatggtaagcaacagtagctcagtggaacaggtattgatgagaagaaaggtgagggcatcccagctctacccggggag

SEQ ID NO: 643100 - DNA, 726 bp, Homo sapiens
  misc_feature (726)..(726): n is a, c, g, or t
cggctctcaagaactaagtttgtgctgtgctgcgggatccccagggagcttccttatatcttcggcaggaccccttctttttgtctcgaagattgagagcctagacaatatgcctggatgggactccctaggggaatggaggcaccacgtggttaaggagatcgagcgacgcctgccacatcttgcgggcagttgaggcgccgacatgatcatagccacagtcacgaaaggctgaccatagctcagactgaaggtacatccagcgatggtcattcgacaacgagcagcagccggcctgactgaactccaccactgtaatcagagagtcaaaggcggactgagttgcaacgtcattggcgagatcaacagctctgccttaccagggccggtacctgaacgttgtgcagacttgtgacctgggaacgcatacaacgctgatagcattgcgagtcttaagatcctgttagtgttaaggcgctggtcacactattcgaaaggtgagcgccatctactgccaagtcttagatgatcttctgagaccatcagacggtaaacacatggatgcatattagacgtgtaacagattgatgcaaagttgcgcaatccagccgtagagcgcgtcaggtaaccatacaattgcacggcgttcatcaacgtctagcctgtgaaaacgctggggtaacccacttaatggccttgaacttccccttttgccaccagccgcgn

SEQ ID NO: 643101 - DNA, 163 bp, Homo sapiens
  misc_feature (150)..(150): n is a, c, g, or t
gggttacttgagccctggaagttcaaggccccagtaagctgtgatcatgccactgcactccaacctcagtgacaggctagaccctatctctgaaaaaatattttttattaaagttgcaattatctagcttatacagtgaagtagatctanggaactttatatg

SEQ ID NO: 643102 - DNA, 586 bp, Homo sapiens
tactgtttagaaggcaattacctaagtcggagttgtatttctatcagggatgcagttctagatatatactatcagttgaaaacagctgcaagtcattctctagtactagataaagcaccactatacacttacctgacatatgtagagtgaaatacagcagtatgtacggttgtgcctctcagaaattaagaataactaagggtctcaagttcccttatagtaggatacatacagagtcactgagttcccactagtatgctaaataggaaccgcacatgcataaccaagggtagtaactacccccaggaccacatgcaacccccaagtctgaggcacaactatatacttctgccagtgaatagctatacaagcatatataaaggctgtattcggctatcaagcgtacaacctactactttaatattcatactatgtaaatcacatacacaattcaaaatctaataagacaggtgaaacgtctccaaacactttttacataccattctccatacaatttatagtcagcatatttacataaggaagtgtcacacttacaaatgcaaccacaattttcaatcgtcgtcca

SEQ ID NO: 643103 - DNA, 390 bp, Homo sapiens
  misc_feature (29)..(29): n is a, c, g, or t
tcactatccaagactgaaaaacaggctgnatggattatcactctgacccaactgcacatttctaatgtcttcatgttttcaattactccatgaattcccttatctgatgctgattatgcacaggactgtgtaagagttaaacaacacctgacactggtgactcgcgcctgtggtccgagcattttgggaggctgaggcgggtggatcgcctgagatcggaggtttgagaccagcctggtcagcgcggaggaactccgtctctgctaaaaatgcagaattacggccgggtgcggtggctcatgcctgtggtctcggcctcccagggtgctgggattgcatggcgtgagccatggtgcccggtcagtccctgtctctatttctaagaacgta

SEQ ID NO: 643104 - DNA, 982 bp, Homo sapiens
  misc_feature (835)..(836): n is a, c, g, or t
  misc_feature (848)..(848): n is a, c, g, or t
  misc_feature (857)..(857): n is a, c, g, or t
cgggaaggggtttgcagctgctccgtcatcgtgcggccgacgctatctcgcgctcgtgtgcaggcccggctcggctcctggtccccggtgcgagggttaacgcgaggccccggcctcggtccccggactaggccgtgaccccgggtgccatgaagcaggagggctcggcgcggcgccgcggcgcggacaaggcgaaaccgccgcccggcggaggagaacaagaacccccaccgccgccggccccccaggatgtggagatgaaagaggaggcagcgacgggtggcgggtcgacgggggaggcagacggcaagacggcggcggcagcggctgagcactcccagcgagagctggacacagtcaccttggaggacatcaaggagcacgtgaaacagctagagaaagcggtttcaggcaaggagccgagattcgtgctgcgggccctgcggatgctgccttccacatcacgccgcctcaaccactatgttctgtataaggctgtgcagggcttcttcacttcaaataatgccactcgagactttttgctccccttcctggaagagcccatggacacagaggctgatttacagttccgtccccgcacgggaaaagctgcgtcgacacccctcctgcctgaagtggaagcctatctccaactcctcgtggtcatcttcatgatgaacagcaagcgctacaaagaggcccagaagatctctgatgatctgatgcagaagatcagtactcagaaccgccggggccttagaccttggtagccgcaaaagtgttactattatcacgcccgggtctatgagttcctggacaagctggatgtggtggnngtttttgatgtncggtcggangtagttcgcgttagcgcgggggcccccgttggcccctgctggggtacacctcagtgtacacgggcgaggggtcctggttccaggcgacagggggcacctacaggggaaggcccgtcacgcgggcg

SEQ ID NO: 643105 - DNA, 950 bp, Homo sapiens
  misc_feature (866)..(866): n is a, c, g, or t
  misc_feature (914)..(914): n is a, c, g, or t
  misc_feature (917)..(917): n is a, c, g, or t
  misc_feature (923)..(923): n is a, c, g, or t
cgggaaggggtttgcagctgctccgtcatcgtgcggccgacgctatctcgcgctcgtgtgcaggcccggctcggctcctggtccccggtgcgagggttaacgcgaggccccggcctcggtccccggactaggccgtgaccccgggtgccatgaagcaggagggctcggcgcggcgccgcggcgcggacaaggcgaaaccgccgcccggcggaggagaacaagaacccccaccgccgccggccccccaggatgtggagatgaaagaggaggcagcgacgggtggcgggtcgacgggggaggcagacggcaagacggcggcggcagcggctgagcactcccagcgagagctggacacagtcaccttggaggacatcaaggagcacgtgaaacagctagagaaagcggtttcaggcaaggagccgagattcgtgctgcgggccctgcggatgctgccttccacatcacgccgcctcaaccactatgttctgtataaggctgtgcagggcttcttcacttcaaataatgccactcgagactttttgctccccttcctggaagagcccatggacacagaggctgatttacagttccgtccccgcacgggaaaagctgcgtcgacacccctcctgcctgaagtggaagcctatctccaactcctcgtggtcatcttcatgatgaacagcaagcgctacaaagaggcccagaagatctctgatgatctgatgcagaagatcagtactcagaaccgccggggccttagaccttggtagccgcaaaagtgttactattatcacgcccgggtctatgagttcctggacaagctggattgtggtgcgcagcttcttgcatgctcgggtccggacagntacgcttcggcattgatgcagacgggcaggccacctgtttgaacctcntgntggganttactacactacagttgacgacccgct

SEQ ID NO: 643106 - DNA, 1813 bp, Homo sapiens
tctcgcactcgtatcgcgttggtgtgtctccctctgataatgagagtatagttgtactcatacatagtgagaggaatagatttgttgtttcgtggagaacctgttgtatgtcctgcggtgatgtatgataactcctcatctcttcgtgccgactacaattagtgggagggtggcctcacaagatgattatacttgctgttgtatcttgtccgctggggtgtgatgataccaacgaactagatttgtgggtccgaatcatctcataacatgatctgctctcacgtcgttggtgggccggcttcgttgttgatacatcagggtgccatcaggcgttgacctaacatatgtgagctcttggtggtgcgctgttgtctccggtggggatatggtgttttcgccccttgccgcgtccccttcctgtgtgttttcgccgtttgttgtgtgtgggtgtgttccgccagtcttctcctctctctaccgggtgggctactctatgtgcacctcgacatggggtgactcagcctcgtgctcccccctgcgggctagtgaggtgtggtttagtaaaaagatgttaagttgaagtggggtgagggtaatagagttaagatagtagtgtgtggagagccctacgagttgggaagccacgatttgtctgtcaccacgtggagggggtgtgtcccccccccctccggagagggtgcgtgttgtgtcagcaagaggctctcgcctgcatgtggcgggggggcccgccagcgggtgtggggtgggggggtttttctcactcgtcccctcttgtggtccgcctctgttgtcgacaccccttcgtcttcggtaagacggggggggggcccttctcgtgttggtgggggccgactagtccgcctgctgtgtgtcgcgcgcgccccgcacatgggggtcgcttgttgatgttcttcaggaaggtgagccacgttgtttcgccccccttcttggtcctctcccatcttgtgtagccccacttgtctcggcagaagatcctgtggggggcctccacatcttgggcgccttctgctgtgtcgcctcgtgttgtccacccccctcctgggagaggacccccacagaagttttttgataagtgggggcgcgcttctcactggtgtcgctctcgtcgagctcgctcgcacacagcttgcccctctctggggtcgcatcagtgtgtccctgtgtctcgtctgcgcctctgtctgtgtcgcccccccttctggggcgtcttctgtggtgtctctgtggtctgctctgtgagagcctgctctctgtggtgtgtctctctcgcgcttgtgtcactgttgccgcactacgggtctgctggagagagttcacactgtgatagttgctgtgcgctctctgtgccctctttctgcgatatgtctctgagagactctggcactcttgctgtgtctgacacacacagtgatatggcttgtgtgtctccacacacacctctgtttgggctcgccacagaagaactcttaatatgtgataacaggagagaggagagctctctttgcggcacacctctgcttgccccacgccaccacgctcgcacctcggctcgtggctgcacccaccaccacttctcgggcgcaccgcctctgtccctcggcacggggccctctcgtggctttgctcactttgtgccctctgtccctgttcacctcgtgggctaaaggggtggggtgagagggatggagaagaggaggcgccccctaccctggttctggggcttgaggaaaatgacatttgttgaattaaataaagaaattgtccaattttg

SEQ ID NO: 643107 - DNA, 984 bp, Homo sapiens
  misc_feature (16)..(16): n is a, c, g, or t
  misc_feature (18)..(18): n is a, c, g, or t
  misc_feature (900)..(900): n is a, c, g, or t
  misc_feature (948)..(948): n is a, c, g, or t
  misc_feature (951)..(951): n is a, c, g, or t
  misc_feature (957)..(957): n is a, c, g, or t
gacgggggaaccatananccctttaggctaggtacgaggccccgtggttagctgctccgtcatcgtgcggccgacgctatctcgcgctcgtgtgcaggcccggctcggctcctggtccccggtgcgagggttaacgcgaggccccggcctcggtccccggactaggccgtgaccccgggtgccatgaagcaggagggctcggcgcggcgccgcggcgcggacaaggcgaaaccgccgcccggcggaggagaacaagaacccccaccgccgccggccccccaggatgtggagatgaaagaggaggcagcgacgggtggcgggtcgacgggggaggcagacggcaagacggcggcggcagcggctgagcactcccagcgagagctggacacagtcaccttggaggacatcaaggagcacgtgaaacagctagagaaagcggtttcaggcaaggagccgagattcgtgctgcgggccctgcggatgctgccttccacatcacgccgcctcaaccactatgttctgtataaggctgtgcagggcttcttcacttcaaataatgccactcgagactttttgctccccttcctggaagagcccatggacacagaggctgatttacagttccgtccccgcacgggaaaagctgcgtcgacacccctcctgcctgaagtggaagcctatctccaactcctcgtggtcatcttcatgatgaacagcaagcgctacaaagaggcccagaagatctctgatgatctgatgcagaagatcagtactcagaaccgccggggccttagaccttggtagccgcaaaagtgttactattatcacgcccgggtctatgagttcctggacaagctggattgtggtgcgcagcttcttgcatgctcgggtccggacagntacgcttcggcattgatgcagacgggcaggccacctgtttgaacctcntgntggganttactacactacagttgacgacccgct

SEQ ID NO: 643108 - DNA, 193 bp, Homo sapiens
  misc_feature (164)..(164): n is a, c, g, or t
  misc_feature (193)..(193): n is a, c, g, or t
gagatcgcatcagcctgggcgacagagcaaggactctgtctcaaaaataaataaataaataatttccccttattaaattatcatagacacaggacatttcctccgaaactctctttctttccattcctggctgttttttcctcttatttttctttgcactttanaagtaaatttttattcagaaataattttn

SEQ ID NO: 643109 - DNA, 990 bp, Homo sapiens
  misc_feature (843)..(844): n is a, c, g, or t
  misc_feature (856)..(856): n is a, c, g, or t
  misc_feature (865)..(865): n is a, c, g, or t
tgagaggacggtggggcttcaggttgtaattactgtgcacggtcggctgaccatttccagctcgtgtgcaggcccggctcggctcctggtccccggtgcgagggttaacgcgaggccccggcctcggtccccggactaggccgtgaccccgggtgccatgaagcaggagggctcggcgcggcgccgcggcgcggacaaggcgaaaccgccgcccggcggaggagaacaagaacccccaccgccgccggccccccaggatgtggagatgaaagaggaggcagcgacgggtggcgggtcgacgggggaggcagacggcaagacggcggcggcagcggctgagcactcccagcgagagctggacacagtcaccttggaggacatcaaggagcacgtgaaacagctagagaaagcggtttcaggcaaggagccgagattcgtgctgcgggccctgcggatgctgccttccacatcacgccgcctcaaccactatgttctgtataaggctgtgcagggcttcttcacttcaaataatgccactcgagactttttgctccccttcctggaagagcccatggacacagaggctgatttacagttccgtccccgcacgggaaaagctgcgtcgacacccctcctgcctgaagtggaagcctatctccaactcctcgtggtcatcttcatgatgaacagcaagcgctacaaagaggcccagaagatctctgatgatctgatgcagaagatcagtactcagaaccgccggggccttagaccttggtagccgcaaaagtgttactattatcacgcccgggtctatgagttcctggacaagctggatgtggtggnngtttttgatgtncggtcggangtagttcgcgttagcgcgggggcccccgttggcccctgctggggtacacctcagtgtacacgggcgaggggtcctggttccaggcgacagggggcacctacaggggaaggcccgtcacgcgggcg

SEQ ID NO: 643110 - DNA, 400 bp, Homo sapiens
  misc_feature (12)..(12): n is a, c, g, or t
  misc_feature (17)..(17): n is a, c, g, or t
  misc_feature (237)..(237): n is a, c, g, or t
  misc_feature (310)..(310): n is a, c, g, or t
  misc_feature (342)..(342): n is a, c, g, or t
  misc_feature (364)..(364): n is a, c, g, or t
  misc_feature (380)..(380): n is a, c, g, or t
ttcaaaactggnaaatnattaattgctttagccaaattacattgtaattaaatcaagaaggaagaagatctaagagctccattgataggcaagcctagagagaactagctaatttatcatgctaggatattgaaacacagaaagtttacatacatttatgaagggcaatttagtttggacagtgaggtatttgcttagtggaaaaaaggagaattagtctgatcaaatcgtgaagtnatacagtgaacttcaggtgcactaagagggccacatctatatggtgcagctggaatctggttaagtttgaggnacctcttggcctctgaattgatccattgcatnacccagacatttacatagatcngacggtccgatgcacngagacacctgttggactggc

SEQ ID NO: 643111 - DNA, 1056 bp, Homo sapiens
  misc_feature (972)..(972): n is a, c, g, or t
  misc_feature (1020)..(1020): n is a, c, g, or t
  misc_feature (1023)..(1023): n is a, c, g, or t
  misc_feature (1029)..(1029): n is a, c, g, or t
tgggtctaggtagaggctgggtgtttaatcggccgaggccgggaaggggttttatgctgctccgtcatcgtgcggccgacgctatctcgcgctcgtgtgcaggcccggctcggctcctggtccccggtgcgagggttaacgcgaggccccggcctcggtccccggactaggccgtgaccccgggtgccatgaagcaggagggctcggcgcggcgccgcggcgcggacaaggcgaaaccgccgcccggcggaggagaacaagaacccccaccgccgccggccccccagtgattgttggatgattgaaatgatgtgatgtgcagctgactgtgtgtgtgcgtggtcaactgtggtgtgatgtgccaagactgtgcacatgactgtgctgtgctgtgcatgctgtgctttgatgcacatccccaagcatgatgatgcttgcgacagcatgtcatccattgcgagtgacatcaatgtgatgcactgtgataacatgctatgatgaaactgctgtgtttcaggcaaggagccgagattcgtgctgcgggccctgcggatgctgccttccacatcacgccgcctcaaccactatgttctgtataaggctgtgcagggcttcttcacttcaaataatgccactcgagactttttgctccccttcctggaagagcccatggacacagaggctgatttacagttccgtccccgcacgggaaaagctgcgtcgacacccctcctgcctgaagtggaagcctatctccaactcctcgtggtcatcttcatgatgaacagcaagcgctacaaagaggcccagaagatctctgatgatctgatgcagaagatcagtactcagaaccgccggggccttagaccttggtagccgcaaaagtgttactattatcacgcccgggtctatgagttcctggacaagctggattgtggtgcgcagcttcttgcatgctcgggtccggacagntacgcttcggcattgatgcagacgggcaggccacctgtttgaacctcntgntggganttactacactacagttgacgacccgct

SEQ ID NO: 643112 - DNA, 1050 bp, Homo sapiens
agcccgggaggcggaggcgggaggcggcggcggcgcgcggagacgcagcagcggcagcggcagcatgtcggccggcggagcgtcagtcccgccgcccccgaaccccggcgtgtacttcccgcctgcccgggtcatccctgaccgccggctcccgacatcctgcggacctactcgggcgccttcgtctgcctggagattctgtatcgggggtacttcgtctggcatttcggttgcctacctccaatgttcctctaacctactactacaaggatgggctcatgtaaagtgtaccagctgacagcgtatccactattaacgctacctctcatctgggacatgttcctctctggcatggtggctcaaattgatgctaactggaacttcctggacttcacgcctaccatattacagtatattgccttctataatcggagcctctcacatcggaagcagcagccacatccctgcatgatccgcatcgccatacaaccataacccgggcacgccactcctgacgtgataaccagtatacccataaccgtaccagcctcaatcaccgcctttatgacgaccagctagacatggtcgcacgcgggtctggccttacgaaccatggcgaccgcaaacactccttacaccctgccccgtcggcatgtaacacccactcgctctacccatatctctgaccacccggcatacaaaacgacccacgatgccaacaacccttccacaccgtcacgcgcccgccacagcgagaccccaaccccagctcagccccacccagcgccgcacaccaaaccaccagaccacccacccgcacaccaaacaacccccccccattccgtccccgcaacaaaccacccgcgcacgcacccccccctccgaacaccaacccccaacggctcccacacacccacgggccccccccccccggcacccccatcgccacaccgaacacacgccccacggccaaaccgcgccgcaaaccacagaaccccacacacccacgcaaaacacccacccacccacacgccccctgccatacacccc

SEQ ID NO: 643113 - DNA, 147 bp, Homo sapiens
aaataaaaccggggggtcttggggccccttaaggggggattgaagggttttccccttccgggcccggagcaaagggggggggcgactttggggcccgggttgggtcccaagttggggggcttgggggttttttccgggtttttggta

SEQ ID NO: 643114 - DNA, 576 bp, Homo sapiens
  misc_feature (60)..(60): n is a, c, g, or t
  misc_feature (65)..(65): n is a, c, g, or t
  misc_feature (427)..(427): n is a, c, g, or t
atcctgtttgagctgctgagctggggggttctggctggtccctagtgccgatgggcctgncctgnctacggtgatgtcccaccctctgagcacatcttctcacgcccttccaagcaatccctgtgctgctccccctctgaagatgtcttttcagttcagcggagcctcaggccccctgggaattgagctggacccgtgctgctgcccctgcatcgcagacacgctcttccctccctgccttcacggggcctgcaccttcaccatcaccgccaccatcgtccctgtgctgccctgggtgtggcggtggcacgtgcaaagccagtgtgtgctgttgctcaccatgtcatgagtacacacttgttgtttacacagattatccccctgtgatcctggcagcaaacccacaagctggttgtggccccagatnctcagacgaggaacaggggcagccaggattagtgacctgcccgtgttggcaccggcagtggtggagagtgctccagggttcacacccaggcaggctgaccccagagcctgtggccagggcagttgcaggggcttcctcagcagctgcaa

SEQ ID NO: 643115 - DNA, 322 bp, Homo sapiens
gagtgcacgggaaggagatcgggcgtcttgcaggcagacgtatttccttctatacctagagtgctttcggggggatggttgaatgtttgttggttttgagatggggtttcactcttcgttgcccaggctggagtgaagtggcgcgatctcagcccactgcagcctccgcccgccatgtttaagcgattctcctgcgttagcctccctagtagctgggctaacaggcgcgtgggaccacgcccagctaattttttgtatttttagtggagacagggttttaccatgttggccaggctggggttgaacttctgaccttaggtga

SEQ ID NO: 643116 - DNA, 439 bp, Homo sapiens
  misc_feature (4)..(4): n is a, c, g, or t
  misc_feature (6)..(6): n is a, c, g, or t
  misc_feature (11)..(11): n is a, c, g, or t
  misc_feature (13)..(13): n is a, c, g, or t
  misc_feature (27)..(27): n is a, c, g, or t
  misc_feature (33)..(33): n is a, c, g, or t
  misc_feature (64)..(64): n is a, c, g, or t
  misc_feature (68)..(68): n is a, c, g, or t
  misc_feature (79)..(80): n is a, c, g, or t
  misc_feature (87)..(87): n is a, c, g, or t
  misc_feature (90)..(91): n is a, c, g, or t
  misc_feature (106)..(106): n is a, c, g, or t
  misc_feature (112)..(112): n is a, c, g, or t
  misc_feature (114)..(114): n is a, c, g, or t
  misc_feature (120)..(120): n is a, c, g, or t
  misc_feature (135)..(135): n is a, c, g, or t
  misc_feature (145)..(146): n is a, c, g, or t
  misc_feature (186)..(186): n is a, c, g, or t
  misc_feature (188)..(188): n is a, c, g, or t
  misc_feature (194)..(199): n is a, c, g, or t
  misc_feature (205)..(205): n is a, c, g, or t
  misc_feature (225)..(225): n is a, c, g, or t
  misc_feature (227)..(227): n is a, c, g, or t
  misc_feature (265)..(265): n is a, c, g, or t
  misc_feature (272)..(272): n is a, c, g, or t
  misc_feature (278)..(278): n is a, c, g, or t
  misc_feature (283)..(283): n is a, c, g, or t
  misc_feature (285)..(285): n is a, c, g, or t
  misc_feature (317)..(318): n is a, c, g, or t
  misc_feature (329)..(330): n is a, c, g, or t
  misc_feature (333)..(333): n is a, c, g, or t
  misc_feature (373)..(373): n is a, c, g, or t
  misc_feature (375)..(375): n is a, c, g, or t
  misc_feature (381)..(381): n is a, c, g, or t
  misc_feature (386)..(386): n is a, c, g, or t
  misc_feature (390)..(390): n is a, c, g, or t
  misc_feature (395)..(395): n is a, c, g, or t
  misc_feature (409)..(409): n is a, c, g, or t
  misc_feature (411)..(411): n is a, c, g, or t
  misc_feature (420)..(420): n is a, c, g, or t
  misc_feature (425)..(425): n is a, c, g, or t
  misc_feature (427)..(427): n is a, c, g, or t
  misc_feature (437)..(437): n is a, c, g, or t
taangngtgcncntttattcaaccggncccaantcaatgtacaggtaagccccggccgcccccncccncccccagggannccaaaanccnncaaacaccccaagtngggggncnaaaaanggggaagggggggcncgaaggcccnncattcaaaaaaaaacaaaaaaaaaaaatattaaggccaananctcaannnnnntttccnttacaaaatttacacgaaancnatgctaacaccccccccgtgtggacttgggagaggacngggccantccccntaaananaagtgggggggcttttaggatggcaagggacnncccttaacaanncancccaaatttggaaaaactaaaaaaaaaacaacaatgtgcnancaaagnccccngccncattntgaaccttgggggntnccccccccnacccncngccgtcaccntc

SEQ ID NO: 643117 - DNA, 479 bp, Homo sapiens
  misc_feature (385)..(385): n is a, c, g, or t
  misc_feature (410)..(410): n is a, c, g, or t
  misc_feature (479)..(479): n is a, c, g, or t
aaggagattctgaatgatgctgccattgccagaccttctgctaccaaacagagcgaagaggaagagggggcagtgtttggtcaagacagcccacgaaacgttggcgggagtgagcacattagcaatggctaagaacatgcttgaatcatttgtaacaacccaggacagagatgccacaagaggactttggggaaaggcgaatccactcatacatcttggagttgttttttcaagttcagaaaatgaaccttcaccaaggtcttggaacatgaagcagagactctggtgctgactctatcatttgagctcctaagggtactcatgcccagtggagcatgcacaccagcaacaccgccaacaccatctcggtgtcccaccccttagnggaggaagaggacacagaggggcgnccggtaataaccctcatttcctctcttccaccccaccacatcatcttaataaaacatgatcggccaagn

SEQ ID NO: 643118 - DNA, 363 bp, Homo sapiens
gagtagcacggataagacatgcagatacaggttgctctgagattctccactgcacattatagccaaaatgtctaaagtcaaaacaaagagagaatgctaaaacagcaagagaaaagcgtctagtcacctatgaaggaacccccatcagactaacagtagatttctcagcagaaatcttacagaccaggagaaaatagaatcatatattcaaaatactaaaaaaaacttctgccagtcacagatactatactcagcaaagttagccttcataaatgaaggagaaataaagtcttctctagacaagcaaaagcagagggaattcatcaccactacacaagaactacaagaaatgcctaaggaatc

SEQ ID NO: 643119 - DNA, 396 bp, Homo sapiens
cagctatctagaggatcccgcgctgattctgttgttgaccgcgattctgatcatcgccccgcaggaagcggcaggatgctcggtgtggcccaagcctggttgtcgaaaagctttggctggtactacatggtcgtgatcgccgcctacctgctatttgccccacgggatggcgctgtaaagggcatgtactcgctcgctgcgtccttggccggacagttgggcgactcatggattgccgcctggcaggtggctccagatgaagaccgttatgcgctggtcgcggttgaccaaggcgcggtcctacccggctgtgatcaggtcggcagcgcggaagatacaacgcggaaagtcgctcagatgctcggcagttcgatttccttcaaggacgtctatctg

SEQ ID NO: 643120 - DNA, 118 bp, Homo sapiens
gtctagaggatcccgggtctcattggttgctaaaaagcaaagggaaaggaaaactcttcagcgcaaggtgaaacgactaagaagcaagaggaaaaggagaagaagggaaatgggaaag

SEQ ID NO: 643121 - DNA, 946 bp, Homo sapiens
  misc_feature (3)..(3): n is a, c, g, or t
  misc_feature (72)..(72): n is a, c, g, or t
  misc_feature (94)..(94): n is a, c, g, or t
  misc_feature (98)..(98): n is a, c, g, or t
  misc_feature (114)..(114): n is a, c, g, or t
  misc_feature (118)..(118): n is a, c, g, or t
  misc_feature (134)..(134): n is a, c, g, or t
  misc_feature (160)..(160): n is a, c, g, or t
  misc_feature (369)..(369): n is a, c, g, or t
  misc_feature (374)..(374): n is a, c, g, or t
  misc_feature (442)..(442): n is a, c, g, or t
  misc_feature (453)..(453): n is a, c, g, or t
  misc_feature (459)..(459): n is a, c, g, or t
  misc_feature (461)..(461): n is a, c, g, or t
  misc_feature (517)..(517): n is a, c, g, or t
  misc_feature (519)..(519): n is a, c, g, or t
  misc_feature (529)..(529): n is a, c, g, or t
  misc_feature (534)..(535): n is a, c, g, or t
  misc_feature (538)..(538): n is a, c, g, or t
  misc_feature (562)..(562): n is a, c, g, or t
  misc_feature (570)..(572): n is a, c, g, or t
  misc_feature (596)..(596): n is a, c, g, or t
  misc_feature (608)..(608): n is a, c, g, or t
  misc_feature (614)..(614): n is a, c, g, or t
  misc_feature (618)..(618): n is a, c, g, or t
  misc_feature (623)..(623): n is a, c, g, or t
  misc_feature (627)..(627): n is a, c, g, or t
  misc_feature (640)..(641): n is a, c, g, or t
  misc_feature (645)..(645): n is a, c, g, or t
  misc_feature (651)..(651): n is a, c, g, or t
  misc_feature (659)..(659): n is a, c, g, or t
  misc_feature (664)..(664): n is a, c, g, or t
  misc_feature (668)..(668): n is a, c, g, or t
  misc_feature (680)..(680): n is a, c, g, or t
  misc_feature (688)..(688): n is a, c, g, or t
  misc_feature (743)..(743): n is a, c, g, or t
  misc_feature (791)..(791): n is a, c, g, or t
  misc_feature (939)..(939): n is a, c, g, or t
ttngcagtatgaaacaaagtcaacattgctgcattaaaaattcatatatgagcagaacagctagtgtttgcngagggtagttattttaattttnttcntctcttgaagattganagcnttcagaaatgtaaggncatacatggaaatgtccttataaggngcctcgaaaatgggacagattatatcattcctgaaggcatataccttttgttgagagagagattccaggtagatagcatattcaaaaatcccttcttagcaaaagagagacaagtagttaaaactcttgatacttcagagttgctacaaatttgtttttcccttttaaagtaaaatgactcacgatgtggaaatacagtggatagagtnctggngcagaagccacctttatgcccaataatagagagtaaatacatatatacccaatgacaatcattgtgcnccgtaattgtntgaccngngggactataaatacacatttaataggtaatattatcaagacacatttccatataananagttactgtntttcnntcncccctttcaaaaacaaagacttcnctgtcaannntccattatcaatcacttgccactntagcagccagantctggnaacngaganaggnaatagcacttcannacangcacantctaacanctganagtncattcacaaganagattttncaaacattaaagcatctaacacataatacgaatgttttcagcagctcatccagtnatcacctgatgacatttattactgaatattacatacatacattctgtntggcagatagagtcagtacagacaaaacaaaatctgccttaggctgtgtgataaacctatcatacctccatcatcaaaaaaccttcagaataatttgggggatgcttacaaatgcattcatatacacaaggagctggaaatcttaatntgttgcc

SEQ ID NO: 643122 - DNA, 427 bp, Homo sapiens
  misc_feature (98)..(98): n is a, c, g, or t
gggggggggtggtcttttctttaaaccccccccggggcccaaaaaagggtttttttggagggtttttctttttgggggggggcgcccccggggggggnaaggggccccccccccttctccggggcccccctttccccaagggggttctcttttttttccccccccccccggggggggggggggccccccttttttgggggggcccctaaaaagggccccccccaaggggggtttttccccttccccccccggggggggttttaaggggagagggggccccccccccttcccttttcctcccccgggccctgggggtttttttttttttttttttttaaaaccccccccccccctgttggggtttttgggggcccccccccaagggggtttttttccctttaaaaaaaggcccccccccgggggggga

SEQ ID NO: 643123 - DNA, 361 bp, Homo sapiens
agccgcaccgctctcgtgaactccaaagagagctttatcattactgcacctgattttgctcattaatctacgtcaccttccctaataaaagtcatgtggactaaagtctaggggcctctgttctgcagaacagagtgcctcctggtcccccactttctagatgtaaaagagtcttgtgtgttttgttatgctgtgctgtccctctttcaggatctcctgttgccctgcagtgctggacgcagcacctgtggataaccaggagtttgagtgagggtgttgtcctttctcattctgatatttgaggtttctttgcctaagagctctccaacacttgatcccatgttaatcgtctcagtgtgcc

SEQ ID NO: 643124 - DNA, 410 bp, Homo sapiens
  misc_feature (108)..(108): n is a, c, g, or t
  misc_feature (285)..(285): n is a, c, g, or t
  misc_feature (307)..(307): n is a, c, g, or t
  misc_feature (385)..(386): n is a, c, g, or t
tgtccccagacccctccttgccccagcaccacccagcttgccttgggtgcctcagccccttcccaattgggagacaggtatggggcgaaagctggaagggcccgggcnctgagaggggcaaaagtgattgcatggtttcataaagattatatgttcccaatgtgggcggttagctgcatgtgtgaagattataagttgtcaaagtcatttccatgatttcgtttccctactgctgtgagagaagtggtcacaatgtaccaaaaggtttctctgtgtatgtttgtntagtataatagtcataataaangtatgatataaaatatagcagaagctggtcacttctttttgaaccttatagtccatctccaggcaagaaaagagaaannataaataatatttaaaggagagca

SEQ ID NO: 643125 - DNA, 347 bp, Homo sapiens
acgatctagaggatcccatgggagaatgggcactcaaagaaaagaaaaatcggtacgtagaatgcatacgtagtctcaagagaccctgaatagcagaaacaatctggagaaagaacaaggtggcaggactcccacttctgattaactacaaagctaacatagtcaaaacagcggggtactggcgtacggacagcaatagagaccaagggaatagaagagagggcccaaaaagtaagtcctcacatattgggtcaaatgattttccataagtatgacaattcttcattcaatgaggaaaagacagtcttttcaacaaatggcattggaaaaactggatatgcacattc

SEQ ID NO: 643126 - DNA, 365 bp, Homo sapiens
  misc_feature (61)..(61): n is a, c, g, or t
ccaccccacgcaggatatatgcacacctgagagggagagccaactcaagaaccaacctgcncttgttgagctcgtgaaacacaaggtagagaagttctccaagcctcacaataagaacacttggccgagaagggtaaaaaccttgttgtcgcaagtcaagctcctttaggcttataccttcccttttaaaagcttctcagcctcccttgagaataagagaaagaaattgaggttcaaaggcttattcatcggtttttctttttcgtgggtgtaaagcccacaccgtgttataaaaaccataaatttctttaaccatttgcgcctcttttctctgcgcctcaattaataaaaaatggagagtatct

SEQ ID NO: 643127 - DNA, 565 bp, Homo sapiens
attcaccaacatacatttgggaaggcaagccaataggaacagagaaagcaaattgaaagtaagaaaaatcaaaaccaggagacaattcttcctgttacagaactaccaacaaccactagagggtgagtctgtcacactattatttattcgtaactaccaggaaggaagaaacccattatctagtgagctcatctctttctggctcccacaggagaggataatctattgtgtggagctctccaaataaaccattgtttgttctacaaaaccactcccactgtcaacaaatactcaaggttgccctgagcagaaggccctgctcacaggtatcaacatcaactatgcaacagtgattcagatggacaaagcatttagtaaaccatgaccaagatggtcttaaaataacacggaaacaggaccaggcatggtggctcacatctgtaatcccagcacttagggaggctgctgtgggcggataaactgaggtcagaagttcgagaccagcatgaccaacatggaaaaacaacatctctactaaaaatacaaaattagctggggatggtgg

SEQ ID NO: 643128 - DNA, 168 bp, Homo sapiens
ttctggtacgcatgcatttgggaggctcagaggagctgccccttctcactcaccactaccagtccagcctcagtaaggccccagagagaccctgcaggaccacggagggagcgacacttgaatgtagaataggcaggtggccctgccccaccctatccagccattccc

SEQ ID NO: 643129 - DNA, 614 bp, Homo sapiens
aatagtatctgggatatgtccatcaccagactctgagcttaataaggcagctgaatgaagggaggtaacggacccctgagaggggcactgaagtctgcagtggggggggaggggcctggacacaccccttcccccccagactcctccccgtcagggtcagctcagccatggactttggacctggataacgaagagagaagctgcactttggtggatctgatttgggattctcagcttttgcaaaagtggagtgctgatagtggggtatttgtatgatctcctggagcagcaactgtagcacaagagtaatgaaaggtgcatgagctgccgtcctaatcccatatgtccaggaggagtgcatcgcctaggaactgcggtgctaagggacgccgggacaagcaccaggtgcagccttgaaaccgtcccctggacctgcactctccccaggtgggtggccaaggatgcttgaatgaagcagtcgtgcagcggcttgtgcgtgtgtgggctgctatcctctttcgtggcctggaatgccctgctgctccttcttcttctggacgcgcccagcaccttggcaggccaccctctagtcagctgctctcgatggcgaccca

SEQ ID NO: 643130 - DNA, 142 bp, Homo sapiens
taaatattgctagggtgttttccctcagcataataaaagctcttaatgttatcggttgctcttcagagattgacaattttattttataaatgtcttttgcagaagaaatattgatctcctactcaggcattctatattgggc

SEQ ID NO: 643131 - DNA, 111 bp, Homo sapiens
gaccagcgctcgccgtcctcgattgaggcagcagctctgccgtagccggggcggcggcagctggggcggcgggggccttcgcggctgtcctcctccgtgtgaagccgttca

SEQ ID NO: 643132 - DNA, 886 bp, Homo sapiens
gtgggcggccggtgtggcgcacgcattgttgtgctccaacctccctcaggtcctgtgttgccgcactctgctgctatgagcttcctcaaaagttccccgccgctgggcctatcggaggggctcctggcggtgagaagccgagacaactgaggctggtgctgaccgggaagggcctcgggatcccgctaccctttacatcgctgagaagccgcctgtctggttaggatggctctggattagggattctcactggaataccccagcgcattagtttacatgcattatccagggaccgaagtgactgtctaggagagcattgtatgtatggtgaatgccacatttgacgaagaatcaataagaacctgtgtgcttgatgaagaatgagggaacgacagtgatgatgagtgttgaacctattactgaatttatgaatttgtgcctaggtgataaattcaggcgtgggacggcgatgtgcactgcaatgtgcgaaatgccaaggcgcttgaattccaagatcctgaggagtgaggaattcagatgacctacgagtggaggaagaatatgatgtggaagctgattgaacaagggacaggtggacatcccgtaccattttcacaccctatgatgaaggattattcccatctaaacgagcaagaaggtcaaagccacagctggagaagattagaacggaaatgcttctcaggctgtgaagcaggcagtataatatggctggggtcagacagacaattcactcacgacgatttgcaagatgggtggcgggggtcccacccacacggtcgcggcagttgagttcatttggtcacgcaagatttgcagtagacatgcctgtggggaaaaaagggctcccttggtgagaaagaacgtc

SEQ ID NO: 643133 - DNA, 389 bp, Homo sapiens
atctagagatccccttgccaggtctctacctattcacatccaggcctgggccccgggctcataaatctcgcaggaagcgctctcaggaaggacgctacgggccgggggcagcctcggagtggaatgaagagggttggactctgagaatgactggccccagccagattccccggggggcagcccgtcggttgggaagtctccttcccggcggggcctgcacacccacccctccggccacatcagccccaatatctctgcatggagcccagggggcaccttcccttccgtggctcagagagcttcagagacagacccttactccgtgcatggatgtccatccaagggagggggctcaggctgtcccttccagctcacgaaataggtagaga

SEQ ID NO: 643134 - DNA, 685 bp, Homo sapiens
  misc_feature (28)..(28): n is a, c, g, or t
  misc_feature (127)..(127): n is a, c, g, or t
  misc_feature (131)..(131): n is a, c, g, or t
  misc_feature (148)..(148): n is a, c, g, or t
  misc_feature (155)..(155): n is a, c, g, or t
  misc_feature (162)..(162): n is a, c, g, or t
  misc_feature (165)..(165): n is a, c, g, or t
  misc_feature (176)..(176): n is a, c, g, or t
  misc_feature (182)..(183): n is a, c, g, or t
  misc_feature (200)..(200): n is a, c, g, or t
  misc_feature (223)..(223): n is a, c, g, or t
  misc_feature (229)..(229): n is a, c, g, or t
  misc_feature (236)..(236): n is a, c, g, or t
  misc_feature (245)..(245): n is a, c, g, or t
  misc_feature (249)..(249): n is a, c, g, or t
  misc_feature (264)..(264): n is a, c, g, or t
  misc_feature (268)..(269): n is a, c, g, or t
  misc_feature (271)..(271): n is a, c, g, or t
  misc_feature (273)..(273): n is a, c, g, or t
  misc_feature (276)..(276): n is a, c, g, or t
  misc_feature (300)..(300): n is a, c, g, or t
  misc_feature (309)..(310): n is a, c, g, or t
  misc_feature (322)..(322): n is a, c, g, or t
  misc_feature (325)..(326): n is a, c, g, or t
  misc_feature (334)..(334): n is a, c, g, or t
  misc_feature (339)..(339): n is a, c, g, or t
  misc_feature (349)..(349): n is a, c, g, or t
  misc_feature (397)..(397): n is a, c, g, or t
  misc_feature (403)..(403): n is a, c, g, or t
  misc_feature (406)..(406): n is a, c, g, or t
  misc_feature (436)..(436): n is a, c, g, or t
  misc_feature (509)..(509): n is a, c, g, or t
  misc_feature (523)..(523): n is a, c, g, or t
  misc_feature (624)..(624): n is a, c, g, or t
tcccaagcactgatcccacatccctgtnagcagatgcctggtcccacccaggcctggataccacctcccatggccctgaggctgggctgcagtttcccgacagcctaggaccgctgggactgctgcntctncctctgctctgctcttnccaaggncaaggtngcnctgcttctttnccaacnncaccccccccacatgcnccagggtccctcctgtacatganagggtnaccactnaccagtttntgtnggggcctcatctgtnattnntngnggngcccagcccggggtaaccactacncccccatcnntcgttgctgttnttnntgctccangtttngttgcagganctgctgctggttggtaatgacacgccggatgctgttgacaaagttgcnctggtnatnggggatgaggccaatgaagatttttttctntgaagagtacaggagcataagcacgcggatcttacacgatgctttgtaggaaaagtgcacgcagccggcgaanattgttcatgatcnggcacaggctcttcagtgtctccaggtccttggtgaagtggaactggaccaggcgcgagttccggaacagcggcactagggtggtcagcagctgctgcggngatgagctgcatgtacagcttccttggccactgctcggtcctcaggatctccccctggttc

SEQ ID NO: 643135 - DNA, 643 bp, Homo sapiens
acaaagtgctccacgtctctgttcgagtgcggaagacacgttagacaccgtcaaagaaagtgccataagtgcaatgccgcatttggtgccaacgactcccaccgcatatacatcggatgaggcttgtgaatcacagcatctgcatctgtttggtccagttcctcagcattgttctgcagttggagcatgtcctgtattggccgagcatcaagtgttttacattccatttgattcgctcttcagaaaacaaccgacatgttgattagacgtcccagcatcggtttagcagaactaacccggtcacattccacaggtctgtcttagccaacgtttctcacaaaagctgctgcttgcctcaaggactgtcctcaagggttgtttactttttttgagttaaagctgcctcgaccagatctcccattccagcttaacattaacttaactacccagaaccaatgtgaacccatgaacacgagtgagcctacagacctgtctttgaaaacaagctgtctagtcaactgggcagtggttcatttgctgaaaagcttgtattgtaatttttgtattgtctactttttttgactgcctgtagtgatggatgtgcaaatgcttcattgaaatacattaaaaatctatgtatgta

SEQ ID NO: 643136 - DNA, 346 bp, Homo sapiens
atactatacactcagttcgtacctgtgggtagcagcacctaggtgatcagttttgcaggtggtaaagccatttaccaagatagttgtaggtaagaagggcagatttattagagaaattgtgaaaatatgttgcagtgggcagctcagcagagaaggggctacctgcaaagaggcaagggctggaggaaagttttatagggtcctgctgaagggtgctacgtgctgaaatgaggtcattgtgcccgcaggttgtttgtgattagctgtttctaacaattgttcatacaataattgttcattattgttctcaacttggggctctccccaacctggggacccttcctta

SEQ ID NO: 643137 - DNA, 203 bp, Homo sapiens
gctcgagcagtggtgggagaagctatagggtatgacagctggagggagtgagggaatgtcacccacagctcttttgtcccccaggatgcgtcgtgcgcggaatggtgagtagatggctttgtctggccaacctggggctccacttgagcggagtggggagggaaggataggagctagttgcccaaccctttccccaacaattg

SEQ ID NO: 643138 - DNA, 622 bp, Homo sapiens
caaggatatttatctttctgtggctactgtgaatgggattgtgttcctgatttgggtctcagtttggacattattggtatatagaaaggcaactgatttttgtgcactgattttctgtctagaacttgctgaagttgtttatcagatcaaggagcttttaggcagagtctatggggttttctaggtataccatgacatcatctgcaaacagaaatagtttgactttctctctttctatttggagctctagaatttccagtactatgttgaataggagtggtggaagtgggcatccttgtcttgttccagttctcaaggggagtgcttccagcttttcctgttcagtatgatgcaggctgagggtttgacatagatggttcttattattttgaagtatgttccttcaatttcaagttgttgagggtttttaacatgaagcgatgttgaattttaccaaaaccctttttttgcatctgttgagatgaccatgtggttttttgtctttagttcttttatgtgatgaatcacattcattgatttgtgtatggtgaaccaattttgcaacctatgggtaaagactatttgattgggttgaattagctcttggaatagctggggtaca

SEQ ID NO: 643139 - DNA, 1143 bp, Homo sapiens
  misc_feature (290)..(291): n is a, c, g, or t
actgaagctccgtcacacccgaagttggacctaatctagtcacccgtatagaagaactaatgttagtagtaagtaacgatgagaaacagttcgtcctccgcgatagagcgctgctgtcatgattagaaagcatctgagagctgacaagttgaatcagcccgatatatctacaagtgcaaccaagcaagtcattattaccctcactgtcaacccaacacaggcgatgctcgattaagggaacaggttatgaatagaacagtaaaagggaactcggcaaatcttactcccgnncctgtttaccgagaaagacgatctacctctagcatcacgcagtattagaggcgaccgccttgtcaccgagtgactacatgttataacgggccggcagtacccctgaaccggatggctaaacggtagccatccagtccacgttgttccgttaattagaggaccttgtatgacatggcgtccacgtagggttcacgctcgtctctgtacgtttgtaaccagtgcaaattgacctgaccgcgtgaaggaggcgggcatgacgacaggaagaggagaagaccctatggagctttaatgtattaattgcaatacagtacctaacaaatgccacaggtcctaaatgtacgcaaagctgcatttagaaatttcggttggggcgacctcggaagcagaacccgagctccgagcagtacatgctagagacttcagcagtcaaagcgaactactatactcgaattgaatccgatagcttgaccaaccggaacaagtgaccctagggcattacagcgcaagcctatgctagagtccctatcaaggataggagttaagaactcgatgttggatccggaatcccgaggggtgagccgcaattaaagggcgttgtcgacagataaagcccagggagcgggagtcagcgggaggaaacccgggcggggcaacacgacgctaaaatccccccggtcgaaacggcaagagaacaaaggcgcacaaagacgggccgcgaaagaacaccaccatattataaccccccccagaaaaggtgtgtcaacaaaaaaacgacaaacagaagagcggggacaataacagcgacagagacactcagaagacacgagcataaacacgcaaaaaaagcaa

SEQ ID NO: 643140 - DNA, 702 bp, Homo sapiens
gggttgtgtgaaacacccgggttgtttgccgctttataaccaacatgggaacacgatgttggtggaaaccacccgtgggtgaaatttgttcctaactgtggaactcccacaggcttttacgggcttttcgccacgaatttttctcagccccctctttgtggcgcttcaaccaaaaacaactctgtgggaattgttgtcaccacacgggtatacaagagagaaagatgcgcacaagttttttctcggagggccctctaacaggattttcccccgtccataggttaatacccacgagctctggagtttgtcgtgaggacacgaggataattttttgagaaatgttgggtgcggcccttaaatagggcacgggcttcttagaagaagacacttcgagtataaagagtttttcacggagaatatggcactcccctcctcggataatgtttcccctcttggtagtcgtccgagaggagtgccacgcttctaatggttgtgaaacgcacaagcactttttataaagcttccacgctcccacgagaacctcgctgtgaaaattaagaagacacagagttccacccctatgaacatccgggattttggccttttttgtattgggaaggttaaccctgttccaatttttttcctaatcccatttggttttgctcggggtaaataggggagcaggggtacccttttggttta

SEQ ID NO: 643141 - DNA, 229 bp, Homo sapiens
ataattgtggcgataatgcagtttattttattgttagcattgtcatagcgagaaatagtatggtatctggttaaaaaacaaactattaaggggtaatggcaactacatgttcaatttcaaattgacaagtaaatattgagccaatgatgcactttactaaaccagaaacagggaactgtcttacgttgtctgagcacagaagggactcagcgatactcagagattcttc

SEQ ID NO: 643142 - DNA, 234 bp, Homo sapiens
ttactagcatgccaacctcaacttatagtgaaggaagcactccactaacaaatatgtctttcagcaccacgccagtggtcagttctgaggctagcaccctttccacaactcctgttgacaccagcacacctgtcaccacttctactgaagccagtttatctcctacaactgctgaaggtaccagcataccaacctcaagtcctggtgaaggaaccactccattagcaagtatgc

SEQ ID NO: 643143 - DNA, 298 bp, Homo sapiens
aaaccgtttattatccttttttcccttttttggttttaaagttagggtttttactcccggggtttttttggaaattgttccccttagcctaataaaaatttgtttttttggtactcccctttgccctttcccccttttttggttttttttttcccccttttccgccttttggggggaaattttttttttttctttttgaatttacctttttaccttttccctctgggttgtttttgggtttttaaaatttttttcttttggattgttttgccaattccattaaattttttaattttga

SEQ ID NO: 643144 - DNA, 116 bp, Homo sapiens
aattcttgacttcgtttttgaaaacttacttcattaaaataaattttttttagagacaaggtctcactgtcttgcccaggctggtcttgcaatcctgggctcaagcaattcgcctg

SEQ ID NO: 643145 - DNA, 453 bp, Homo sapiens
ggcactgtagtcccagctactcagtgaggctgaggcaggaatcacttgaacctgggaggcagaggttgctgtgagccaagatcacaccactgcattccatcctgggggatagagtgagactctgtctcaaaaaacataacaaaaaaaaaaaaaaaaaaacaaaaaagcccctccaaaattgtgagaattaattttcgggttttttttggtttgtttgtttgtttgtttgttttttacgcagtctgtgtttttctgttaaggcggcacaaaacggactaaaacagcccctttgtgacttgcaaggttgaggctgcaccctgcttattccagcaaccagcagggttgttttgggacgctccaggattcccttgtgcctggtacctcttgacttcacagactggctctttctctttggtttgctgcgtgcccatttgcttggcgggggatcctcta

SEQ ID NO: 643146 - DNA, 107 bp, Homo sapiens
gaggccacacatgtttattaggacggtcctgacacctgcctgcggggaaggaccaccgagaccagaacctgcctgccatggggtgcggggacagaccggtgcatggc

SEQ ID NO: 643147 - DNA, 182 bp, Homo sapiens
gggccttggacatgatataaataagttccctgctcttcactgacacttcaagacaatagtctatccctttttcgtccctaaaatcttttcaattgttgtcaccagataccagctaccactccctcctgccgtcatccaatgatctctgccaccatccacatttcgtaaagatttcagtggct

SEQ ID NO: 643148 - DNA, 302 bp, Homo sapiens
tgcctgtacccctggagtgatgcaacttcccagtcctgagggatatgtcttgggcctccacaaattcacccaggctctgatggaaacactgatgctaggtggtcggctgggctccctcaccaggcctggcagagggctcagctcagaatcagctaagcagggctttaaatgcatcatctcattactcctcaccacaacctatgaggtaggtttttttatttttatttttatttttttgagacagagtctcactctgttgcccaggctggagtacagtggcacgatctcggctcactgtaacc

SEQ ID NO: 643149 - DNA, 183 bp, Homo sapiens
tcgatacgacttctatcttttatttttctctctgtatgtatagtaggcacagcggtgtcgccgcgtaaagcagtatagtgtcgatctcctgacctcgtgatccgcccgtctaggcctcccaaagtgctgggactgcaggcgtgagccaccgcgcccggccaacgtcattttcttttcaggagt

SEQ ID NO: 643150 - DNA, 308 bp, Homo sapiens
  misc_feature (21)..(21): n is a, c, g, or t
gggcacgtcgcccgatgaatngagtggccagccagtgccattccactccactcaggttcttcagggccagagcccctgcaccctgtttgggctggtgatctgggagttcaggtgggatgctcacagcctccttcagaggccccaccaatttttaggccatttcccagtgtgtggaagctcatgtgggcccctcagggttcatgcctgggaagtgttgtggtgggggctcccaggaggactggcccataaagcccttagaaatcggggatccttaattggaattaatcatacgtggtctccccctgcga

SEQ ID NO: 643151 - DNA, 547 bp, Homo sapiens
gtgggtgtccgccttcccccccccaaattccacaccccgcccctttcccggatggaattttttgggcctaatcatgtggtcccccagtcccgcttttgggactttgtatctccgttaaaaaacatgaagaagttttcaggggagattgtttactgtgggcaggtgtttaaaaagtcccccctgcgggtgaaaaattttgggttttgggtgggttataattcccggaagggcccccccaacatgtaccgggaaatccgggcccttccccccccaggggttttcacccagtgctaccaaaaaatgggggcccggccccgggcccgagccccctccatttagtttattaaggtggaggagttctcggccaacaaattcccccgggccggttgttaaacagttccccgattccaagattaagttccccctgcccccccgggtcttgggccgttagcccaaaccccgttttccccccaaaaggccccacccctttttttaggggcagggcccttgtccgggggggccccaaaaaaattcaggaacgccccca

SEQ ID NO: 643152 - DNA, 266 bp, Homo sapiens
agatggaatttcactcttgttgcccaggctggagttcaatggcacacaatctcggctcacggcaagctccacctctcgggatcaagcgattctcctgcctaagcctcccaagtagctgggaatacgggcatgtgccaccacacccagctaattatgtatttttagtatagatggggttgcctatgttggccatactggtcttgaattatggacctcaggtgattcgacccctgggcttccaaagggtaggatacagattctcctca

SEQ ID NO: 643153 - DNA, 1352 bp, Homo sapiens
gaggcgttgagtgcagccagtgcaagggcttctgctgagtgagtgcgcaggcgcgagcttggaggaagaacgcagatagagtattagtacttcctcttgcaaatgatagaggcattaataccaactacttaacaaaatatagtcaataggttacataagatcatcgcttagcgtcacaggtttttaaccgtaaatttccaatagcttaagcatttttagagacgaaacatctgcacaggacattcagaaagcagtcagcctatgacgcgcacaggcaacacgccatcaccacaggtttcctcaacacaccatgtcaccgcgcgcgctcgcaccatgcacaggcttcctttcgattggccgctcccccccactgctcattccacaccagaccccctcttgccgcacgcaccagggcacctaaccatggatgtccccccggcaatttaaactaacccaacataagacactgggccaacgggctttacctacgcaaccttcaccatatgtcgtacacgcgtgaacccttttgatgaccacggctttaacaacggctctaacgcttccttacacacacggtccgctacgccggtgactttcaccactattactactctcttgacaacgcgccgcactccctctcttctaatcaacacaccatgacaggaattccacacaccccccggaccagggcttgacgctttcaaagcacaggagcccttttgtgcgaatcgtcccccgttggaaccgccatcgctcgcatcgacactctggcgtcgtcactttcctaccattgaccctaagcttcaaccgccgccatttcatcacttacaccacagagctcgacaacgaaacacatctcgggcaacacgaatcttaccattatggcgcgaccgcttgggcctaccaggcacacctcgccaaccccacaccctcttgccccactgccccccacactaccgcacccccttcggaacccgcttggccacccatcacctgtggcacaccatgccgctaccagcatcaccgcggcacaagccgccggcaccacacacatcacccccaccctaccaacgcaacgcacctctcgtgccaccccaccttaccccacccgtctactcctaacccccctatacccctccaccaccacacacactacacactcaattccaccctctccacacaccccttcccaccctgtcttctgcacacccacctcgccccaccaccaaaactcacactcccagcccccctcacaacacacacccactagcatcccgcgctacacccatgtctcccaacctcttcacaaccacaccacttcccccatccaccaccccccccactctcaacct

SEQ ID NO: 643154 - DNA, 570 bp, Homo sapiens
aagactttaaaaaaaaaacccaaattctaagcactgactatgaaagtggcctttgagaagctggttattcattatacaaaaagtattggcccattcctattctaagattggcagaatatgtcaccctatctagcttttggagttggctatctggttcacaggtggctatttataatttaaagtggacaatcagaaacctgtttccaagaacctgtattctattccttactgagtgtcccttctttaaaatagtgttggctgaattaagccgatgggggcagttggcgttaaagtggtggcacacaagggcacaagtatatatgtacagagtttggaatgagggataaatagaaagcaagaatggaattaatggaaaagaacttcggtctgtaaggccattctctaaattcttagttaagccaaacagtccactgtgtggttggagggctcacatattacataaactctccatgagtaccacatgggcgactaattacctaaaccaggccaggctctgggaaatttcgggaaattcacaattaccagacaacaaaacaagcaccagacatc

SEQ ID NO: 643155 - DNA, 131 bp, Homo sapiens
cctagcgtagtcaattcaaataacatatacaaagcaacttatttatggctaatggaatataacacataaacaattttttcttaagtttctgtttaccatcatatgattgtgttcatgcaagtacaatcatt

SEQ ID NO: 643156 - DNA, 230 bp, Homo sapiens
tttttttgggggggaaaaaaaaaaaaggggggttttttttccccaaaaaaaaggtccttttttttttcaaaaaggggggggaaaaacccccgccccaggggttcccttttttgaaaagttattttaattgggccaaaaaaacaaaaatttttttttttttgaaacccctttgttttttttccaaaaaaaaatttgggggcaaaaaaaaaaattaaaacccaattttttta

SEQ ID NO: 643157 - DNA, 200 bp, Homo sapiens
gataaactatggagatccccaggacttttttgtttttgagatttaaagttttaagggattgtcaatagaaatcaaaaaattaatcattggacaaaggcttttccaaaaattgggggttttttttttttgttggatccatttgagtcccgcatgctgtgaaaagctgagaacaaaagcattaaattggtttttttcgggga

SEQ ID NO: 643158 - DNA, 371 bp, Homo sapiens
tacaggatcctatgtcatcccccttcgtgtgcatgctgctttaaagacacatgcacacgtatgtttattgtggcactattgacaatagcaaagacttggaaccaacccaaatgcccatcaatgatagactggattaagaaactgtggcacatatacaccatggaatactatgcagccataaaaaatgatgagttcatgtcctttgtagggacatggatgaagctggaaaccatcattctgagcaaactatcgcaaggacagaaaaacaaaaaattgaatgctctcattcataggtgggaattgaacaatgagaacacttggatacagggtggggaacatcacgccacacaccggggcctgtcataaggtgg

SEQ ID NO: 643159 - DNA, 278 bp, Homo sapiens
gaattctatttcatttattctgaatcatagcatactatatgctttcaacgtgggtagtctttcatttccggtcaaattttctccctttttattaagttacacaaagccatgcactttcttcccctcttcattatgccctgggtacaggggtttttttaatccgcatccttttgaccggctccggctttgaaagattcccccggaaatttgtccactgtgcagatctgtgtttgaaaatggccacgattaaagacatttctcagcagttaaaaaaaaaa

SEQ ID NO: 643160 - DNA, 170 bp, Homo sapiens
acggacgagggtgcgtcgagtaggaggtaggtagattgagaccatcctggtcaatgatggtgaaacttcgcctctactaaaaacacaaaaaagtagccgggcgtggtggtgcgtacctgttagtcccagtctactcagtgatgctgagtgcaggccgaatgtgcgtgaac

SEQ ID NO: 643161 - DNA, 143 bp, Homo sapiens
gaaggagtaacagcctacggagtgggagaaatatagcaaatatgctatgacaaaggtctaatatccagcatctataaggaacttaaacaaattgacaagagacaacccattacaaagtgcgtcatggacatgaatggccactt

SEQ ID NO: 643162 - DNA, 408 bp, Homo sapiens; identical to SEQ ID NO: 510459
  misc_feature (400)..(400): n is a, c, g, or t

SEQ ID NO: 643163 - DNA, 330 bp, Homo sapiens
gtgctcgctgtatcgggagccatggtgaaatgtacaacatgtctgggggacggagcggggaggacatttatacatgttaagtatggacgcacatggatgacactgcacatcatgcacacacgatacacacaacacagtggacccgttgagcaatgatgccacacaacttgtcagcatgcccgctttacaagatgggcacactagaggcccagggcagcactccacacacacaccccaaacggccgaacatgagccacgagccagatctcctagatgtcccagcggctaggctcaccactgtgtgtcctgccacagggcctggaccagagc

SEQ ID NO: 643164 - DNA, 86 bp, Homo sapiens
ggttggttggagggaggagaaaagacaaaggagcacttaaggtgcaaagcagcctattttttcttcaataaaaattgcccaagaca

SEQ ID NO: 643165 - DNA, 252 bp, Homo sapiens
gagtcgctctgggttaagtgatctcatgctcggctcctgaatagctgggactacagctgtgtgcaccatgcctggctaattttgtacttttagtagagacaggtttctccatgttgcccaggctggtctcgaacgcctagactcaagcgatctgcccgcctcggcctgccaaggtgctggggttacaggcatgagccactgtgcctggccagcttttttacttcaggtgattttttacttcaggtaatatgt

SEQ ID NO: 643166 - DNA, 468 bp, Homo sapiens
  misc_feature (21)..(21): n is a, c, g, or t
agcctatgtctgcattccccngaattctccacttgttccctggccctgctgctggaccctgctgtgtctggtaggccaactgtttgttggtgcttttgtagggttaagttaaactctgagatcttgggcaaaatggcaaggagaccccaggattcttctctccaaaggtcactccgatgttatttttgattcctggggcagaaatatgactcctttccctagcccaagccatccaagagctctcattcttagaagaaaaggcagccccttggtgactgtcctcctgcctcggctgatttgcagagtacttcttcaaaaagaaaaaaatggtaaagctatttattaaaaattctttgttttttgctacaaatgatgcatatattttcacccacaccaagcactttgtttctaatatctttgataagaaaactacatgtgcagtattttattaaagcaacattttattta

SEQ ID NO: 643167 - DNA, 1067 bp, Homo sapiens
tccatccaacaacttgagattcacttggggggtttataatacaaaagtgagaaaaaagctagttgtcgtgaggtatggcatccgtggatataatctccgtgatatagtggtaaagcataacaagagacctatttctctcaggagagttagttgacccacctcgagggccagtgacggctcttctctttccccacagcctatagtacttttggccaaagggcccagattggatgtaaaggggagaacgccgtgacgcgtaggatccggggcataaggggctgacagtctggttgagacgcttggggcaggttgggttgtccgggggaacgtaaattttcagaagagaatgggtttctcccctgggtgtgtagttagggattagggatgagcctagaatataccgcgggatggggataaccagagaggcgcctaattgtggggccacgaaacaccgggggcactggagcagattcacacaacagacagtaagtgaaatcacggggcgtacgaagcaaaaacttaacatgtggcgtggaccgttatcataatacccggaaagggactcccggagggtatgaccagcaaaaggccaccccaacgtggctgaggctcacacgtgacaaaggtacacaaacgacccaaggaagacatcagtgggatccacatgtgcgttacagagaattaacaaaccagcagtagcattcaatcacaccaagacgggttgagtctacaaagggcggtatgtgcaacaacggaacaagtgattgtgcgccttgaggcccccaccatggtagtgctatgggggagggcacaaacaagaggcacatcaatcactacgaggcagtagacttatggagcaaagaatagaactatacaaccgaacaagaggcttcgacccgagaaacgccctcagagacccgagacaacacaaagggccctatacgtaaactctcatagccatggggagccccccatcattttcacaaacgtattctttgggtaccacacatttcaacaggggggtagaaaggagcgaataggaagaatagacaaggatatagaaaagc

SEQ ID NO: 643168 - DNA, 709 bp, Homo sapiens
attgaattatgcaattctggccaaacggttgaatatgcaaaattgaaacttttccaagcttccaaattatcttttaaaagccaggattctccggtcgtggatttcgaagtgagtcttttttaagggtgtcccccctctgtgaatgtacaggcggactggtagacacagctcccttcatccatttttactctttcggaaataccacttcacacaagcttcgtgctttggtcaagacctttgtacaaggtgtcaagaaaactcatttggttgaagaacaagaggttattgaccccatcatgctggtttttctctaagcccaaagttttaggctgtacacagccagccttgggaatctcgttgagcgttcggcgtggatccacggggccaggccaccctgcgggagcgccacacgcatccacttcggattcagtgggtgaagacagaactctgagagtctgcaggcggctcctgtgctttttatttctggctcttcggatgtcttctagacatttactatcactgcacctgaagaaaaaatcacttttaccttcctaatttaaaaagacaaaacagaaatgtacgttccttcgctagctttagtctttctgttcccatttttataaatctgagcattgataatgttctatctaaatttgtacagtgtgatttttttttttagaataaatattttataaaaggaaaaaaaaaa

SEQ ID NO: 643169 - DNA, 156 bp, Homo sapiens
actcaaataacgtcgaaaaagtcaatcccgggaagtgtcccaaaaatcataaaacaatgtcgccggaaaatgacgtcagcttgcctgaaagtgatgtcatcccggtcaattcctagtcaatgaccggaagcccatctcctagcgtgcataacacca

SEQ ID NO: 643170 - DNA, 671 bp, Homo sapiens
agagatagactggatggcgctgaatggcatcaacctggcactggcctggagcggccaggaggccatctggcagcgggtgtacctggccttgggcctgacccaggcagagatcaatgagttctttactggtcctgccttcctggcctggtgggcgaatgggcaacctgcacacctgggatggccccctgcccccacatccatggcacatcaagcagctttacctgcagcaccgggtcctggaccagatgcgctccattcggcatgaccccagtgctgcctgcattcgctggggcatgttcccgaggctgtcaccagggtgttccctcaggtcaatgtcacgaagatgggcagttggggccactttaactgtttcctacttcctggttctttctttctgggattcgggaaggaacccaagtatgccgcaaatacactcggggagccatcattccgtgacgagagcgtgatcatgagagttcggcacaagagcaccatctatgggggccgacacttttcaatgagatgccagcaccttcctcagagccctcctaccttgccgcagccaccactgccgtctatgaggccctgactgctgtggctactgaggctgtgtggctggttccaagggctggactcttccagcgaccaaagcccagcaaggccacatgagg

SEQ ID NO: 643171 - DNA, 109 bp, Homo sapiens
ggggaggggtccagagcgccggatgaggctgagagcatggggacaactgtcaaggcagggacagatgggactgtgggtggagggctggaagttggattgtttctctcag

SEQ ID NO: 643172 - DNA, 2955 bp, Homo sapiens
ggcacgaggctgctttctttttcctttcttcggaatgagagactcaaccataatagaaagaatggagaactattaaccaccattcttcagtgggctgtgattttcagaggggaatactaagaaatggttttccatactggaacccaaaggtaaagacactcaaggacagacatttttggcagagcatagatgaaaatggcaagttccctggctttccttctgctcaactttcatgtctccctcttcttggtccagctgctcactccttgctcagctcagttttctgtgcttggaccctctgggcccatcctggccatggtgggtgaagacgctgatctgccctgtcacctgttcccgaccatgagtgcagagaccatggagctgaggtgggtgagttccagcctaaggcaggtggtgaacgtgtatgcagatggaaaggaagtggaagacaggcagagtgcaccatatcgagggagaacttcgattctgcgggatggcatcactgcagggaaggctgctctccgaatacacaacgtcacagcctctgacagtggaaagtacttgtgttatttccaagatggtgacttctacgaaaaagccctggtggagctgaaggttgcagcattgggttctgatcttcacattgaagtgaagggttatgaggatggagggatccatctggagtgcaggtccactggctggtacccccaaccccaaataaagtggagcgacaccaagggagagaacatcccggctgtggaagcacctgtggttgcagatggagtgggcctgtatgcagtagcagcatctgtgatcatgagaggcagctctggtgggggtgtatcctgcatcatcagaaattccctcctcggcctggaaaagacagccagcatatccatcgcagaccccttcttcaggagcgcccagccctggatcgcggccctggcagggaccctgcctatctcgttgctgcttctcgcaggagccagttacttcttgtggagacaacagaaggaaaaaattgctctgtccagggagacagaaagagagcgagagatgaaagaaatgggatacgctgcaacagagcaagaaataagcctaagagagaagctccaggaggaactcaagtggaggaaaatccagtacatggctcgtggagagaagtctttggcctatcatgaatggaaaatggccctcttcaaacctgcggatgtgattctggatccagacacggcaaacgccatcctccttgtttctgaggaccagaggagtgtgcagcgtgctgaagagccgcgggatctgccagacaaccctgagagatttgaatggcgttactgtgtccttggctgtgaaaacttcacatcagggagacattactgggaggtggaagtgggggacagaaaagagtggcatattggggtatgtagtaagaacgtggagaggaaaaaaggttgggtcaaaatgacaccggagaacggatactggactatgggcctgactgatgggaataagtatcgggctctcactgagcccagaaccaacctgaaacttcctgagcctcctaggaaagtggggatcttcctggactatgagactggagagatctcgttctataatgccacagatggatctcatatctacacctttccgcacgcctctttctctgagcctctatatcctgttttcagaattttgaccttggagcccactgccctgaccatttgcccaataccaaaagaagtagagagttcccccgatcctgacctagtgcctgatcattccctggagacaccactgaccccgggcttagctaatgaaagtggggagcctcaggctgaagtaacatctctgcttctccctgcccaccctggagctgaggtctccccttctgcaacaaccaatcagaaccataagctacaggcacgcactgaagcactttactgatattcattccattattccatatgacagttgttttgagtttcgtaccaccttattgtccccttatacagataaggaaactggggtgcagaaaggtgaattaactttacaaagtagacatgacaagtgaacagcagagctgggatctaaacagcaataactaacattaacagagaatttaaaatgttcttagtgctgtgttataagctttggtggatgtcactcctttaatcctcacaacaccctgtcgggtagtcatattttgcaagtatggaagctgaggcagggcaacatgaagtaacttacataattcatacagtaatttgtgcagttgggagatgttcagccttagtccctggctaattgcctgttcttttccagcctgattttttttcccacaggaagagcccacatgtagccctgaggtttccttcccaggacagctgcagggtagagatcattttaagtgcttgtggagttgacatccctattgactctttcccagctgatatcagagacttagacccagcactccttggattagctctgcagagtgtcttggttgagagaataacctcatagtaccaacatgacatgtgacttggaaagagactagaggccacacttgataaatcatggggcacagatatgttcccacccaacaaatgtgataagtgattgtgcagccagagccagccttccttcaatcaaggtttccaggcagagcaaataccctagagattctctgtgatataggaaatttggatcaaggaagctaaaagaattacagggatgtttttaatcccactatggactcagtctcctggaaataggtctgtccactcctggtcattggtggatgttaaacccatattcctttcaactgctgcctgctagggaaaactgctcctcattatcatcactattattgctcaccactgtatcccctctacttggcaagtggttgtcaagttctagttgttcaataaatgtgttaataatgaaaaaaaaaaa

SEQ ID NO: 643173 - DNA, 509 bp, Homo sapiens
tttccttttccaccattggcctgagagcgctgccaaatatccattcacccattctacaaaaacactgtttccaaaccgttcaatcaaaagagggacttaactctctgagattaacacacacatcagaaagccatttctcataatgcttctttccaggttttatctgtaaaagtttcttttttcatcatagctttttgtgttacataatatctcttccagggttttgcaaaaacagtgtttccaaactgctcagtgaaaagaaaggttttactctgaggataaattcacacatcactaagcagtttttcacaaagctcctttctaatttttatcttgaaatatttcctttttcaccgtaggcctcaatgcactcccaaataactgtttgcaacttctgccaaaagggtgtttccaaacagctccatcaaaggaaaaaataatcactgtgaaatgaatgcacacattaaagcactgagacaaataagtatctcagaaagcttctgtacagt

SEQ ID NO: 643174 - DNA, 232 bp, Homo sapiens
atccgaagctcaatgtttcggaatgcctgaccccagcatgagctttgcccgtcgggccgcgttcggatgtatcttaaattcagcggttaaacgtccagggtatctggcgcagatacaaatgaccgcctacgatacgcgccatgttttcagggagcgtgttcatgaagaagtcattggtggtaagtggtttggttgcagcaatgctgctggcgggttgccagtcggtcaatac

SEQ ID NO: 643175 - DNA, 4004 bp, Homo sapiens
agcgggtctctcgggcctgggcggcgcagacgaggcctgaggcggcggcgcgaggcagtatggtttgaagtggtgaacatggatttttctcggcttcacatgtacagtcctccccagtgtgtgccggagaacacgggctacacgtatgcgctcagttccagctattcttcagatgctctggattttgagacggagcacaaattggaccctgtatttgattctccacggatgtcccgccgtagtttgcgcctggccacgacagcatgcaccctgggggatggtgaggctgtgggtgccgacagcggcaccagcagcgctgtctccctgaagaaccgagcggccagaacaacaaaacagcgcagaagcacaaacaaatcagcttttagtatcaaccacgtgtcaaggcaggtcacgtcctctggcgtcagccacggcggcactgtcagcctgcaggatgctgtgactcgacggcctcctgtattggacgagtcttggattcgtgaacagaccacagtggaccacttctggggtcttgatgatgatggtgatcttaaaggtggaaataaagctgccattcagggaaacggggatgtgggagccgccgccgccaccgcgcacaacggcttctcctgcagcaactgcagcatgctgtccgagcgcaaggacgtgctcacggcgcaccccgcggcccccgggcccgtgtcgagagtttattctagggacaggaatcaaaaatgttacttcttgctgcagattctgcgcaggatcggagctgtgggccaggctgtgtccaggacggcgtggtcggccctttggctggccgtggttgctccagggaaggcagcctctggagtgttctggtggctggggattggatggtaccagtttgttactttgatttcttggctgaatgtgtttcttcttaccaggtgccttcgaaacatctgcaagtttttagtcttgctcatcccactcttccttttactagcaggtctctccttacggggccagggcaatttcttttcgttcttgcccgtgttgaactgggcaagcatgcatagaacacagcgggtggatgacccccaggacgtgtttaaacccacgacttctcgcctgaagcagcctctgcagggtgacagtgaggcttttccgtggcattggatgagtggcgtggagcagcaggtggcctctctgtctggacagtgccaccaccatggtgagaatctccgagagctgaccactttgctacagaagctgcaggctcgggtggaccagatggaaggcggcgctgccgggccgtcagcttcggtcagagacgctgtgggacagcccccgagggagactgactttatggcctttcaccaagaacatgaagtgcgtatgtcacacttggaagatattctgggaaaactgagagaaaaatctgaggccatccagaaggaactagaacagaccaagcaaaaaacaatcagtgcggttggtgagcagctcctgcccacagtcgagcacctccagctggagctggatcagctaaagtcagagctgtccagctggcgacacgtgaagaccggctgtgagacagtggatgccgtacaagaaagagtggacgtgcaagtcagagaaatggtgaaactcctgttttccgaagatcagcaaggcggttctctggaacagctgctgcagaggttctcatcacagtttgtgagcaaaggcgacttgcagacgatgctgcgagacctgcagctgcagatcctgcggaacgtcacccaccacgtttccgtgaccaagcagctcccaacctcagaagccgtggtgtctgctgtgagcgaggcgggggcgtctggaataacagaggcgcaagcacgtgccatcgtgaacagcgccttgaagctgtattcccaagataagaccgggatggtggactttgctctggaatctggtggtggcagcatcttgagtactcgctgttctgaaacttacgaaaccaaaacggcgctgatgagtctgtttgggatcccgctgtggtacttctcgcagtccccgcgcgtggtcatccagcctgacatttaccccggtaactgctgggcatttaaaggctcccaggggtacctggtggtgaggctctccatgatgatccacccagccgccttcactctggagcacatccctaagacgctgtcgccaacaggcaacatcagcagcgcccccaaggacttcgccgtctatggattagaaaatgagtatcaggaagaagggcagcttctgggacagttcacgtatgatcaggatggggagtcgctccagatgttccaggccctgaaaagacccgacgacacagctttccaaatagtggaacttcggattttttctaactggggccatcctgagtatacctgtctgtatcggttcagagttcatggcgaacctgtcaagtgaagacactactcattatttttgtacatttttgtatatactgggacagcgtgaaacactggaatccttcatggacgagggcatatacaatgatgggacagtgccacactccttcaataaacgtggctgctggccagaggacgtgagcgtgtgacgggcgccttggcgccacctgttgggtgctcactgcctctgcaggtgcagaggggtcagcagcaggagaagcgtgttgaacacgtggctctcagacactccttgtttttaacgggaagctctttgcatttgcatttcctcaacaaaggagcaaagcagaggaagctgagagtctggcgtgttcttgacgctttggtcttcagccttgcactggctcttctaaaggacttttggagggcagataatttcatctgttaaatccaacacacatttctttcagggaaaaacaatgtcaccaaattttcagagttctaaactcctttccttcaagccggaattttccttttttcagcaccagtaggtactaagtctccagatggggaaataactaaaatgtgtttttctgctttgttcgctcttacttctgaggaaggtttccagtcaggactcgctgtaccaatatccatggaggaatatgggagcgtttcgctctccttgtaggctgaagtcagtctgacttgaaggggcctggtttggatctaagcaaacacccagatggggttctctggtctcagcaaggcttttcctgttgggagtcacagtaaacagaaacccaaaaatctcatcttgggtgttttcagggcttgttttgagttttgctgaatagggagcgcaagacgccctgagcctccctctcactggtggtgataagaggagccgtctggtgtgtcagggtcacgaacccgttacatttcaggacgatcctttttccttcagcagcatttcttactggctgtggctggaatctgccttttatcacagctgtcaccattctcacgtgattcttgtgagactctttttggttataattactatttaatatttagactattttactgagcagactttataaatgagatatctacaaggcacttaaagtgttacagatgttttaccttaagaattatttaagttgtgttgggttaagacagttttcagtgtaccgtaaatgttgtgttttcagaaaaagacaaaacgatggtgctgactggttttctgtatattgcacaacagtcctcaaatacactgatgtatgaaactattcatacatcaagcagcatttttttcactctccttagaattggaactatgcagttaaggcagataaaatgtacagatgtttcatatattacaggttacatatataaatcaaaatttcctatataaaactgatttgggatttggggtggaaatattttgaatattaatttatttttaaagatgcaagataggactttgtgcaatgtatttttgtaaatgcttttcaaaatatctgtctttggtagtgcttctgctgctgccaccaaattgataagatgctattaagaggtttaaataaagagttttaatttttaaaa

SEQ ID NO: 643176 - DNA, 183 bp, Homo sapiens
  misc_feature (147)..(147): n is a, c, g, or t
atgtaagcttgcaggctggtgcagatatctctcatgatcggccagttcggtgctggctttccattctgcttattcggttgctgcagaaagtacactgtgatcaccaacacatcacgatgcatgagccagtcacgctagggcagtccntccagccagggtggcatccagtgggtggctcatcag

SEQ ID NO: 643177 - DNA, 4300 bp, Homo sapiens
agcgggtctctcgggcctgggcggcgcagacgaggcctgaggcggcggcgcgaggcagttccagctattcttcagatgctctggattttgagacggagcacaaattggaccctgtatttgattctccacggatgtcccgccgtagtttgcgcctggccacgacagcatgcaccctgggggatggtgaggctgtgggtgccgacagcggcaccagcagcgctgtctccctgaagaaccgagcggccagaacaacaaaacagcgcagaagcacaaacaaatcagcttttagtatcaaccacgtgtcaaggcaggtcacgtcctctggcgtcagccacggcggcactgtcagcctgcaggatgctgtgactcgacggcctcctgtattggacgagtcttggattcgtgaacagaccacagtggaccacttctggggtcttgatgatgatggtgatcttaaaggtggaaataaagctgccattcagggaaacggggatgtgggagccgccgccgccaccgcgcacaacggcttctcctgcagcaactgcagcatgctgtccgagcgcaaggacgtgctcacggcgcaccccgcggcccccgggcccgtgtcgagagtttattctagggacaggaatcaaaaatgcggtgcgtctttctacgtgaataggattttgtggctggccagatacactgcatcatctttttcatcatttttagttcaactttttcaagtggttttaatgaagctcagttatgaatcagaaaattacaaattgaaaactcatgaatcaaaagattgtgaatccgaaagctataagtcaaaaagccatgaatcaaaagctcatgccagttactatgggagaatgaatgtgagagaggttctcagagaggatggccacctcagtgtaaatggggaagcgctgtgcgacgactgtaagggcaagaggcacctcgacgcgcacacagccgcccactcgcagtcgccacggctgcccggtcgggcagggaccctctggcacatctgggcatgtgcaggttacttcttgctgcagattctgcgcaggatcggagctgtgggccaggctgtgtccaggacggcgtggtcggccctttggctggccgtggttgctccagggaaggcagcctctggagtgttctggtggctggggattggatggtaccagtttgttactttgatttcttggctgaatgtgtttcttcttaccaggtgccttcgaaacatctgcaagtttttagtcttgctcatcccactcttccttttactagcaggtctctccttacggggccagggcaatttcttttcgttcttgcccgtgttgaactgggcaagcatgcatagaacacagcgggtggatgacccccaggacgtgtttaaacccacgacttctcgcctgaagcagcctctgcagggtgacagtgaggcttttccgtggcattggatgagtggcgtggagcagcaggtggcctctctgtctggacagtgccaccaccatggtgagaatctccgagagctgaccactttgctacagaagctgcaggctcgggtggaccagatggaaggcggcgctgccgggccgtcagcttcggtcagagacgctgtgggacagcccccgagggagactgactttatggcctttcaccaagaacatgaagtgcgtatgtcacacttggaagatattctgggaaaactgagagaaaaatctgaggccatccagaaggaactagaacagaccaagcaaaaaacaatcagtgcggttggtgagcagctcctgcccacagtcgagcacctccagctggagctggatcagctaaagtcagagctgtccagctggcgacacgtgaagaccggctgtgagacagtggatgccgtacaagaaagagtggacgtgcaagtcagagaaatggtgaaactcctgttttccgaagatcagcaaggcggttctctggaacagctgctgcagaggttctcatcacagtttgtgagcaaaggcgacttgcagacgatgctgcgagacctgcagctgcagatcctgcggaacgtcacccaccacgtttccgtgaccaagcagctcccaacctcagaagccgtggtgtctgctgtgagcgaggcgggggcgtctggaataacagaggcgcaagcacgtgccatcgtgaacagcgccttgaagctgtattcccaagataagaccgggatggtggactttgctctggaatctggtggtggcagcatcttgagtactcgctgttctgaaacttacgaaaccaaaacggcgctgatgagtctgtttgggatcccgctgtggtacttctcgcagtccccgcgcgtggtcatccagcctgacatttaccccggtaactgctgggcatttaaaggctcccaggggtacctggtggtgaggctctccatgatgatccacccagccgccttcactctggagcacatccctaagacgctgtcgccaacaggcaacatcagcagcgcccccaaggacttcgccgtctatggattagaaaatgagtatcaggaagaagggcagcttctgggacagttcacgtatgatcaggatggggagtcgctccagatgttccaggccctgaaaagacccgacgacacagctttccaaatagtggaacttcggattttttctaactggggccatcctgagtatacctgtctgtatcggttcagagttcatggcgaacctgtcaagtgaagacactactcattatttttgtacatttttgtatatactgggacagcgtgaaacactggaatccttcatggacgagggcatatacaatgatgggacagtgccacactccttcaataaacgtggctgctggccagaggacgtgagcgtgtgacgggcgccttggcgccacctgttgggtgctcactgcctctgcaggtgcagaggggtcagcagcaggagaagcgtgttgaacacgtggctctcagacactccttgtttttaacgggaagctctttgcatttgcatttcctcaacaaaggagcaaagcagaggaagctgagagtctggcgtgttcttgacgctttggtcttcagccttgcactggctcttctaaaggacttttggagggcagataatttcatctgttaaatccaacacacatttctttcagggaaaaacaatgtcaccaaattttcagagttctaaactcctttccttcaagccggaattttccttttttcagcaccagtaggtactaagtctccagatggggaaataactaaaatgtgtttttctgctttgttcgctcttacttctgaggaaggtttccagtcaggactcgctgtaccaatatccatggaggaatatgggagcgtttcgctctccttgtaggctgaagtcagtctgacttgaaggggcctggtttggatctaagcaaacacccagatggggttctctggtctcagcaaggcttttcctgttgggagtcacagtaaacagaaacccaaaaatctcatcttgggtgttttcagggcttgttttgagttttgctgaatagggagcgcaagacgccctgagcctccctctcactggtggtgataagaggagccgtctggtgtgtcagggtcacgaacccgttacatttcaggacgatcctttttccttcagcagcatttcttactggctgtggctggaatctgccttttatcacagctgtcaccattctcacgtgattcttgtgagactctttttggttataattactatttaatatttagactattttactgagcagactttataaatgagatatctacaaggcacttaaagtgttacagatgttttaccttaagaattatttaagttgtgttgggttaagacagttttcagtgtaccgtaaatgttgtgttttcagaaaaagacaaaacgatggtgctgactggttttctgtatattgcacaacagtcctcaaatacactgatgtatgaaactattcatacatcaagcagcatttttttcactctccttagaattggaactatgcagttaaggcagataaaatgtacagatgtttcatatattacaggttacatatataaatcaaaatttcctatataaaactgatttgggatttggggtggaaatattttgaatattaatttatttttaaagatgcaagataggactttgtgcaatgtatttttgtaaatgcttttcaaaatatctgtctttggtagtgcttctgctgctgccaccaaattgataagatgctattaagaggtttaaataaagagttttaatttttaaaa

SEQ ID NO: 643178 - DNA, 227 bp, Homo sapiens
tccagcacttgcactgcgctcccttcacaatgctgcctccgaggaagaggtgtgcgtgtgaggcggggtctctgttggtctcatagtatgtcctattgtctcaagtccccatgcagccagttgctgaagtagaggaagcggtcgtccagggagagcaggatgtcggtgatcaggcctggcatttcgggcagcagccagcccgggactttcttggggggcacctggat

SEQ ID NO: 643179 - DNA, 3905 bp, Homo sapiens
agcgggtctctcgggcctgggcggcgcagacgaggcctgaggcggcggcgcgaggcagtatggtttgaagtggtgaacatggatttttctcggcttcacatgtacagtcctccccagtgtgtgccggagaacacgggctacacgtatgcgctcagttccagctattcttcagatgctctggattttgagacggagcacaaattggaccctgtatttgattctccacggatgtcccgccgtagtttgcgcctggccacgacagcatgcaccctgggggatggtgaggctgtgggtgccgacagcggcaccagcagcgctgtctccctgaagaaccgagcggccagaacaacaaaacagcgcagaagcacaaacaaatcagcttttagtatcaaccacgtgtcaaggcaggtcacgtcctctggcgtcagccacggcggcactgtcagcctgcaggatgctgtgactcgacggcctcctgtattggacgagtcttggattcgtgaacagaccacagtggaccacttctggggtcttgatgatgatggtgatcttaaaggtggaaataaagctgccattcagggaaacggggatgtgggagccgccgccgccaccgcgcacaacggcttctcctgcagcaactgcagcatgctgtccgagcgcaaggacgtgctcacggcgcaccccgcggcccccgggcccgtgtcgagagtttattctagggacaggaatcaaaaatggaaggcagcctctggagtgttctggtggctggggattggatggtaccagtttgttactttgatttcttggctgaatgtgtttcttcttaccaggtgccttcgaaacatctgcaagtttttagtcttgctcatcccactcttccttttactagcaggtctctccttacggggccagggcaatttcttttcgttcttgcccgtgttgaactgggcaagcatgcatagaacacagcgggtggatgacccccaggacgtgtttaaacccacgacttctcgcctgaagcagcctctgcagggtgacagtgaggcttttccgtggcattggatgagtggcgtggagcagcaggtggcctctctgtctggacagtgccaccaccatggtgagaatctccgagagctgaccactttgctacagaagctgcaggctcgggtggaccagatggaaggcggcgctgccgggccgtcagcttcggtcagagacgctgtgggacagcccccgagggagactgactttatggcctttcaccaagaacatgaagtgcgtatgtcacacttggaagatattctgggaaaactgagagaaaaatctgaggccatccagaaggaactagaacagaccaagcaaaaaacaatcagtgcggttggtgagcagctcctgcccacagtcgagcacctccagctggagctggatcagctaaagtcagagctgtccagctggcgacacgtgaagaccggctgtgagacagtggatgccgtacaagaaagagtggacgtgcaagtcagagaaatggtgaaactcctgttttccgaagatcagcaaggcggttctctggaacagctgctgcagaggttctcatcacagtttgtgagcaaaggcgacttgcagacgatgctgcgagacctgcagctgcagatcctgcggaacgtcacccaccacgtttccgtgaccaagcagctcccaacctcagaagccgtggtgtctgctgtgagcgaggcgggggcgtctggaataacagaggcgcaagcacgtgccatcgtgaacagcgccttgaagctgtattcccaagataagaccgggatggtggactttgctctggaatctggtggtggcagcatcttgagtactcgctgttctgaaacttacgaaaccaaaacggcgctgatgagtctgtttgggatcccgctgtggtacttctcgcagtccccgcgcgtggtcatccagcctgacatttaccccggtaactgctgggcatttaaaggctcccaggggtacctggtggtgaggctctccatgatgatccacccagccgccttcactctggagcacatccctaagacgctgtcgccaacaggcaacatcagcagcgcccccaaggacttcgccgtctatggattagaaaatgagtatcaggaagaagggcagcttctgggacagttcacgtatgatcaggatggggagtcgctccagatgttccaggccctgaaaagacccgacgacacagctttccaaatagtggaacttcggattttttctaactggggccatcctgagtatacctgtctgtatcggttcagagttcatggcgaacctgtcaagtgaagacactactcattatttttgtacatttttgtatatactgggacagcgtgaaacactggaatccttcatggacgagggcatatacaatgatgggacagtgccacactccttcaataaacgtggctgctggccagaggacgtgagcgtgtgacgggcgccttggcgccacctgttgggtgctcactgcctctgcaggtgcagaggggtcagcagcaggagaagcgtgttgaacacgtggctctcagacactccttgtttttaacgggaagctctttgcatttgcatttcctcaacaaaggagcaaagcagaggaagctgagagtctggcgtgttcttgacgctttggtcttcagccttgcactggctcttctaaaggacttttggagggcagataatttcatctgttaaatccaacacacatttctttcagggaaaaacaatgtcaccaaattttcagagttctaaactcctttccttcaagccggaattttccttttttcagcaccagtaggtactaagtctccagatggggaaataactaaaatgtgtttttctgctttgttcgctcttacttctgaggaaggtttccagtcaggactcgctgtaccaatatccatggaggaatatgggagcgtttcgctctccttgtaggctgaagtcagtctgacttgaaggggcctggtttggatctaagcaaacacccagatggggttctctggtctcagcaaggcttttcctgttgggagtcacagtaaacagaaacccaaaaatctcatcttgggtgttttcagggcttgttttgagttttgctgaatagggagcgcaagacgccctgagcctccctctcactggtggtgataagaggagccgtctggtgtgtcagggtcacgaacccgttacatttcaggacgatcctttttccttcagcagcatttcttactggctgtggctggaatctgccttttatcacagctgtcaccattctcacgtgattcttgtgagactctttttggttataattactatttaatatttagactattttactgagcagactttataaatgagatatctacaaggcacttaaagtgttacagatgttttaccttaagaattatttaagttgtgttgggttaagacagttttcagtgtaccgtaaatgttgtgttttcagaaaaagacaaaacgatggtgctgactggttttctgtatattgcacaacagtcctcaaatacactgatgtatgaaactattcatacatcaagcagcatttttttcactctccttagaattggaactatgcagttaaggcagataaaatgtacagatgtttcatatattacaggttacatatataaatcaaaatttcctatataaaactgatttgggatttggggtggaaatattttgaatattaatttatttttaaagatgcaagataggactttgtgcaatgtatttttgtaaatgcttttcaaaatatctgtctttggtagtgcttctgctgctgccaccaaattgataagatgctattaagaggtttaaataaagagttttaatttttaaaa

SEQ ID NO: 643180 - DNA, 3989 bp, Homo sapiens
agcgggtctctcgggcctgggcggcgcagacgaggcctgaggcggcggcgcgaggcagtatggtttgaagtggtgaacatggatttttctcggcttcacatgtacagtcctccccagtgtgtgccggagaacacgggctacacgtatgcgctcagttccagctattcttcagatgctctggattttgagacggagcacaaattggaccctgtatttgattctccacggatgtcccgccgtagtttgcgcctggccacgacagcatgcaccctgggggatggtgaggctgtgggtgccgacagcggcaccagcagcgctgtctccctgaagaaccgagcggccagaacaacaaaacagcgcagaagcacaaacaaatcagcttttagtatcaaccacgtgtcaaggcaggtcacgtcctctggcgtcagccacggcggcactgtcagcctgcaggatgctgtgactcgacggcctcctgtattggacgagtcttggattcgtgaacagaccacagtggaccacttctggggtcttgatgatgatggtgatcttaaaggtggaaataaagctgccattcagggaaacggggatgtgggagccgccgccgccaccgcgcacaacggcttctcctgcagcaactgcagcatgctgtccgagcgcaaggacgtgctcacggcgcaccccgcggcccccgggcccgtgtcgagagtttattctagggacaggaatcaaaaatctcatgccagttactatgggagaatgaatgtgagagaggttctcagagaggatggccacctcagtgtaaatggggaagcgctgtggaaggcagcctctggagtgttctggtggctggggattggatggtaccagtttgttactttgatttcttggctgaatgtgtttcttcttaccaggtgccttcgaaacatctgcaagtttttagtcttgctcatcccactcttccttttactagcaggtctctccttacggggccagggcaatttcttttcgttcttgcccgtgttgaactgggcaagcatgcatagaacacagcgggtggatgacccccaggacgtgtttaaacccacgacttctcgcctgaagcagcctctgcagggtgacagtgaggcttttccgtggcattggatgagtggcgtggagcagcaggtggcctctctgtctggacagtgccaccaccatggtgagaatctccgagagctgaccactttgctacagaagctgcaggctcgggtggaccagatggaaggcggcgctgccgggccgtcagcttcggtcagagacgctgtgggacagcccccgagggagactgactttatggcctttcaccaagaacatgaagtgcgtatgtcacacttggaagatattctgggaaaactgagagaaaaatctgaggccatccagaaggaactagaacagaccaagcaaaaaacaatcagtgcggttggtgagcagctcctgcccacagtcgagcacctccagctggagctggatcagctaaagtcagagctgtccagctggcgacacgtgaagaccggctgtgagacagtggatgccgtacaagaaagagtggacgtgcaagtcagagaaatggtgaaactcctgttttccgaagatcagcaaggcggttctctggaacagctgctgcagaggttctcatcacagtttgtgagcaaaggcgacttgcagacgatgctgcgagacctgcagctgcagatcctgcggaacgtcacccaccacgtttccgtgaccaagcagctcccaacctcagaagccgtggtgtctgctgtgagcgaggcgggggcgtctggaataacagaggcgcaagcacgtgccatcgtgaacagcgccttgaagctgtattcccaagataagaccgggatggtggactttgctctggaatctggtggtggcagcatcttgagtactcgctgttctgaaacttacgaaaccaaaacggcgctgatgagtctgtttgggatcccgctgtggtacttctcgcagtccccgcgcgtggtcatccagcctgacatttaccccggtaactgctgggcatttaaaggctcccaggggtacctggtggtgaggctctccatgatgatccacccagccgccttcactctggagcacatccctaagacgctgtcgccaacaggcaacatcagcagcgcccccaaggacttcgccgtctatggattagaaaatgagtatcaggaagaagggcagcttctgggacagttcacgtatgatcaggatggggagtcgctccagatgttccaggccctgaaaagacccgacgacacagctttccaaatagtggaacttcggattttttctaactggggccatcctgagtatacctgtctgtatcggttcagagttcatggcgaacctgtcaagtgaagacactactcattatttttgtacatttttgtatatactgggacagcgtgaaacactggaatccttcatggacgagggcatatacaatgatgggacagtgccacactccttcaataaacgtggctgctggccagaggacgtgagcgtgtgacgggcgccttggcgccacctgttgggtgctcactgcctctgcaggtgcagaggggtcagcagcaggagaagcgtgttgaacacgtggctctcagacactccttgtttttaacgggaagctctttgcatttgcatttcctcaacaaaggagcaaagcagaggaagctgagagtctggcgtgttcttgacgctttggtcttcagccttgcactggctcttctaaaggacttttggagggcagataatttcatctgttaaatccaacacacatttctttcagggaaaaacaatgtcaccaaattttcagagttctaaactcctttccttcaagccggaattttccttttttcagcaccagtaggtactaagtctccagatggggaaataactaaaatgtgtttttctgctttgttcgctcttacttctgaggaaggtttccagtcaggactcgctgtaccaatatccatggaggaatatgggagcgtttcgctctccttgtaggctgaagtcagtctgacttgaaggggcctggtttggatctaagcaaacacccagatggggttctctggtctcagcaaggcttttcctgttgggagtcacagtaaacagaaacccaaaaatctcatcttgggtgttttcagggcttgttttgagttttgctgaatagggagcgcaagacgccctgagcctccctctcactggtggtgataagaggagccgtctggtgtgtcagggtcacgaacccgttacatttcaggacgatcctttttccttcagcagcatttcttactggctgtggctggaatctgccttttatcacagctgtcaccattctcacgtgattcttgtgagactctttttggttataattactatttaatatttagactattttactgagcagactttataaatgagatatctacaaggcacttaaagtgttacagatgttttaccttaagaattatttaagttgtgttgggttaagacagttttcagtgtaccgtaaatgttgtgttttcagaaaaagacaaaacgatggtgctgactggttttctgtatattgcacaacagtcctcaaatacactgatgtatgaaactattcatacatcaagcagcatttttttcactctccttagaattggaactatgcagttaaggcagataaaatgtacagatgtttcatatattacaggttacatatataaatcaaaatttcctatataaaactgatttgggatttggggtggaaatattttgaatattaatttatttttaaagatgcaagataggactttgtgcaatgtatttttgtaaatgcttttcaaaatatctgtctttggtagtgcttctgctgctgccaccaaattgataagatgctattaagaggtttaaataaagagttttaatttttaaaa

SEQ ID NO: 643181 - DNA, 4711 bp, Homo sapiens
agcgggtctctcgggcctgggcggcgcagacgaggcctgaggcggcggcgcgaggcagtatggtttgaagtggtgaacatggatttttctcggcttcacatgtacagtcctccccagtgtgtgccggagaacacgggctacacgtatgcgctcagttccagctattcttcagatgctctggattttgagacggagcacaaattggaccctgtatttgattctccacggatgtcccgccgtagtttgcgcctggccacgacagcatgcaccctgggggatggtgaggctgtgggtgccgacagcggcaccagcagcgctgtctccctgaagaaccgagcggccagaacaacaaaacagcgcagaagcacaaacaaatcagcttttagtatcaaccacgtgtcaaggcaggtcacgtcctctggcgtcagccacggcggcactgtcagcctgcaggatgctgtgactcgacggcctcctgtattggacgagtcttggattcgtgaacagaccacagtggaccacttctggggtcttgatgatgatggtgatcttaaaggtggaaataaagctgccattcagggaaacggggatgtgggagccgccgccgccaccgcgcacaacggcttctcctgcagcaactgcagcatgctgtccgagcgcaaggacgtgctcacggcgcaccccgcggcccccgggcccgtgtcgagagtttattctagggacaggaatcaaaaatgcggtgcgtctttctacgtgaataggattttgtggctggccagatacactgcatcatctttttcatcatttttagttcaactttttcaagtggttttaatgaagctcagttatgaatcagaaaattacaaattgaaaactcatgaatcaaaagattgtgaatccgaaagctataagtcaaaaagccatgaatcaaaagctcatgccagttactatgggagaatgaatgtgagagaggttctcagagaggatggccacctcagtgtaaatggggaagcgctgtgcgacgactgtaagggcaagaggcacctcgacgcgcacacagccgcccactcgcagtcgccacggctgcccggtcgggcagggaccctctggcacatctgggcatgtgcaggttacttcttgctgcagattctgcgcaggatcggagctgtgggccaggctgtgtccaggacggcgtggtcggccctttggctggccgtggttgctccagggaaggcagcctctggagtgttctggtggctggggattggatggtaccagtttgttactttgatttcttggctgaatgtgtttcttcttaccaggtgccttcgaaacatctgcaagtttttagtcttgctcatcccactcttccttttactagcaggtctctccttacggggccagggcaatttcttttcgttcttgcccgtgttgaactgggcaagcatgcatagaacacagcgggtggatgacccccaggacgtgtttaaacccacgacttctcgcctgaagcagcctctgcagggtgacagtgaggcttttccgtggcattggatgagtggcgtggagcagcaggtggcctctctgtctggacagtgccaccaccatggtgagaatctccgagagctgaccactttgctacagaagctgcaggctcgggtggaccagatggaaggcggcgctgccgggccgtcagcttcggtcagagacgctgtgggacagcccccgagggagactgactttatggcctttcaccaagaacatgaagtgcgtatgtcacacttggaagatattctgggaaaactgagagaaaaatctgaggccatccagaaggaactagaacagaccaagcaaaaaacaatcagtgcggttggtgagcagctcctgcccacagtcgagcacctccagctggagctggatcagctaaagtcagagctgtccagctggcgacacgtgaagaccggctgtgagacagtggatgccgtacaagaaagagtggacgtgcaagtcagagaaatggtgaaactcctgttttccgaagatcagcaaggcggttctctggaacagctgctgcagaggttctcatcacagtttgtgagcaaaggcgacttgcagacgatgctgcgagacctgcagctgcagatcctgcggaacgtcacccaccacgtttccgtgaccaagcagctcccaacctcagaagccgtggtgtctgctgtgagcgaggcgggggcgtctggaataacagaggcgcaagcacgtgccatcgtgaacagcgccttgaagctgtattcccaagataagaccgggatggtggactttgctctggaatctggtggtggcagcatcttgagtactcgctgttctgaaacttacgaaaccaaaacggcgctgatgagtctgtttgggatcccgctgtggtacttctcgcagtccccgcgcgtggtcatccagcctgacatttaccccggtaactgctgggcatttaaaggctcccaggggtacctggtggtgaggctctccatgatgatccacccagccgccttcactctggagcacatccctaagacgctgtcgccaacaggcaacatcagcagcgcccccaaggacttcgccgtctatggattagaaaatgagtatcaggaagaagggcagcttctgggacagttcacgtatgatcaggatggggagtcgctccagatgttccaggccctgaaaagacccgacgacacagctttccaaatagtggaacttcggattttttctaactggggccatcctgagtatacctgtctgtatcggttcagagttcatggcgaacctgtcaagtgaagacactactcattatttttgtacatttttgtatatactgggacagcgtgaaacactggaatccttcatggacgagggcatatacaatgatgggacagtgccacactccttcaataaacgtggctgctggccagaggacgtgagcgtgtgacgggcgccttggcgccacctgttgggtgctcactgcctctgcaggtgcagaggggtcagcagcaggagaagcgtgttgaacacgtggctctcagacactccttgtttttaacgggaagctctttgcatttgcatttcctcaacaaaggagcaaagcagaggaagctgagagtctggcgtgttcttgacgctttggtcttcagccttgcactggctcttctaaaggacttttggagggcagataatttcatctgttaaatccaacacacatttctttcagggaaaaacaatgtcaccaaattttcagagttctaaactcctttccttcaagccggaattttccttttttcagcaccagtaggtactaagtctccagatggggaaataactaaaatgtgtttttctgctttgttcgctcttacttctgaggaaggtttccagtcaggactcgctgtaccaatatccatggaggaatatgggagcgtttcgctctccttgtaggctgaagtcagtctgacttgaaggggcctggtttggatctaagcaaacacccagatggggttctctggtctcagcaaggcttttcctgttgggagtcacagtaaacagaaacccaaaaatctcatcttgggtgttttcagggcttgttttgagttttgctgaatagggagcgcaagacgccctgagcctccctctcactggtggtgataagaggagccgtctggtgtgtcagggtcacgaacccgttacatttcaggacgatcctttttccttcagcagcatttcttactggctgtggctggaatctgccttttatcacagctgtcaccattctcacgtgattcttgtgagactctttttggttataattactatttaatatttagactattttactgagcagactttataaatgagatatctacaaggcacttaaagtgttacagatgttttaccttaagaattatttaagttgtgttgggttaagacagttttcagtgtaccgtaaatgttgtgttttcagaaaaagacaaaacgatggtgctgactggttttctgtatattgcacaacagtcctcaaatacactgatgtatgaaactattcatacatcaagcagcatttttttcactctccttagaattggaactatgcagttaaggcagataaaatgtacagatgtttcatatattacaggttacatatataaatcaaaatttcctatataaaactgatttgggatttggggtggaaatattttgaatattaatttatttttaaagatgcaagataggactttgtgcaatgtatttttgtaaatgcttttcaaaatatctgtctttggtagtgcttctgctgctgccaccaaattgataagatgctattaagaggtttaaataaagagttttaatttttaaaagccgaagataagacaaccgtcaacacaaacacggaaacaacaaacagctttgtgtggcgcgcccacttgaggcctccagagaaaagttttataaaacacacattctggttggggccgcggcggccaccaaggggtatcaggagaccatgggcaatacgcgtgtgcccaacgaaaacccggggtacaaaggcaacggggtgggttctcccaccaaaaaaaaagcgcgggggggaaacgggcggttctgaacaagatcccgatggacgctggggcactcaggggccatcaaaggggccagccactcagttaaatac

SEQ ID NO: 643182 - DNA, 3698 bp, Homo sapiens
agcgggtctctcgggcctgggcggcgcagacgaggcctgaggcggcggcgcgaggcagtatggtttgaagtggtgaacatggatttttctcggcttcacatgtacagtcctccccagtgtgtgccggagaacacgggctacacgtatgcgctcagttccagctattcttcagatgctctggattttgagacggagcacaaattggaccctgtatttgattctccacggatgtcccgccgtagtttgcgcctggccacgacagcatgcaccctgggggatggtgaggctgtgggtgccgacagcggcaccagcagcgctgtctccctgaagaaccgagcggccagaacaacaaaacagcgcagaagcacaaacaaatcagcttttagtatcaaccacgtgtcaaggcaggtcacgtcctctggcgtcagccacggcggcactgtcagcctgcaggatgctgtgactcgacggcctcctgtattggacgagtcttggattcgtgaacagaccacagtggaccacttctgggggaaggcagcctctggagtgttctggtggctggggattggatggtaccagtttgttactttgatttcttggctgaatgtgtttcttcttaccaggtgccttcgaaacatctgcaagtttttagtcttgctcatcccactcttccttttactagcaggtctctccttacggggccagggcaatttcttttcgttcttgcccgtgttgaactgggcaagcatgcatagaacacagcgggtggatgacccccaggacgtgtttaaacccacgacttctcgcctgaagcagcctctgcagggtgacagtgaggcttttccgtggcattggatgagtggcgtggagcagcaggtggcctctctgtctggacagtgccaccaccatggtgagaatctccgagagctgaccactttgctacagaagctgcaggctcgggtggaccagatggaaggcggcgctgccgggccgtcagcttcggtcagagacgctgtgggacagcccccgagggagactgactttatggcctttcaccaagaacatgaagtgcgtatgtcacacttggaagatattctgggaaaactgagagaaaaatctgaggccatccagaaggaactagaacagaccaagcaaaaaacaatcagtgcggttggtgagcagctcctgcccacagtcgagcacctccagctggagctggatcagctaaagtcagagctgtccagctggcgacacgtgaagaccggctgtgagacagtggatgccgtacaagaaagagtggacgtgcaagtcagagaaatggtgaaactcctgttttccgaagatcagcaaggcggttctctggaacagctgctgcagaggttctcatcacagtttgtgagcaaaggcgacttgcagacgatgctgcgagacctgcagctgcagatcctgcggaacgtcacccaccacgtttccgtgaccaagcagctcccaacctcagaagccgtggtgtctgctgtgagcgaggcgggggcgtctggaataacagaggcgcaagcacgtgccatcgtgaacagcgccttgaagctgtattcccaagataagaccgggatggtggactttgctctggaatctggtggtggcagcatcttgagtactcgctgttctgaaacttacgaaaccaaaacggcgctgatgagtctgtttgggatcccgctgtggtacttctcgcagtccccgcgcgtggtcatccagcctgacatttaccccggtaactgctgggcatttaaaggctcccaggggtacctggtggtgaggctctccatgatgatccacccagccgccttcactctggagcacatccctaagacgctgtcgccaacaggcaacatcagcagcgcccccaaggacttcgccgtctatggattagaaaatgagtatcaggaagaagggcagcttctgggacagttcacgtatgatcaggatggggagtcgctccagatgttccaggccctgaaaagacccgacgacacagctttccaaatagtggaacttcggattttttctaactggggccatcctgagtatacctgtctgtatcggttcagagttcatggcgaacctgtcaagtgaagacactactcattatttttgtacatttttgtatatactgggacagcgtgaaacactggaatccttcatggacgagggcatatacaatgatgggacagtgccacactccttcaataaacgtggctgctggccagaggacgtgagcgtgtgacgggcgccttggcgccacctgttgggtgctcactgcctctgcaggtgcagaggggtcagcagcaggagaagcgtgttgaacacgtggctctcagacactccttgtttttaacgggaagctctttgcatttgcatttcctcaacaaaggagcaaagcagaggaagctgagagtctggcgtgttcttgacgctttggtcttcagccttgcactggctcttctaaaggacttttggagggcagataatttcatctgttaaatccaacacacatttctttcagggaaaaacaatgtcaccaaattttcagagttctaaactcctttccttcaagccggaattttccttttttcagcaccagtaggtactaagtctccagatggggaaataactaaaatgtgtttttctgctttgttcgctcttacttctgaggaaggtttccagtcaggactcgctgtaccaatatccatggaggaatatgggagcgtttcgctctccttgtaggctgaagtcagtctgacttgaaggggcctggtttggatctaagcaaacacccagatggggttctctggtctcagcaaggcttttcctgttgggagtcacagtaaacagaaacccaaaaatctcatcttgggtgttttcagggcttgttttgagttttgctgaatagggagcgcaagacgccctgagcctccctctcactggtggtgataagaggagccgtctggtgtgtcagggtcacgaacccgttacatttcaggacgatcctttttccttcagcagcatttcttactggctgtggctggaatctgccttttatcacagctgtcaccattctcacgtgattcttgtgagactctttttggttataattactatttaatatttagactattttactgagcagactttataaatgagatatctacaaggcacttaaagtgttacagatgttttaccttaagaattatttaagttgtgttgggttaagacagttttcagtgtaccgtaaatgttgtgttttcagaaaaagacaaaacgatggtgctgactggttttctgtatattgcacaacagtcctcaaatacactgatgtatgaaactattcatacatcaagcagcatttttttcactctccttagaattggaactatgcagttaaggcagataaaatgtacagatgtttcatatattacaggttacatatataaatcaaaatttcctatataaaactgatttgggatttggggtggaaatattttgaatattaatttatttttaaagatgcaagataggactttgtgcaatgtatttttgtaaatgcttttcaaaatatctgtctttggtagtgcttctgctgctgccaccaaattgataagatgctattaagaggtttaaataaagagttttaatttttaaaa

SEQ ID NO: 643183 - DNA, 3626 bp, Homo sapiens
agcgggtctctcgggcctgggcggcgcagacgaggcctgaggcggcggcgcgaggcagtatggtttgaagtggtgaacatggatttttctcggcttcacatgtacagtcctccccagtgtgtgccggagaacacgggctacacgtatgcgctcagttccagctattcttcagatgctctggattttgagacggagcacaaattggaccctgtatttgattctccacggatgtcccgccgtagtttgcgcctggccacgacagcatgcaccctgggggatggtgaggctgtgggtgccgacagcggcaccagcagcgctgtctccctgaagaaccgagcggccagaacaacaaaacagcgcagaagcacaaacaaatcagcttttagtatcaaccacgtgtcaaggcaggtcacgtcctctggcgtcagccacggcggcactgtcagcctgcaggatgctgtgactcgacggcctcctgtattggacgagtcttggattcgtgaacagaccacagtggaccacttctggggtcttgatgatgatggtgatcttaaaggtggaaacatctgcaagtttttagtcttgctcatcccactcttccttttactagcaggtctctccttacggggccagggcaatttcttttcgttcttgcccgtgttgaactgggcaagcatgcatagaacacagcgggtggatgacccccaggacgtgtttaaacccacgacttctcgcctgaagcagcctctgcagggtgacagtgaggcttttccgtggcattggatgagtggcgtggagcagcaggtggcctctctgtctggacagtgccaccaccatggtgagaatctccgagagctgaccactttgctacagaagctgcaggctcgggtggaccagatggaaggcggcgctgccgggccgtcagcttcggtcagagacgctgtgggacagcccccgagggagactgactttatggcctttcaccaagaacatgaagtgcgtatgtcacacttggaagatattctgggaaaactgagagaaaaatctgaggccatccagaaggaactagaacagaccaagcaaaaaacaatcagtgcggttggtgagcagctcctgcccacagtcgagcacctccagctggagctggatcagctaaagtcagagctgtccagctggcgacacgtgaagaccggctgtgagacagtggatgccgtacaagaaagagtggacgtgcaagtcagagaaatggtgaaactcctgttttccgaagatcagcaaggcggttctctggaacagctgctgcagaggttctcatcacagtttgtgagcaaaggcgacttgcagacgatgctgcgagacctgcagctgcagatcctgcggaacgtcacccaccacgtttccgtgaccaagcagctcccaacctcagaagccgtggtgtctgctgtgagcgaggcgggggcgtctggaataacagaggcgcaagcacgtgccatcgtgaacagcgccttgaagctgtattcccaagataagaccgggatggtggactttgctctggaatctggtggtggcagcatcttgagtactcgctgttctgaaacttacgaaaccaaaacggcgctgatgagtctgtttgggatcccgctgtggtacttctcgcagtccccgcgcgtggtcatccagcctgacatttaccccggtaactgctgggcatttaaaggctcccaggggtacctggtggtgaggctctccatgatgatccacccagccgccttcactctggagcacatccctaagacgctgtcgccaacaggcaacatcagcagcgcccccaaggacttcgccgtctatggattagaaaatgagtatcaggaagaagggcagcttctgggacagttcacgtatgatcaggatggggagtcgctccagatgttccaggccctgaaaagacccgacgacacagctttccaaatagtggaacttcggattttttctaactggggccatcctgagtatacctgtctgtatcggttcagagttcatggcgaacctgtcaagtgaagacactactcattatttttgtacatttttgtatatactgggacagcgtgaaacactggaatccttcatggacgagggcatatacaatgatgggacagtgccacactccttcaataaacgtggctgctggccagaggacgtgagcgtgtgacgggcgccttggcgccacctgttgggtgctcactgcctctgcaggtgcagaggggtcagcagcaggagaagcgtgttgaacacgtggctctcagacactccttgtttttaacgggaagctctttgcatttgcatttcctcaacaaaggagcaaagcagaggaagctgagagtctggcgtgttcttgacgctttggtcttcagccttgcactggctcttctaaaggacttttggagggcagataatttcatctgttaaatccaacacacatttctttcagggaaaaacaatgtcaccaaattttcagagttctaaactcctttccttcaagccggaattttccttttttcagcaccagtaggtactaagtctccagatggggaaataactaaaatgtgtttttctgctttgttcgctcttacttctgaggaaggtttccagtcaggactcgctgtaccaatatccatggaggaatatgggagcgtttcgctctccttgtaggctgaagtcagtctgacttgaaggggcctggtttggatctaagcaaacacccagatggggttctctggtctcagcaaggcttttcctgttgggagtcacagtaaacagaaacccaaaaatctcatcttgggtgttttcagggcttgttttgagttttgctgaatagggagcgcaagacgccctgagcctccctctcactggtggtgataagaggagccgtctggtgtgtcagggtcacgaacccgttacatttcaggacgatcctttttccttcagcagcatttcttactggctgtggctggaatctgccttttatcacagctgtcaccattctcacgtgattcttgtgagactctttttggttataattactatttaatatttagactattttactgagcagactttataaatgagatatctacaaggcacttaaagtgttacagatgttttaccttaagaattatttaagttgtgttgggttaagacagttttcagtgtaccgtaaatgttgtgttttcagaaaaagacaaaacgatggtgctgactggttttctgtatattgcacaacagtcctcaaatacactgatgtatgaaactattcatacatcaagcagcatttttttcactctccttagaattggaactatgcagttaaggcagataaaatgtacagatgtttcatatattacaggttacatatataaatcaaaatttcctatataaaactgatttgggatttggggtggaaatattttgaatattaatttatttttaaagatgcaagataggactttgtgcaatgtatttttgtaaatgcttttcaaaatatctgtctttggtagtgcttctgctgctgccaccaaattgataagatgctattaagaggtttaaataaagagttttaatttttaaaa

SEQ ID NO: 643184 - DNA, 4343 bp, Homo sapiens
agcgggtctctcgggcctgggcggcgcagacgaggcctgaggcggcggcgcgaggcagtatggtttgaagtggtgaacatggatttttctcggcttcacatgtacagtcctccccagtgtgtgccggagaacacgggctacacgtatgcgctcagttccagctattcttcagatgctctggattttgagacggagcacaaattggaccctgtatttgattctccacggatgtcccgccgtagtttgcgcctggccacgacagcatgcaccctgggggatggtgaggctgtgggtgccgacagcggcaccagcagcgctgtctccctgaagaaccgagcggccagaacaacaaaacagcgcagaagcacaaacaaatcagcttttagtatcaaccacgtgtcaaggcaggtcacgtcctctggcgtcagccacggcggcactgtcagcctgcaggatgctgtgactcgacggcctcctgtattggacgagtcttggattcgtgaacagaccacagtggaccacttctggggtcttgatgatgatggtgatcttaaaggtggaaataaagctgccattcagggaaacggggatgtgggagccgccgccgccaccgcgcacaacggcttctcctgcagcaactgcagcatgctgtccgagcgcaaggacgtgctcacggcgcaccccgcggcccccgggcccgtgtcgagagtttattctagggacaggaatcaaaaatgcggtgcgtctttctacgtgaataggattttgtggctggccagatacactgcatcatctttttcatcatttttagttcaactttttcaagtggttttaatgaagctcagttatgaatcagaaaattacaaattgaaaactcatgaatcaaaagattgtgaatccgaaagctataagtcaaaaagccatgaatcaaaagctcatgccagttactatgggagaatgaatgtgagagaggttctcagagaggatggccacctcagtgtaaatggggaagcgctgtgcgacgactgtaagggcaagaggcacctcgacgcgcacacagccgcccactcgcagtcgccacggctgcccggtcgggcagggaccctctggcacatctgggcatgtgcaggttacttcttgctgcagattctgcgcaggatcggagctgtgggccaggctgtgtccaggacggcgtggtcggccctttggctggccgtggttgctccagggaaggcagcctctggagtgttctggtggctggggattggatggtaccagtttgttactttgatttcttggctgaatgtgtttcttcttaccaggtgccttcgaaacatctgcaagtttttagtcttgctcatcccactcttccttttactagcaggtctctccttacggggccagggcaatttcttttcgttcttgcccgtgttgaactgggcaagcatgcatagaacacagcgggtggatgacccccaggacgtgtttaaacccacgacttctcgcctgaagcagcctctgcagggtgacagtgaggcttttccgtggcattggatgagtggcgtggagcagcaggtggcctctctgtctggacagtgccaccaccatggtgagaatctccgagagctgaccactttgctacagaagctgcaggctcgggtggaccagatggaaggcggcgctgccgggccgtcagcttcggtcagagacgctgtgggacagcccccgagggagactgactttatggcctttcaccaagaacatgaagtgcgtatgtcacacttggaagatattctgggaaaactgagagaaaaatctgaggccatccagaaggaactagaacagaccaagcaaaaaacaatcagtgcggttggtgagcagctcctgcccacagtcgagcacctccagctggagctggatcagctaaagtcagagctgtccagctggcgacacgtgaagaccggctgtgagacagtggatgccgtacaagaaagagtggacgtgcaagtcagagaaatggtgaaactcctgttttccgaagatcagcaaggcggttctctggaacagctgctgcagaggttctcatcacagtttgtgagcaaaggcgacttgcagacgatgctgcgagacctgcagctgcagatcctgcggaacgtcacccaccacgtttccgtgaccaagcagctcccaacctcagaagccgtggtgtctgctgtgagcgaggcgggggcgtctggaataacagaggcgcaagcacgtgccatcgtgaacagcgccttgaagctgtattcccaagataagaccgggatggtggactttgctctggaatctggtggtggcagcatcttgagtactcgctgttctgaaacttacgaaaccaaaacggcgctgatgagtctgtttgggatcccgctgtggtacttctcgcagtccccgcgcgtggtcatccagcctgacatttaccccggtaactgctgggcatttaaaggctcccaggggtacctggtggtgaggctctccatgatgatccacccagccgccttcactctggagcacatccctaagacgctgtcgccaacaggcaacatcagcagcgcccccaaggacttcgccgtctatggattagaaaatgagtatcaggaagaagggcagcttctgggacagttcacgtatgatcaggatggggagtcgctccagatgttccaggccctgtggggccatcctgagtatacctgtctgtatcggttcagagttcatggcgaacctgtcaagtgaagacactactcattatttttgtacatttttgtatatactgggacagcgtgaaacactggaatccttcatggacgagggcatatacaatgatgggacagtgccacactccttcaataaacgtggctgctggccagaggacgtgagcgtgtgacgggcgccttggcgccacctgttgggtgctcactgcctctgcaggtgcagaggggtcagcagcaggagaagcgtgttgaacacgtggctctcagacactccttgtttttaacgggaagctctttgcatttgcatttcctcaacaaaggagcaaagcagaggaagctgagagtctggcgtgttcttgacgctttggtcttcagccttgcactggctcttctaaaggacttttggagggcagataatttcatctgttaaatccaacacacatttctttcagggaaaaacaatgtcaccaaattttcagagttctaaactcctttccttcaagccggaattttccttttttcagcaccagtaggtactaagtctccagatggggaaataactaaaatgtgtttttctgctttgttcgctcttacttctgaggaaggtttccagtcaggactcgctgtaccaatatccatggaggaatatgggagcgtttcgctctccttgtaggctgaagtcagtctgacttgaaggggcctggtttggatctaagcaaacacccagatggggttctctggtctcagcaaggcttttcctgttgggagtcacagtaaacagaaacccaaaaatctcatcttgggtgttttcagggcttgttttgagttttgctgaatagggagcgcaagacgccctgagcctccctctcactggtggtgataagaggagccgtctggtgtgtcagggtcacgaacccgttacatttcaggacgatcctttttccttcagcagcatttcttactggctgtggctggaatctgccttttatcacagctgtcaccattctcacgtgattcttgtgagactctttttggttataattactatttaatatttagactattttactgagcagactttataaatgagatatctacaaggcacttaaagtgttacagatgttttaccttaagaattatttaagttgtgttgggttaagacagttttcagtgtaccgtaaatgttgtgttttcagaaaaagacaaaacgatggtgctgactggttttctgtatattgcacaacagtcctcaaatacactgatgtatgaaactattcatacatcaagcagcatttttttcactctccttagaattggaactatgcagttaaggcagataaaatgtacagatgtttcatatattacaggttacatatataaatcaaaatttcctatataaaactgatttgggatttggggtggaaatattttgaatattaatttatttttaaagatgcaagataggactttgtgcaatgtatttttgtaaatgcttttcaaaatatctgtctttggtagtgcttctgctgctgccaccaaattgataagatgctattaagaggtttaaataaagagttttaatttttaaaa

SEQ ID NO: 643185 - DNA, 365 bp, Homo sapiens
ttccgggagccactgagtaagaaaacagtctttagatgctctccatcagtgagctaaaatacttggagagaactgtctcctattgtggcctagaagtccacgagaacccacctgaggacccaggctgaccatgatcctttctgtctgaacctttaatatattgagggcttttccagagtttgtacctctgaccctgaccctgcctcaactctcagtctttagtccctgggaccttgaggggaagggagatgctgtccatatttttatcagctaaggggaactatattcctgttttgttcctttaaatatcatttctggtgaacataacttaatgatgtttttttcttcctttcagacaaaatttc

SEQ ID NO: 643186 - DNA, 213 bp, Homo sapiens
tatgacggactcccccacgacaacacggtgtggttgctactcgacacgacggaccggtggccactggaacgtcggacactccgctacaggacgtgtgtaacaacctcacccggccgacactaccctacgccctgacaactggactggcgctggacgcgtcggtgcccactaccccgtgccgtcgccggcacgtcgacgacgtggaccacgcgg

SEQ ID NO: 643187 - DNA, 3611 bp, Homo sapiens
agcgggtctctcgggcctgggcggcgcagacgaggcctgaggcggcggcgcgaggcagtatggtttgaagtggtgaacatggatttttctcggcttcacatgtacagtcctccccagtgtgtgccggagaacacgggctacacgtatgcgctcagttccagctattcttcagatgctctggattttgagacggagcacaaattggaccctgtatttgattctccacggatgtcccgccgtagtttgcgcctggccacgacagcatgcaccctgggggatggtgaggctgtgggtgccgacagcggcaccagcagcgctgtctccctgaagaaccgagcggccagaacaacaaaacagcgcagaagcacaaacaaatcagcttttagtatcaaccacgtgtcaaggcaggtcacgtcctctggcgtcagccacggcggcactgtcagcctgcaggatgctgtgactcgacggcctcctgtattggacgagtcttggattcgtgaacagaccacagtggaccacttctgggggaaggcagcctctggagtgttctggtggctggggattggatggtaccagtttgttactttgatttcttggctgaatgtgtttcttcttaccaggtgccttcgaaacatctgcaagtttttagtcttgctcatcccactcttccttttactagcaggtctctccttacggggccagggcaatttcttttcgttcttgcccgtgttgaactgggcaagcatgcatagaacacagcgggtggatgacccccaggacgtgtttaaacccacgacttctcgcctgaagcagcctctgcagggtgacagtgaggcttttccgtggcattggatgagtggcgtggagcagcaggtggcctctctgtctggacagtgccaccaccatggtgagaatctccgagagctgaccactttgctacagaagctgcaggctcgggtggaccagatggaaggcggcgctgccgggccgtcagcttcggtcagagacgctgtgggacagcccccgagggaggccatccagaaggaactagaacagaccaagcaaaaaacaatcagtgcggttggtgagcagctcctgcccacagtcgagcacctccagctggagctggatcagctaaagtcagagctgtccagctggcgacacgtgaagaccggctgtgagacagtggatgccgtacaagaaagagtggacgtgcaagtcagagaaatggtgaaactcctgttttccgaagatcagcaaggcggttctctggaacagctgctgcagaggttctcatcacagtttgtgagcaaaggcgacttgcagacgatgctgcgagacctgcagctgcagatcctgcggaacgtcacccaccacgtttccgtgaccaagcagctcccaacctcagaagccgtggtgtctgctgtgagcgaggcgggggcgtctggaataacagaggcgcaagcacgtgccatcgtgaacagcgccttgaagctgtattcccaagataagaccgggatggtggactttgctctggaatctggtggtggcagcatcttgagtactcgctgttctgaaacttacgaaaccaaaacggcgctgatgagtctgtttgggatcccgctgtggtacttctcgcagtccccgcgcgtggtcatccagcctgacatttaccccggtaactgctgggcatttaaaggctcccaggggtacctggtggtgaggctctccatgatgatccacccagccgccttcactctggagcacatccctaagacgctgtcgccaacaggcaacatcagcagcgcccccaaggacttcgccgtctatggattagaaaatgagtatcaggaagaagggcagcttctgggacagttcacgtatgatcaggatggggagtcgctccagatgttccaggccctgaaaagacccgacgacacagctttccaaatagtggaacttcggattttttctaactggggccatcctgagtatacctgtctgtatcggttcagagttcatggcgaacctgtcaagtgaagacactactcattatttttgtacatttttgtatatactgggacagcgtgaaacactggaatccttcatggacgagggcatatacaatgatgggacagtgccacactccttcaataaacgtggctgctggccagaggacgtgagcgtgtgacgggcgccttggcgccacctgttgggtgctcactgcctctgcaggtgcagaggggtcagcagcaggagaagcgtgttgaacacgtggctctcagacactccttgtttttaacgggaagctctttgcatttgcatttcctcaacaaaggagcaaagcagaggaagctgagagtctggcgtgttcttgacgctttggtcttcagccttgcactggctcttctaaaggacttttggagggcagataatttcatctgttaaatccaacacacatttctttcagggaaaaacaatgtcaccaaattttcagagttctaaactcctttccttcaagccggaattttccttttttcagcaccagtaggtactaagtctccagatggggaaataactaaaatgtgtttttctgctttgttcgctcttacttctgaggaaggtttccagtcaggactcgctgtaccaatatccatggaggaatatgggagcgtttcgctctccttgtaggctgaagtcagtctgacttgaaggggcctggtttggatctaagcaaacacccagatggggttctctggtctcagcaaggcttttcctgttgggagtcacagtaaacagaaacccaaaaatctcatcttgggtgttttcagggcttgttttgagttttgctgaatagggagcgcaagacgccctgagcctccctctcactggtggtgataagaggagccgtctggtgtgtcagggtcacgaacccgttacatttcaggacgatcctttttccttcagcagcatttcttactggctgtggctggaatctgccttttatcacagctgtcaccattctcacgtgattcttgtgagactctttttggttataattactatttaatatttagactattttactgagcagactttataaatgagatatctacaaggcacttaaagtgttacagatgttttaccttaagaattatttaagttgtgttgggttaagacagttttcagtgtaccgtaaatgttgtgttttcagaaaaagacaaaacgatggtgctgactggttttctgtatattgcacaacagtcctcaaatacactgatgtatgaaactattcatacatcaagcagcatttttttcactctccttagaattggaactatgcagttaaggcagataaaatgtacagatgtttcatatattacaggttacatatataaatcaaaatttcctatataaaactgatttgggatttggggtggaaatattttgaatattaatttatttttaaagatgcaagataggactttgtgcaatgtatttttgtaaatgcttttcaaaatatctgtctttggtagtgcttctgctgctgccaccaaattgataagatgctattaagaggtttaaataaagagttttaatttttaaaa

SEQ ID NO: 643188 - DNA, 997 bp, Homo sapiens
cttgcccatcccgtgttttcaagtgttactgtatatgccactatatcccttcgcctgtctatgtgttccttgttcatcgtggttggaacagtggcgcgttgtcccacgaaaccggtgagtgcagatcgtatttggcgtcacttcggatcatatcagatggggaacataaattgatggtagcttctcaaagaactgggcaaatgggatggctcaggaagttactcggtggttgattccacaagcccatagggaaatcgacataccgtatatcgtgatatcgttatctcgtctttttagccaccccctattgctgtgttgcattagttagctgggttgcttgcagcagcgtgtcacaacagctgctattatgcgagtgcgacggctttgcttaaatacgaatattgctggaactacttgttggttcagcggtcatgtattagtgtctgataagctgtacagttcacatagagagagcttctcgatgggctgttgctggacgatgagatgtgtgttataggctgaagccaggagagcctagagacacaagctattttcagtagtagtagcgatcctattcgaagtataatcgttgtcgtcttaaaatttcttttagcatagcagttttcagtggatgagaaagaatcttctatgtggactatatttgggctaaaataatggctgttgtcgtaatcgaagcacaaggtggtaaaggtacaaagttggaagactgttcaagttaacgagacttgctgcaaagccttgcagaacggaggaggctctagccatcgactggcgtgtctcctccctccaacctctctacatatcatgcctgctttgagctgttctgttgccagcaagctgcaccattgggtcactctatttggaatatagtcgactataggctgcgatcacaggcagtaaaaggagttgatgggaaatggactaaaaaactgacatgtgcgaatcagtgatagagggaattacgtgcgccacttga

SEQ ID NO: 643189 - DNA, 4525 bp, Homo sapiens
agcgggtctctcgggcctgggcggcgcagacgaggcctgaggcggcggcgcgaggcagtatggtttgaagtggtgaacatggatttttctcggcttcacatgtacagtcctccccagtgtgtgccggagaacacgggctacacgtatgcgctcagttccagctattcttcagatgctctggattttgagacggagcacaaattggaccctgtatttgattctccacggatgtcccgccgtagtttgcgcctggccacgacagcatgcaccctgggggatggtgaggctgtgggtgccgacagcggcaccagcagcgctgtctccctgaagaaccgagcggccagaacaacaaaacagcgcagaagcacaaacaaatcagcttttagtatcaaccacgtgtcaaggcaggtcacgtcctctggcgtcagccacggcggcactgtcagcctgcaggatgctgtgactcgacggcctcctgtattggacgagtcttggattcgtgaacagaccacagtggaccacttctggggtcttgatgatgatggtgatcttaaaggtggaaataaagctgccattcagggaaacggggatgtgggagccgccgccgccaccgcgcacaacggcttctcctgcagcaactgcagcatgctgtccgagcgcaaggacgtgctcacggcgcaccccgcggcccccgggcccgtgtcgagagtttattctagggacaggaatcaaaaatgcggtgcgtctttctacgtgaataggattttgtggctggccagatacactgcatcatctttttcatcatttttagttcaactttttcaagtggttttaatgaagctcagttatgaatcagaaaattacaaattgaaaactcatgaatcaaaagattgtgaatccgaaagctataagtcaaaaagccatgaatcaaaagctcatgccagttactatgggagaatgaatgtgagagaggttctcagagaggatggccacctcagtgtaaatggggaagcgctgtgcgacgactgtaagggcaagaggcacctcgacgcgcacacagccgcccactcgcagtcgccacggctgcccggtcgggcagggaccctctggcacatctgggcatgtgcaggttacttcttgctgcagattctgcgcaggatcggagctgtgggccaggctgtgtccaggacggcgtggtcggccctttggctggccgtggttgctccagggaaggcagcctctggagtgttctggtggctggggattggatggtaccagtttgttactttgatttcttggctgaatgtgtttcttcttaccaggtgccttcgaaacatctgcaagtttttagtcttgctcatcccactcttccttttactagcaggtctctccttacggggccagggcaatttcttttcgttcttgcccgtgttgaactgggcaagcatgcatagaacacagcgggtggatgacccccaggacgtgtttaaacccacgacttctcgcctgaagcagcctctgcagggtgacagtgaggcttttccgtggcattggatgagtggcgtggagcagcaggtggcctctctgtctggacagtgccaccaccatggtgagaatctccgagagctgaccactttgctacagaagctgcaggctcgggtggaccagatggaaggcggcgctgccgggccgtcagcttcggtcagagacgctgtgggacagcccccgagggagactgactttatggcctttcaccaagaacatgaagtgcgtatgtcacacttggaagatattctgggaaaactgagagaaaaatctgaggccatccagaaggaactagaacagaccaagcaaaaaacaatcagtgcggttggtgagcagctcctgcccacagtcgagcacctccagctggagctggatcagctaaagtcagagctgtccagctggcgacacgtgaagaccggctgtgagacagtggatgccgtacaagaaagagtggacgtgcaagtcagagaaatggtgaaactcctgttttccgaagatcagcaaggcggttctctggaacagctgctgcagaggttctcatcacagtttgtgagcaaaggcgacttgcagacgatgctgcgagacctgcagctgcagatcctgcggaacgtcacccaccacgtttccgtgaccaagcagctcccaacctcagaagccgtggtgtctgctgtgagcgaggcgggggcgtctggaataacagaggcgcaagcacgtgccatcgtgaacagcgccttgaagctgtattcccaagataagaccgggatggtggactttgctctggaatctggtggtggcagcatcttgagtactcgctgttctgaaacttacgaaaccaaaacggcgctgatgagtctgtttgggatcccgctgtggtacttctcgcagtccccgcgcgtggtcatccagcctgacatttaccccggtaactgctgggcatttaaaggctcccaggggtacctggtggtgaggctctccatgatgatccacccagccgccttcactctggagcacatccctaagacgctgtcgccaacaggcaacatcagcagcgcccccaaggacttcgccgtctatggattagaaaatgagtatcaggaagaagggcagcttctgggacagttcacgtatgatcaggatggggagtcgctccagatgttccaggccctgaaaagacccgacgacacagctttccaaatagtggaacttcggattttttctaactggggccatcctgagtatacctgtctgtatcggttcagagttcatggcgaacctgtcaagtgaagacactactcattatttttgtacatttttgtatatactgggacagcgtgaaacactggaatccttcatggacgagggcatatacaatgatgggacagtgccacactccttcaataaacgtggctgctggccagaggacgtgagcgtgtgacgggcgccttggcgccacctgttgggtgctcactgcctctgcaggtgcagaggggtcagcagcaggagaagcgtgttgaacacgtggctctcagacactccttgtttttaacgggaagctctttgcatttgcatttcctcaacaaaggagcaaagcagaggaagctgagagtctggcgtgttcttgacgctttggtcttcagccttgcactggctcttctaaaggacttttggagggcagataatttcatctgttaaatccaacacacatttctttcagggaaaaacaatgtcaccaaattttcagagttctaaactcctttccttcaagccggaattttccttttttcagcaccagtaggtactaagtctccagatggggaaataactaaaatgtgtttttctgctttgttcgctcttacttctgaggaaggtttccagtcaggactcgctgtaccaatatccatggaggaatatgggagcgtttcgctctccttgtaggctgaagtcagtctgacttgaaggggcctggtttggatctaagcaaacacccagatggggttctctggtctcagcaaggcttttcctgttgggagtcacagtaaacagaaacccaaaaatctcatcttgggtgttttcagggcttgttttgagttttgctgaatagggagcgcaagacgccctgagcctccctctcactggtggtgataagaggagccgtctggtgtgtcagggtcacgaacccgttacatttcaggacgatcctttttccttcagcagcatttcttactggctgtggctggaatctgccttttatcacagctgtcaccattctcacgtgattcttgtgagactctttttggttataattactatttaatatttagactattttactgagcagactttataaatgagatatctacaaggcacttaaagtgttacagatgttttaccttaagaattatttaagttgtgttgggttaagacagttttcagtgtaccgtaaatgttgtgttttcagaaaaagacaaaacgatggtgctgactggttttctgtatattgcacaacagtcctcaaatacactgatgtatgaaactattcatacatcaagcagcatttttttcactctccttagaattggaactatgcagttaaggcagataaaatgtacagatgtttcatatattacaggttacatatataaatcaaaatttcctatataaaactgatttgggatttggggtggaaatattttgaatattaatttatttttaaagatgcaagataggactttgtgcaatgtatttttgtaaatgcttttcaaaatatctgtctttggtagtgcttctgctgctgccaccaaattgataagatgctattaagaggtttaaataaagagttttaatttttaaaaaaataatattttttttaaatagccttgcggcccaaatttgagcttaattttggccaatttgccccttttgggaagtcgatatacaaattaattggcccgtcgttttaacaaactttgtaatttggaaa

SEQ ID NO: 643190 - DNA, 243 bp, Homo sapiens
cacaaatgggtgggccaatgggggggtttttgcccccaaaaggggggtgggggggccccttttggggttttcttttcccctttagggggggagggggggccttccctttcccccagggtgggggtcttttccccccccccttttttgcccccgggggggggggggggggtttttttttgggggccggttggccccttttttttttgggggaaaataaagccaattggggggcccttcccccca

SEQ ID NO: 643191 - DNA, 159 bp, Homo sapiens
  misc_feature (27)..(27): n is a, c, g, or t
  misc_feature (50)..(50): n is a, c, g, or t
gccatgctgagggccgcagcctgatgnacatgtgggccacgcctttggtngatatgcgtcagctgggggtcttgtgtgtgccctgcccaccgttctctgccctagtgatagaaagatgtagatggaagtcagtgcctcagaggaggaggctctgaggct

SEQ ID NO: 643192 - DNA, 631 bp, Homo sapiens
agcgggcgggcttctttgcctgcaaccacgggaacttcgaggtatgcccaaccatatacacatgggagcaggagctccacctcagtttaaccggatggaagaaatgggtgtccaatgagggtggtcgagccaaacgctatgcatcccagcggaaagaactgtgccagagcccccctgtccctccagggtgcatagtcacgtatcaatggagggacatttacttatgattccatcgtgcagttccatgggagcaaagtctattagcccatggtgacaggccctgccgcgctggctccagagggcagtgcgttggtgcaacgcgcaaggatgtgaacctttgcgcctatcgcaaggtttaatgatcgccccgagcaagagcaccatgctcgctctgccacgagatccaggccttctgatcacaccacacgcaggtgtccatgtcatccaggaaccaggcacacagcgtcaggagttgcttgatcctacttactgtttctgttccagggcgtcgatgaacttggtaatcccagttacccttatgctccagggcaatgcactacccacaccaacgctcatctgtatcctaatacacaggccccatcacaggtatatggaggagtgacctagtata

SEQ ID NO: 643193 - DNA, 424 bp, Homo sapiens
  misc_feature (424)..(424): n is a, c, g, or t
cgcggagagagagtagtagagagtagtagtagagagagagagagagagagagagagagagagagagagagagagagagagagagagacagacagagagagagagagacagccttatacctctcaccctctttcccctctcgcccttccactctcttttcctccctcctctctctctctctcccttcccctccacccttctctctccccctcactgttcgcatctccctcctctcctcccctcccttccctcctctcttttttttttttccatcccctctttctctctttccccctccttccctcccctctccccctctttcctttcctctcccttctccttccctgtctcctcctcttcttctcccttctccttcccctccctcctctctcccgccttcccccctcctcctcctccttttctcn

SEQ ID NO: 643194 - DNA, 98 bp, Homo sapiens
atggcttcagtcttcataacaatcctgatttccacttagcagtcagcattaatcacaagcttgtattgcagaaactgttaactgaagttttcttcaag

SEQ ID NO: 643195 - DNA, 256 bp, Homo sapiens
gctacttcactctcacctgggcacagagctgagaccttgttctcaaaaaaaaaaaaaaaaaaaaaaggggaaatgcaaataaagggagcagttgtgccccaggagtactatttgaggggccaggctgctaaaaaagcagttaatgtacccttaaagcaaggttggaaaatttgctgtgggttagattcaaaaattccgcgggaattcaggcgttatcggagcaggggtaccgagcttcaaatcgataatcttgtca

SEQ ID NO: 643196 - DNA, 776 bp, Homo sapiens
  misc_feature (150)..(150): n is a, c, g, or t
  misc_feature (176)..(176): n is a, c, g, or t
  misc_feature (208)..(208): n is a, c, g, or t
tggaaaggtgcccctaccctgtcctggacctcaccagcagggaacacacaccaggaccagggcctttgtgaatacttggtggaatggatggacaaatgaatggacgggtggatgaatacagacatgtcagagtacagacatcaggcaaanatcaagcatgaaaattagaaacatantatgtgacaatccactctgcatagcaaacccnacatgtaatgtggtttggcatatgacatcatgagcttccatcgctgccctcgtccctccttccagataagctgctgcttccgcagcggatataactcttcttattgtgtttggactccaatcccatgtgaacacacagctgcacagtccaggatgcagcctggccaggtcaagaagcaaaaagccagctgggagtcgtgcccactttgggaagaacgcacagatccccaacacgggctccaggtgtcagcagaaggccctgatgttctacagacatgtgatgcctataatcaaagatcctccattcaaaattttcctacggatgggagtatctacacacaaaaaccgctcacccccaacactcttcatttgtctagctaaacgggttgttttaaacagaaattctgataaaacggagagggccatcatgtcaaggaaagttgctgttttataaactagaataatggatcaagccttggagtccctaaagagagaggatctcttgagcccaagagttcgaggctgcagtgagctgtagtgctgccactatactccagcctggaccacag

SEQ ID NO: 643197 - DNA, 405 bp, Homo sapiens
tccctccctataagacatcaggattatttatttatttatttatttatttatttatttattatttattattttttagagacagagtctcgctgtcgcccaggctggagtacagtggcaccatcttggctcactgcaacctctgccttctgggttccagcgattctcctgcctcagcctcctgagtagctgggactacaggtgcacaccaccatgcccagctaattttggtatttttagtagagacaaggtttaaccatgtgggcctggctcatctcgaactcctgacctccgttgatctgtccgcctgggcctcccaaagtactgggatgataagtgtgagccaccgcgctcagcctcacttacttatttttaaatttatttttacatatgaatgtctaataggga

SEQ ID NO: 643198 - DNA, 830 bp, Homo sapiens
  misc_feature (150)..(150): n is a, c, g, or t
  misc_feature (176)..(176): n is a, c, g, or t
  misc_feature (208)..(208): n is a, c, g, or t
tggaaaggtgcccctaccctgtcctggacctcaccagcagggaacacacaccaggaccagggcctttgtgaatacttggtggaatggatggacaaatgaatggacgggtggatgaatacagacatgtcagagtacagacatcaggcaaanatcaagcatgaaaattagaaacatantatgtgacaatccactctgcatagcaaacccnacatgtaatgtggtttggcatatgacatcatgagcttccatcgctgccctcgtccctccttccagataagctgctgcttccgcagcggatataactcttcttattgtgtttggactccaatcccatgtgaacacacagctgcacagtccaggatgcagcctggccaggtcaagaagcaaaaagccagctgggagtcgtgcccactttgggaagaacgcacagatccccaacacgggctccaggtgtcagcagaaggccctgatgttctacagacatgtgatgcctataatcaaagatcctccattcaaaggcacgggactctcacacctggaaatgtgctcagagaataccccgcaccattttattttcctacggatgggagtatctacacacaaaaaccgctcacccccaacactcttcatttgtctagctaaacgggttgttttaaacagaaattctgataaaacggagagggccatcatgtcaaggaaagttgctgttttataaactagaataatggatcaagccttggagtccctaaagagagaggatctcttgagcccaagagttcgaggctgcagtgagctgtagtgctgccactatactccagcctggaccacag

SEQ ID NO: 643199 - DNA, 413 bp, Homo sapiens
aacaaattgtaatagtgagagaaagaggagtgggggttcaggagatatttgacttgataggccaggaatgacgtgtatgttaaaagtgtgccgggcttataggtatctcttgatctggccaaacagctggtcctctctgtttctataaacttcgaaaatgccctcatgtctattttatcccttacagttgaataatgtagttgaagagtgcacactggatggtctcggtaactgggctgtgtctaggtagctcacagatgctgcaggtgaatttcaatggatccgttagctttactactaagatcttgctgagatcagagaagggcttctgggcaggctgagcactgggggtgtgcaacatggtaactctgaataagagaaaccctgagttttactgggcaaagaaagaacaa

SEQ ID NO: 643200 - DNA, 113 bp, Homo sapiens
cttgatgcagctccatgagggtttgaggttttttcacagattcttccccagttatctcatttataatacactcctctttgttaacaatctccttcccagcttctccagtacaa

SEQ ID NO: 643201 - DNA, 212 bp, Homo sapiens
taacctgcagctctcaagtgctgggatatagcatgagcacgtgccgtgagtacagttcttaaagacggtgtgtctggagtcgttcctgcagatgttcagcatgtttccatgagtttctatccttctggtgggttcgtggtctcactgacttcaggagtgaagccgcagaccttggcagtgagtgttacagctgttaaaggtggcaggtccgg

SEQ ID NO: 643202 - DNA, 260 bp, Homo sapiens
taccgtcagatcaacaagtttcccctttgaaatcatgggtatttcaaatgtaggtaggggattctctggcaaagcttagacctaacaaatctttctttgcctactgttttccgaatgcaagcttccaccagctgcatgtcttctgacctaactagtttcctgcacagctcacagagggttgcattttccttgtcccagcctacccccattggaatgtgctgttggcatgatactatatcatcctcattaataattaattg

SEQ ID NO: 643203 - DNA, 1466 bp, Homo sapiens
  misc_feature (1371)..(1371): n is a, c, g, or t
gccacgcgtacgaggcaggggtgggcagggtgcccacggaggaaagatatactaggatgtcctagcgaggctcgcagtgatggtctcatgctcggcaggcgtgcgatggccaagaggcaggctgagcgtggctgactctgctgtcccaaccgtaccagtggaggcaaggacagagttccttgtggcttatgtaattgtgtctctcaactggataggcgtgtgaggagttggacaaaagagaaaatcgcccattactaaagaccacgtacaggaggcgaggccgggctgctggaaggcatcgagaagcctggtagatacccatgcaactatagggcgaggccctacggcaggtgtagggactcgacctggagggccgaggccactacgcgagagaacccaagatactgggccgcgaagcatcgggctgtcatgaccacggcggaactactaaacgtaaacacaacataaggacaagaaagtctcagaccgcgaggaccatcggcgtgggttagcgagcccgaccctatataagatttcgcccaagctaacctctcgggagagaagaggccattgtacgcggagcactgcgcgcaggacagaaatgccgagggccatacggggacgacatatcctcagtgcccgcaaagggacgccacgccacagccgcgatgtggagcccagagaggaggacacgccacaccacgaagacaagttcaggagtctggcctcaaacgcattggtggcaaagctgtaccacgacaggagccccgatgggggcggccccacagccacggcgcacaaggggacagacaaaaaacaactcccttgaatccccaacgaagaggcgaccaaacatcgcagaccaacacacaaaataggcccccagagccgaacatagaacgccagcaagaccacaataaagcaacagacaaaccgacacaaaccacgtcggaagggacgaaattagcgcccatatatatcacaccacgagagaggcacaaacggagccgtatatcccgcgaaaagttcaaaagacacaaaagccggttcaaccactcctgttctgcagatattaacagcagtatatcactcccgaaaacggaagagaccaccatacgacacacacaaaggcatggagacacatgtgcacacacacagagggagaatggcggaacaagacgcagtctccatagtcaggaacactgagccacaatacaacatagaacgcacaagtgggcactcaacaggcgaacatggcacaacggcgagcaaccataactggacacatacactccacccccaccgtcgtacagacccccagcgcgtattaagcgacaaccgcacaagtagcggcatacccacaaacaacgntacagaaaagcagggaacaaccactactcgaccgaaagcggatccactagcccgcggaccaaaacctcacaaaccaccgacggatgcacacacca

SEQ ID NO: 643204 - DNA, 599 bp, Homo sapiens
tgtcaattgctgagccatcatacccagtactgtctggtctttctataatacaaatgtgcgttgcacatagtaaagagcgtatccaagatggattaaatataactgtgacacttgcctagcgaactgtttccatctagcttctttggtgcatcaatttttgatagtgaacgaggatgcttgcgacgtttgataaatagagttgtaactcaccagattactaacctattaaacatttatggtatttcggaacaaatacgggctctgtcctttcaggtctaacaaagagaccttttacgataggactattgaggattttaggttatgcaaaatgtaattgcttggattggtatatatagcccttctattgagcttagaaatgcttgtcacatcagcatggaataggctgggcactgtgcctcatgcctggaatcctagcaccttaggaggccaaggtgagagtatcattttgggccaggagttcaagaccagcctgggcaacactgcgagaccacatctctgccaaaaagaaaaaaatcgctggccatggtgacacatgcttgtagtcccagctaactggggggcactgaggtgggagaatt

SEQ ID NO: 643205 - DNA, 826 bp, Homo sapiens
  misc_feature (322)..(322): n is a, c, g, or t
tgcccaaccctgcgtagttccacggcgctctcgtgcgcacgcttgcgccgcggctggccctcatgctctcctctcgcgcacctaccatgccgcgcacacaccatcagcgctccgccgccatctgctcacccatgcgtctcatccgccactgcagcacacccagcggccatatctgcgctccgccactgcggcactcgctatgccccaccctccaccagctgcccagtcgcagccacccagcggctctaactggcccctcttccccaacacgcctgggcccaccttcgcccaccggcgcaccaccgaacccttagcacacttnaccactaaccaactaccttcagtaccagaaaccggagtataataccaccgtagcacacaaccacacgtactagtaccctacaaactctccaacgcaaccgaacgataaaacttagataccgccaggtaaacctcagatggagtcccttaggggccacgagacaccgagcggcccacaggacactcattttcccatcacttacaccccacaccaccactccctaggcgccgcccccaaatgccacctccgtcaaccacacctcaggaccaccctatgccggcgatcccctcccaccaccggcagaagtacatgatcaacattgatggcacacaacaccggtcgcaccccacgcgcgcacagtgcacaccagcagcggcgtcacaccacgaacagccactccaacatcacggcacaacgttggcacacgtctaatgtgcacagcattgctacatcacgggctaggctcccgcgtccctacttcctttgtatcaacatccacgtgac

SEQ ID NO: 643206 - DNA, 1518 bp, Homo sapiens
  misc_feature (157)..(157): n is a, c, g, or t
ggcacgagcccttacaaaggcccagctggggttagaactggaagaactagaagcagcagcactgcttgtccaggaggaagaaactgcattaaaagcagcccattcagtttctgggcagcagacacttgctccagctctgaggcaagtgattcggagnactcagacagcagcgtgtcatctggaaacgaagactcaggctcagattcagaacaagatgaactcaaagatgtccatctgagacagtcagttcttgcaagtccctttcttgaagaaagcagtgcctttcttattgttgatggtggagtacgcagaaacacagccatccaggagtctgatgccagtcagggaaagccacttgcctcttcctggcctcttggagtgtctgggcctctgatagaggagcttggggaacaactgaagactacagttcaggtttctgaacccaagggcaccactgctgtaaaccgcagcaatattcaggagagagacggctgtcagacaccaaataattgactcttaggtggttttattcattgttgagaaatatggtagattgggtttcatttaccgaatgagaattcttcattttcactttgtaatttttcttagtatatagtcagcccactgtatttgtgtgttccacatctgtggattcaaccaactgcagatcaaaaatattgaagaaaaaatcgcatctgtaccaaacatgtacagacttttttcttgttattattctctaaataatacagtatgacaactatttccacagcatttacattgtattgggtaatataagtaatctagtgatgatttaaactgtgcaggaggatgtgggtaggttatatgcaaatactgcaccattttttatcaggggcttgagcatctgaggattttagtatcctcaggagtcctggaaccaaccccccacagatacggggacaactttatgacattgtttttcaaccaatgaatgtttataccttttgttttccttgccgcgactgtgaagataaagttcaaaagtatttttaccaaagtgtagctaatatttcaagctgaaaataatagttctactgcccgtgtctccagaatgtagagcccatcaatatttttattttaggaggtgtacttgacacccaataaactgcacgtatcaaaagtgtacaatgtgttggcgtatgtataccctgcgtaaaactatcaccacaactgaagtgaggaacggacccatcattcccaagtgcccttgtgccctgttattagtttgcatgtcctagaattctatgtaaattgaatcatacaatatgtatcccttttttggtcaggcatattttactcagtatagttattttgagattcatccatgtggtagcatgtgtcacgagtttttgtttttatgtttttcattgctgagtactgcttcattgaatagatttgttcattgacctatcgatggacacctgggttgtttccagtttggggctgttataaataaagctgttatgaacatttgtgtac

SEQ ID NO: 643207 - DNA, 1181 bp, Homo sapiens
cccgggagcgcgtgatgggtgtcggcgtgaccaggcctgaggctccctgtctctcctcagtgacatcgtctttaaaccctgatgtggcaagtccctgcacgcaccggccgtgatgccgcagggaatgacagggcgactctgcgaagtccaacatacttcctctaagatcatccaactattggatgattatccggaaatgttgtcagtggtgggagcagacaatgtgggctcctaagcagatgcagcagatcctgctagtgtcccttcgcgggaaggctgtggtgctgagtgggcaatgaacaccgatgatgctgcaatggccactccggagggcacctggaaaacaattccagctctggcagaaactggctgccgtcatactccgggggacatgtgaggcgtttgtgttcaccaagggaggaccgtcagctgacgatcagggagcatgttgctggccaataaggtgccagctgctgcccgatgctggtagccatttgccccatgttgacgtcactgtgccaggccgagaaacactggtctcgggcccgagaagacctcctttttccaggcttcaaggtatcaccgactaaacatctccagggtgcaccattgaaagtcctgagtgatgtgcagctgatcaaagactggagacaaacgtgggagccaactgaagccacgctgctgaacatgctcaacatatccccgcttctcccttatgggcctggttcatccaaacaggtgtccgacaatgggaagcatctacagccttgaagtgcttgatatccaccataggcaactcctgggattctacgcttcctggaagggggtcacgcacagttgcgcaagttcggcacgcaagcatgggcaacaccaaccgctgccgtacgtaaccccaattcatcaaagcacaggggaaaacacgacaatacgcggccaccacatgcgggacgaaacggagacaacccccgtaccacagtgcggcagaaaggcccaggagcgaacatggggaagcaccccatgccatcaggaggaaccccccgagagaaggcacaacaacaaggagcagggcagacaaccgacaaaagataatcagccaacatcgagacacaacgataatgcgggtccaacaacacaaacacgaacattaagacacacaccactcaaaaccagccacacgcacc

SEQ ID NO: 643208 - DNA, 2121 bp, Homo sapiens
  misc_feature (157)..(157): n is a, c, g, or t
  misc_feature (1523)..(1526): n is a, c, g, or t
ggcacgagcccttacaaaggcccagctggggttagaactggaagaactagaagcagcagcactgcttgtccaggaggaagaaactgcattaaaagcagcccattcagtttctgggcagcagacacttgctccagctctgaggcaagtgattcggagnactcagacagcagcgtgtcatctggaaacgaagactcaggctcagattcagaacaagatgaactcaaagatgtccatctgagacagtcagttcttgcaagtccctttcttgaagaaagcagtgcctttcttattgttgatggtggagtacgcagaaacacagccatccaggagtctgatgccagtcagggaaagccacttgcctcttcctggcctcttggagtgtctgggcctctgatagaggagcttggggaacaactgaagactacagttcaggtttctgaacccaagggcaccactgctgtaaaccgcagcaatattcaggagagagacggctgtcagacaccaaataattgactcttaggtggttttattcattgttgagaaatatggtagattgggtttcatttaccgaatgagaattcttcattttcactttgtaatttttcttagtatatagtcagcccactgtatttgtgtgttccacatctgtggattcaaccaactgcagatcaaaaatattgaagaaaaaatcgcatctgtaccaaacatgtacagacttttttcttgttattattctctaaataatacagtatgacaactatttccacagcatttacattgtattgggtaatataagtaatctagtgatgatttaaactgtgcaggaggatgtgggtaggttatatgcaaatactgcaccattttttatcaggggcttgagcatctgaggattttagtatcctcaggagtcctggaaccaaccccccacagatacggggacaactttatgacattgtttttcaaccaatgaatgtttataccttttgttttccttgccgcgactgtgaagataaagttcaaaagtatttttaccaaagtgtagctaatatttcaagctgaaaataatagttctactgcccgtgtctccagaatgtagagcccatcaatatttttattttaggaggtgtacttgacacccaataaactgcacgtatcaaaagtgtacaatgtgttggcgtatgtataccctgcgtaaaactatcaccacaactgaagtgaggaacggacccatcattcccaagtgcccttgtgccctgttattagtttgcatgtcctagaattctatgtaaattgaatcatacaatatgtatcccttttttggtcaggcatattttactcagtatagttattttgagattcatccatgtggtagcatgtgtcacgagtttttgtttttatgtttttcattgctgagtactgcttcattgaatagatttgttcattgacctatcgatggacacctgggttgtttccagtttggggctgttataaataaagctgttatgaacatttgtgtacaagtnnnnaaaaaaaaaaaaaaaaaaaaaaaaaaaaaaaaaaaaaaagaaaaaaagaaaaaacaaaaaaaaaaaaaaaaaatggggtggggcgcgcgccgcgccggcgccccaaaaaagaattttttacaacaaccccgtgtggtgggcggcgcgcgggcaccacaaagaagaggataatagacgcacggcgcgacaacaaagtgatttaccacaaagagagcaccgcggctgggaataaaaccaacaaggagggggaggaggataccccccccaacacaaaataaaaaaaggcgcgcgcggggggaaaacaacaaacgaggggttgttgtaaaacaagacaatcccaaagaggggggtgcctcgaagggggatcaatatgagggggaagatcataacaagggaggggacatcaccgaaagagaaggacgcgtcaataaataaaaaaataatacccccgcccccgcgtctgggggttattaatatacacaaggcggacagacgagagagaaagtaaagaagaagaacagagagagcgagaggaacgaaagagcgacaaaaagaagaaagaggagagaaagagagacggagtgagaagacaaac

SEQ ID NO: 643209 - DNA, 518 bp, Homo sapiens
  misc_feature (30)..(30): n is a, c, g, or t
  misc_feature (39)..(39): n is a, c, g, or t
ttcggcacgaggctctacattctggagacncgggcagtngaactaatatttcaagctgaaaataatagttctacattctggagacacgggcagtagaacccatcaatatttttattttaggaggtgtacttgacacccaataaactgcacgtatcaaaagtgtacaatgtgttggcgtatgtataccctgcgtaaaactatcaccacaactgaagtgaggaacggacccatcattcccaagtgcccttgtgccctgttattagtttgcatgtcctagaattctatgtaaattgaatcatacaatatgtatcccttttttggtcaggcatattttactcagtatagttattttgagattcatccatgtggtagcatgtgtcacgagtttttgtttttatgtttttcattgctgagtactgcttcattgaatagatttgttcattgacctatcgatggacacctgggttgtttccagtttggggctgttataaataaagctgttatgaacatttgtgtac

SEQ ID NO: 643210 - DNA, 123 bp, Homo sapiens
ggatttgctggtgcagtacaactaggcttaatagggacatgatcaagcaggttttataccaggaatgcagggatggtttaacatacgcaagtcaataaatgtgatacatcacataaacagaaa

SEQ ID NO: 643211 - DNA, 254 bp, Homo sapiens
cataacacaaacatgaaagcatctatcatgccaacactcatagcataaacagcactgttaaacctctattactacatacgactagcctactcctcctcactgactatgttcccatccaccaacaacatacacctcaactgacaattcgaacacacaaaacaactaccattacttcccacaatactcgtcttatcaacactagtcctacctgtaacaccagccctctcgtacctaaactaggactccaggttatt

SEQ ID NO: 643212 - DNA, 161 bp, Homo sapiens
  misc_feature (21)..(21): n is a, c, g, or t
  misc_feature (24)..(24): n is a, c, g, or t
  misc_feature (27)..(27): n is a, c, g, or t
  misc_feature (30)..(30): n is a, c, g, or t
  misc_feature (68)..(68): n is a, c, g, or t
  misc_feature (76)..(76): n is a, c, g, or t
tatccccgacgccaattctgngcntantanaacggcagctttaacatgtactcagtttggtagatgantgcattantggccccacttaatggctgcatgtatctatacactttgacttgtaactctatagtccctttctatctgttgttgggcgtacgggg

SEQ ID NO: 643213 - DNA, 438 bp, Homo sapiens
  misc_feature (5)..(5): n is a, c, g, or t
  misc_feature (41)..(41): n is a, c, g, or t
  misc_feature (60)..(62): n is a, c, g, or t
  misc_feature (117)..(117): n is a, c, g, or t
ccggnacccaacatctaacgacacgagctgacgacagccangcacctcctgtctttaggnnnccccgaagggacactgagagatctttatctcattcctaagacgccccccgctggnaaggttcctcgcgttgtgtcgaattaaaccacatgctccaccgctggtgcgggtccccgtcgacggaacccaacacctagtaatcatcgtttacagcggggactaccagggaatctaatcctgtttgctacccacgctttcgcgcttaagcgaaagaatctgtccagaaagctggctcccccatcggcattcctacaaatatctacgaatttcacctctacacttgtagttccgctaacctctccagtactctagttatacagtttccaacgcaatacagagttgagccctgcatttccacataagacttatataaccacc

SEQ ID NO: 643214 - DNA, 480 bp, Homo sapiens
tgcgatttatagtacgcaaaatataacagaaaccaaaaagtagattaaaagactgataatccatggaatcacacaagcggaccggacactctatactctcccctaccacacataagccgatacccatgagagagaccaagggagatcagaccttccagacctatgcaccatctggtcgccgcaaaatatctacggagattccttgtggaaaagcagtttcccatcttttgtgtctctccctaccatgcaggaagcaagtctggctgtgctattctattaccattatatatcacccatctgcaacaaggtactgtacagacaagtaagaagtatgttatctagtacccttacccccagaaggttgaggctcaggtatacgggtacttctcctgtgcagcctaaatacatgctgactcagtgactacaacaggcttactcatgtggtcaggtcagtagccagctgcataatgctcccacatc

SEQ ID NO: 643215 - DNA, 3985 bp, Homo sapiens
agcgggtctctcgggcctgggcggcgcagacgaggcctgaggcggcggcgcgaggcagtatggtttgaagtggtgaacatggatttttctcggcttcacatgtacagtcctccccagtgtgtgccggagaacacgggctacacgtatgcgctcagttccagctattcttcagatgctctggattttgagacggagcacaaattggaccctgtatttgattctccacggatgtcccgccgtagtttgcgcctggccacgacagcatgcaccctgggggatggtgaggctgtgggtgccgacagcggcaccagcagcgctgtctccctgaagaaccgagcggccagaacaacaaaacagcgcagaagcacaaacaaatcagcttttagtatcaaccacgtgtcaaggcaggtcacgtcctctggcgtcagccacggcggcactgtcagcctgcaggatgctgtgactcgacggcctcctgtattggacgagtcttggattcgtgaacagaccacagtggaccacttctggggtcttgatgatgatggtgatcttaaaggtggaaataaagctgccattcagggaaacggggatgtgggagccgccgccgccaccgcgcacaacggcttctcctgcagcaactgcagcatgctgtccgagcgcaaggacgtgctcacggcgcaccccgcggcccccgggcccgtgtcgagagtttattctagggacaggaatcaaaaatgcggtgcgtctttctacgtgaataggattttgtggctggccagatacactgcatcatctttttcatcatttttagttcaactttttcaagtggttttaatgaagctcagttatgaatcagaaaattacaaattgaaaactcatgaatcaaaagattgtgaatccgaaagctataagtcaaaaagccatgaatcaaaagctcatgccagttactatgggagaatgaatgtgagagaggttctcagagaggatggccacctcagtgtaaatggggaagcgctgtgcgacgactgtaagggcaagaggcacctcgacgcgcacacagccgcccactcgcagtcgccacggctgcccggtcgggcagggaccctctggcacatctgggcatgtgcaggttacttcttgctgcagattctgcgcaggatcggagctgtgggccaggctgtgtccaggacggcgtggtcggccctttggctggccgtggttgctccagggaaggcagcctctggagtgttctggtggctggggattggatggtaccagtttgttactttgatttcttggctgaatgtgtttcttcttaccaggtgccttcgaaacatctgcaagtttttagtcttgctcatcccactcttccttttactagcaggtctctccttacggggccagggcaatttcttttcgttcttgcccgtgttgaactgggcaagcatgcatagaacacagcgggtggatgacccccaggacgtgtttaaacccacgacttctcgcctgaagcagcctctgcagggtgacagtgaggcttttccgtggcattggatgagtggcgtggagcagcaggtggcctctctgtctggacagtgccaccaccatggtgagaatctccgagagctgaccactttgctacagaagctgcaggctcgggtggaccagatggaaggcggcgctgccgggccgtcagcttcggtcagagacgctgtgggacagcccccgagggagactgactttatggcctttcaccaagaacatgaagtgcgtatgtcacacttggaagatattctgggaaaactgagagaaaaatctgaggccatccagaaggaactagaacagaccaagcaaaaaacaatcagtgcggttggtgagcagctcctgcccacagtcgagcacctccagctggagctggatcagctaaagtcagagctgtccagctggcgacacgtgaagaccggctgtgagacagtggatgccgtacaagaaagagtggacgtgcaagtcagagaaatggtgaaactcctgttttccgaagatcagcaaggcggttctctggaacagctgctgcagaggttctcatcacagtttgtgagcaaaggcgacttgcagacgatgctgcgagacctgcagctgcagatcctgcggaacgtcacccaccacgtttccgtgaccaagcagctcccaacctcagaagccgtggtgtctgctgtgagcgaggcgggggcgtctggaataacagaggcgcaagcacgtgccatcgtgaacagcgccttgaagctgtattcccaagataagaccgggatggtggactttgctctggaatctggtggtggcagcatcttgagtactcgctgttctgaaacttacgaaaccaaaacggcgctgatgagtctgtttgggatcccgctgtggtacttctcgcagtccccgcgcgtggtcatccagcctgacatttaccccggtaactgctgggcatttaaaggctcccaggggtacctggtggtgaggctctccatgatgatccacccagccgccttcactctggagcacatccctaagacgctgtcgccaacaggcaacatcagcagcgcccccaaggacttcgccgtctatggattagaaaatgagtatcaggaagaagggcagcttctgggacagttcacgtatgatcaggatggggagtcgctccagatgttccaggccctgaaaagacccgacgacacagctttccaaatagtggaacttcggattttttctaactggggccatcctgagtatacctgtctgtatcggttcagagttcatggcgaacctgtcaagtgaagacactactcattatttttgtacatttttgtatatactgggacagcgtgaaacactggaatccttcatggacgagggcatatacaatgatgggacagtgccacactccttcaataaacgtggctgctggccagaggacgtgagcgtgtgacgggcgccttggcgccacctgttgggtgctcactgcctctgcaggtgcagaggggtcagcagcaggagaagcgtgttgaacacgtggctctcagacactccttgtttttaacgggaagctctttgcatttgcatttcctcaacaaaggagcaaagcagaggaagctgagagtctggcgtgttcttgacgctttggtcttcagccttgcactggctcttctaaaggacttttggagggcagataatttcatctgttttgagttttgctgaatagggagcgcaagacgccctgagcctccctctcactggtggtgataagaggagccgtctggtgtgtcagggtcacgaacccgttacatttcaggacgatcctttttccttcagcagcatttcttactggctgtggctggaatctgccttttatcacagctgtcaccattctcacgtgattcttgtgagactctttttggttataattactatttaatatttagactattttactgagcagactttataaatgagatatctacaaggcacttaccttaagaattatttaagttgtgttgggttaagacagttttcagtgtaccgtaaatgttgtgttttcagaaaaagacaaaacgatggtgctgactggttttctgtatattgcacaacagtcctcaaatacactgatgtatgaaactattcatacatcaagcagcatttttttcactctccttagaattggaactatgcagttaaggcagataaaatgtacagatgtttcatatattacaggttacatatataaatcaaaatttcctatataaaactgatttgggatttggggtggaaatattttgaatattaatttatttttaaagatgcaagataggactttgtgcaatgtatttttgtaaatgcttttcaaaatatctgtctttggtagtgcttctgctgctgccaccaaattgataagatgctattaagaggtttaaataaagagttttaatttttaaaa

SEQ ID NO: 643216 - DNA, 2760 bp, Homo sapiens
  misc_feature (2627)..(2629): n is a, c, g, or t
  misc_feature (2635)..(2635): n is a, c, g, or t
  misc_feature (2643)..(2643): n is a, c, g, or t
agcgggtctctcgggcctgggcggcgcagacgaggcctgaggcggcggcgcgaggcagtatggtttgaagtggtgaacatggatttttctcggcttcacatgtacagtcctccccagtgtgtgccggagaacacgggctacacgtatgcgctcagttccagctattcttcagatgctctggattttgagacggagcacaaattggaccctgtatttgattctccacggatgtcccgccgtagtttgcgcctggccacgacagcatgcaccctgggggatggtgaggctgtgggtgccgacagcggcaccagcagcgctgtctccctgaagaaccgagcggccagaacaacaaaacagcgcagaagcacaaacaaatcagcttttagtatcaaccacgtgtcaaggcaggtcacgtcctctggcgtcagccacggcggcactgtcagcctgcaggatgctgtgactcgacggcctcctgtattggacgagtcttggattcgtgaacagaccacagtggaccacttctggggtcttgatgatgatggtgatcttaaaggtggaaataaagctgccattcagggaaacggggatgtgggagccgccgccgccaccgcgcacaacggcttctcctgcagcaactgcagcatgctgtccgagcgcaaggacgtgctcacggcgcaccccgcggcccccgggcccgtgtcgagagtttattctagggacaggaatcaaaaatgcggtgcgtctttctacgtgaataggattttgtggctggccagatacactgcatcatctttttcatcatttttagttcaactttttcaagtggttttaatgaagctcagttatgaatcagaaaattacaaattgaaaactcatgaatcaaaagattgtgaatccgaaagctataagtcaaaaagccatgaatcaaaagctcatgccagttactatgggagaatgaatgtgagagaggttctcagagaggatggccacctcagtgtaaatggggaagcgctgtgcgacgactgtaagggcaagaggcacctcgacgcgcacacagccgcccactcgcagtcgccacggctgcccggtcgggcagggaccctctggcacatctgggcatgtgcaggttacttcttgctgcagattctgcgcaggatcggagctgtgggccaggctgtgtccaggacggcgtggtcggccctttggctggccgtggttgctccagggaaggcagcctctggagtgttctggtggctggggattggatggtaccagtttgttactttgatttcttggctgaatgtgtttcttcttaccaggtgccttcgaaacatctgcaagtttttagtcttgctcatcccactcttccttttactagcaggtctctccttacggggccagggcaatttcttttcgttcttgcccgtgttgaactgggcaagcatgcatagaacacagcgggtggatgacccccaggacgtgtttaaacccacgacttctcgcctgaagcagcctctgcagggtgacagtgaggcttttccgtggcattggatgagtggcgtggagcagcaggtggcctctctgtctggacagtgccaccaccatggtgagaatctccgagagctgaccactttgctacagaagctgcaggctcgggtggaccagatggaaggcggcgctgccgggccgtcagcttcggtcagagacgctgtgggacagcccccgagggagactgactttatggcctttcaccaagaacatgaagtgcgtatgtcacacttggaagatattctgggaaaactgagagaaaaatctgaggccatccagaaggaactagaacagaccaagcaaaaaacaatcagtgcggttggtgagcagctcctgcccacagtcgagcacctccagctggagctggatcagctaaagtcagagctgtccagctggcgacacgtgaagaccggctgtgagacagtggatgccgtacaagaaagagtggacgtgcaagtcagagaaatggtgaaactcctgttttccgaagatcagcaaggcggttctctggaacagctgctgcagaggttctcatcacagtttgtgagcaaaggcgacttgcagacgatgctgcgagacctgcagctgcagatcctgcggaacgtcacccaccacgtttccgtgaccaagcagctcccaacctcagaagccgtggtgtctgctgtgagcgaggcgggggcgtctggaataacagaggcgcaagcacgtgccatcgtgaacagcgccttgaagctgtattcccaagataagaccgggatggtggactttgctctggaatctggtggtggcagcatcttgagtactcgctgttctgaaacttacgaaaccaaaacggcgctgatgagtctgtttgggatcccgctgtggtacttctcgcagtccccgcgcgtggtcatccagcctgacatttaccccggtaactgctgggcatttaaaggctcccaggggtacctggtggtgaggctctccatgatgatccacccagccgccttcactctggagcacatccctaagacgctgtcgccaacaggcaacatcagcagcgcccccaaggacttcgccgtctatggattagnnngggagncgctccanatgttcaggcccctgaaggaccgccacacactttcctagggggactccgatttttttacctggggcatctgagataccggttggttggtgcttatggcgacctgtagggagacacct

SEQ ID NO: 643217 - DNA, 340 bp, Homo sapiens
gctcgagaggtgagactctgctggttctgtgcattgaatgttgactagcctagcactcactcctggcccgcatcaggagccccgccttgccggctctggttcatcgcctttctttttgtggcctgaaacgatttcttcaattcgcagttaacagaactgccgtctccactgctgttttattagtctgcagcttcacagccaatggctcccatatgcccagttccttcatgttcaccaaatgtaccccgtctcaccatttacaccccaggtctcacagttctcctgggtgtgcttggcccgaagggaggtaagtagacagatggtgctggccccacagttc

SEQ ID NO: 643218 - DNA, 2988 bp, Homo sapiens
  misc_feature (2816)..(2816): n is a, c, g, or t
agcgggtctctcgggcctgggcggcgcagacgaggcctgaggcggcggcgcgaggcagtatggtttgaagtggtgaacatggatttttctcggcttcacatgtacagtcctccccagtgtgtgccggagaacacgggctacacgtatgcgctcagttccagctattcttcagatgctctggattttgagacggagcacaaattggaccctgtatttgattctccacggatgtcccgccgtagtttgcgcctggccacgacagcatgcaccctgggggatggtgaggctgtgggtgccgacagcggcaccagcagcgctgtctccctgaagaaccgagcggccagaacaacaaaacagcgcagaagcacaaacaaatcagcttttagtatcaaccacgtgtcaaggcaggtcacgtcctctggcgtcagccacggcggcactgtcagcctgcaggatgctgtgactcgacggcctcctgtattggacgagtcttggattcgtgaacagaccacagtggaccacttctggggtcttgatgatgatggtgatcttaaaggtggaaataaagctgccattcagggaaacggggatgtgggagccgccgccgccaccgcgcacaacggcttctcctgcagcaactgcagcatgctgtccgagcgcaaggacgtgctcacggcgcaccccgcggcccccgggcccgtgtcgagagtttattctagggacaggaatcaaaaatgcggtgcgtctttctacgtgaataggattttgtggctggccagatacactgcatcatctttttcatcatttttagttcaactttttcaagtggttttaatgaagctcagttatgaatcagaaaattacaaattgaaaactcatgaatcaaaagattgtgaatccgaaagctataagtcaaaaagccatgaatcaaaagctcatgccagttactatgggagaatgaatgtgagagaggttctcagagaggatggccacctcagtgtaaatggggaagcgctgtgcgacgactgtaagggcaagaggcacctcgacgcgcacacagccgcccactcgcagtcgccacggctgcccggtcgggcagggaccctctggcacatctgggcatgtgcaggttacttcttgctgcagattctgcgcaggatcggagctgtgggccaggctgtgtccaggacggcgtggtcggccctttggctggccgtggttgctccagggaaggcagcctctggagtgttctggtggctggggattggatggtaccagtttgttactttgatttcttggctgaatgtgtttcttcttaccaggtgccttcgaaacatctgcaagtttttagtcttgctcatcccactcttccttttactagcaggtctctccttacggggccagggcaatttcttttcgttcttgcccgtgttgaactgggcaagcatgcatagaacacagcgggtggatgacccccaggacgtgtttaaacccacgacttctcgcctgaagcagcctctgcagggtgacagtgaggcttttccgtggcattggatgagtggcgtggagcagcaggtggcctctctgtctggacagtgccaccaccatggtgagaatctccgagagctgaccactttgctacagaagctgcaggctcgggtggaccagatggaaggcggcgctgccgggccgtcagcttcggtcagagacgctgtgggacagcccccgagggagactgactttatggcctttcaccaagaacatgaagtgcgtatgtcacacttggaagatattctgggaaaactgagagaaaaatctgaggccatccagaaggaactagaacagaccaagcaaaaaacaatcagtgcggttggtgagcagctcctgcccacagtcgagcacctccagctggagctggatcagctaaagtcagagctgtccagctggcgacacgtgaagaccggctgtgagacagtggatgccgtacaagaaagagtggacgtgcaagtcagagaaatggtgaaactcctgttttccgaagatcagcaaggcggttctctggaacagctgctgcagaggttctcatcacagtttgtgagcaaaggcgacttgcagacgatgctgcgagacctgcagctgcagatcctgcggaacgtcacccaccacgtttccgtgaccaagcagctcccaacctcagaagccgtggtgtctgctgtgagcgaggcgggggcgtctggaataacagaggcgcaagcacgtgccatcgtgaacagcgccttgaagctgtattcccaagataagaccgggatggtggactttgctctggaatctggtggtggcagcatcttgagtactcgctgttctgaaacttacgaaaccaaaacggcgctgatgagtctgtttgggatcccgctgtggtacttctcgcagtccccgcgcgtggtcatccagcctgacatttaccccggtaactgctgggcatttaaaggctcccaggggtacctggtggtgaggctctccatgatgatccacccagccgccttcactctggagcacatccctaagacgctgtcgccaacaggcaacatcagcagcgcccccaaggacttcgccgtctatggattagcccttggccgaccctcctcctcccacaccttcctgggagttcccacagatgaaagcaagtgacgtgagcgcactggggacggctgcctcccgctgcccctccgccctctctcagattcggtgttgaggggaacattccagtgcttttctagggagggtaacttagaaatggcatattacctgatgtccantttacatacagtactacactgaccaaggtagacacgcctaagaattttgctcctcaccgcccttgccaagttgcctgtgaaaggtgttctggcaactggatgacgtgggagcagctggctgacaagaggactgccatgatcccagccccagagaaacccaccattcatactg

SEQ ID NO: 643219 - DNA, 202 bp, Homo sapiens
ctgagaccacaggtacacaaaccccacaacagctatgagtagaagcttttcagaatgaatatctggccatgtcacaagccccccaacaacaatcccatgctttctgggctcttagcacccttcaatactataacatggtatttacgaacctaactaacggcctgccaattcatttttctttcagcctgtgggttatgattga

SEQ ID NO: 643220 - DNA, 2619 bp, Homo sapiens
agcgggtctctcgggcctgggcggcgcagacgaggcctgaggcggcggcgcgaggcagtatggtttgaagtggtgaacatggatttttctcggcttcacatgtacagtcctccccagtgtgtgccggagaacacgggctacacgtatgcgctcagttccagctattcttcagatgctctggattttgagacggagcacaaattggaccctgtatttgattctccacggatgtcccgccgtagtttgcgcctggccacgacagcatgcaccctgggggatggtgaggctgtgggtgccgacagcggcaccagcagcgctgtctccctgaagaaccgagcggccagaacaacaaaacagcgcagaagcacaaacaaatcagcttttagtatcaaccacgtgtcaaggcaggtcacgtcctctggcgtcagccacggcggcactgtcagcctgcaggatgctgtgactcgacggcctcctgtattggacgagtcttggattcgtgaacagaccacagtggaccacttctggggtcttgatgatgatggtgatcttaaaggtggaaataaagctgccattcagggaaacggggatgtgggagccgccgccgccaccgcgcacaacggcttctcctgcagcaactgcagcatgctgtccgagcgcaaggacgtgctcacggcgcaccccgcggcccccgggcccgtgtcgagagtttattctagggacaggaatcaaaaatgcggtgcgtctttctacgtgaataggattttgtggctggccagatacactgcatcatctttttcatcatttttagttcaactttttcaagtggttttaatgaagctcagttatgaatcagaaaattacaaattgaaaactcatgaatcaaaagattgtgaatccgaaagctataagtcaaaaagccatgaatcaaaagctcatgccagttactatgggagaatgaatgtgagagaggttctcagagaggatggccacctcagtgtaaatggggaagcgctgtgcgacgactgtaagggcaagaggcacctcgacgcgcacacagccgcccactcgcagtcgccacggctgcccggtcgggcagggaccctctggcacatctgggcatgtgcaggttacttcttgctgcagattctgcgcaggatcggagctgtgggccaggctgtgtccaggacggcgtggtcggccctttggctggccgtggttgctccagggaaggcagcctctggagtgttctggtggctggggattggatggtaccagtttgttactttgatttcttggctgaatgtgtttcttcttaccaggtgccttcgaaacatctgcaagtttttagtcttgctcatcccactcttccttttactagcaggtctctccttacggggccagggcaatttcttttcgttcttgcccgtgttgaactgggcaagcatgcatagaacacagcgggtggatgacccccaggacgtgtttaaacccacgacttctcgcctgaagcagcctctgcagggtgacagtgaggcttttccgtggcattggatgagtggcgtggagcagcaggtggcctctctgtctggacagtgccaccaccatggtgagaatctccgagagctgaccactttgctacagaagctgcaggctcgggtggaccagatggaaggcggcgctgccgggccgtcagcttcggtcagagacgctgtgggacagcccccgagggagactgactttatggcctttcaccaagaacatgaagtgcgtatgtcacacttggaagatattctgggaaaactgagagaaaaatctgaggccatccagaaggaactagaacagaccaagcaaaaaacaatcagtgcggttggtgagcagctcctgcccacagtcgagcacctccagctggagctggatcagctaaagtcagagctgtccagctggcgacacgtgaagaccggctgtgagacagtggatgccgtacaagaaagagtggacgtgcaagtcagagaaatggtgaaactcctgttttccgaagatcagcaaggcggttctctggaacagctgctgcagaggttctcatcacagtttgtgagcaaaggcgacttgcagacgatgctgcgagacctgcagctgcagatcctgcggaacgtcacccaccacgtttccgtgaccaagcagctcccaacctcagaagccgtggtgtctgctgtgagcgaggcgggggcgtctggaataacagaggcgcaagcacgtgccatcgtgaacagcgccttgaagctgtattcccaagataagaccgggatggtggactttgctctggaatctggtggtggcagcatcttgagtactcgctgttctgaaacttacgaaaccaaaacggcgctgatgagtctgtttgggatcccgctgtggtacttctcgcagtccccgcgcgtggtcatccagcctgacatttaccccggtaactgctgggcatttaaaggctcccaggggtacctggtggtgaggctctccatgatgatccacccagccgccttcactctggagcacatccctaagtcaggtagtgcagtgtttgtaaagtgcagcatattcagttccaagctagaggtt

SEQ ID NO: 643221 - DNA, 2086 bp, Homo sapiens
  misc_feature (1957)..(1958): n is a, c, g, or t
  misc_feature (1982)..(1982): n is a, c, g, or t
  misc_feature (2007)..(2007): n is a, c, g, or t
  misc_feature (2051)..(2051): n is a, c, g, or t
agcgggtctctcgggcctgggcggcgcagacgaggcctgaggcggcggcgcgaggcagtatggtttgaagtggtgaacatggatttttctcggcttcacatgtacagtcctccccagtgtgtgccggagaacacgggctacacgtatgcgctcagttccagctattcttcagatgctctggattttgagacggagcacaaattggaccctgtatttgattctccacggatgtcccgccgtagtttgcgcctggccacgacagcatgcaccctgggggatggtgaggctgtgggtgccgacagcggcaccagcagcgctgtctccctgaagaaccgagcggccagaacaacaaaacagcgcagaagcacaaacaaatcagcttttagtatcaaccacgtgtcaaggcaggtcacgtcctctggcgtcagccacggcggcactgtcagcctgcaggatgctgtgactcgacggcctcctgtattggacgagtcttggattcgtgaacagaccacagtggaccacttctggggtcttgatgatgatggtgatcttaaaggtggaaataaagctgccattcagggaaacggggatgtgggagccgccgccgccaccgcgcacaacggcttctcctgcagcaactgcagcatgctgtccgagcgcaaggacgtgctcacggcgcaccccgcggcccccgggcccgtgtcgagagtttattctagggacaggaatcaaaaatgcggtgcgtctttctacgtgaataggattttgtggctggccagatacactgcatcatctttttcatcatttttagttcaactttttcaagtggttttaatgaagctcagttatgaatcagaaaattacaaattgaaaactcatgaatcaaaagattgtgaatccgaaagctataagtcaaaaagccatgaatcaaaagctcatgccagttactatgggagaatgaatgtgagagaggttctcagagaggatggccacctcagtgtaaatggggaagcgctgtgcgacgactgtaagggcaagaggcacctcgacgcgcacacagccgcccactcgcagtcgccacggctgcccggtcgggcagggaccctctggcacatctgggcatgtgcaggttacttcttgctgcagattctgcgcaggatcggagctgtgggccaggctgtgtccaggacggcgtggtcggccctttggctggccgtggttgctccagggaaggcagcctctggagtgttctggtggctggggattggatggtaccagtttgttactttgatttcttggctgaatgtgtttcttcttaccaggtgccttcgaaacatctgcaagtttttagtcttgctcatcccactcttccttttactagcaggtctctccttacggggccagggcaatttcttttcgttcttgcccgtgttgaactgggcaagcatgcatagaacacagcgggtggatgacccccgaggacgtgagcgtgtgacgggcgccttggcgccacctgttgggtgctcactgcctctgcaggtgcagaggggtcagcagcaggagaagcgtgttgaacacgtggctctcagacactccttgtttttaacgggaagctctttgcatttgcatttcctcaacaaaggagcaaagcagaggaagctgagagtctggcgtgttcttgacgctttggtcttcagccttgcactggctcttctaaaggacttttggagggcagataatttcatctgttaaatccaacacacatttctttcagggattttccttttttcagcaccagtaggtactaagtctccagatggggaaataactaaaatgtgtttttctgctttgttcgctcttacttctgaggaaggtttccagtcaggactcgctgtaccaatatccatggaggaatatggaggcatacaccagatgggtctctgtctagcaggctttnnctgtggagccagtaacagaaccanaatctatcctggtgttcaggcttgnttgagtttgtgataggagccaagacgctgagctctctactgtgnatagagagccctgtggtaggcagaaccgtcattat

SEQ ID NO: 643222 - DNA, 188 bp, Homo sapiens
ccaatgggcttctttattgagcaccagattttcagtacaagttgccacagaaggaggttcagattcaaccatgcccatgtgcaagggcgctggtccaggccaggcacatacagagagtgactgcgccatgcaggtatactttcgaatgcctggtacggctcgtactcttggtctctctggtattaatt

SEQ ID NO: 643223 - DNA, 178 bp, Homo sapiens
tactacagaggcaagtgtccaacccagcagtcgtctttgtcacccgaaagaaccgccatgtgtgtgccaccccagagaagaaatgggttcgggcgtacatcaactctttggagatgagctaggatgaagagtccttgaacctgaacttacacaaatttgcctctggtgggtaccgagc

SEQ ID NO: 643224 - DNA, 291 bp, Homo sapiens
ccattagaaagccccattagtggaataggaaacagtgtgtgactcctggatggtcaattaaatagtttcctcatcagaaaaattattttttagccattttttttctattggggtggatctagatgccattgatatcatctcaaacatgcagggcatcaacaacttcatttaatcagctcgcacaatcgcaccaataaatcaagcacatgctcaaaccagcacattagaccaattcatcatccaactctcaacacattttcacagcaccagccccagcaagcaccattcaat

SEQ ID NO: 643225 - DNA, 342 bp, Homo sapiens
ctcctatgtctttaaactgggggttcccctcagacacctcccaaaagatgagggatgagaggtgatgtagactcttttccttttcacttagttttgggacggagtctctctctccatcctgcctgacagagcgagtctgtctcaaacgtctcaataacaaacaatcaaacaaaaaacctctttgaaggggattaaggggatgtgtcccaataaacttgcaaacacctgtgaatcccagctttgtgtcaaggcgagagggatttgcatagctaaatgacattcattgcgtaggaaaaacgtgactgattaaatgcttcctcatcaaataaaaagtgctccaga

SEQ ID NO: 643226 - DNA, 243 bp, Homo sapiens
ctgaacacgaagaccgtgtgacgctgccctccggctcccagaaggttctctcctcagccaacagcgctgtgcgttggtgtggtggcaggcaggtggccgaatcgacgaacccatcttgaaggctggccgggcgtaccacaactataaggcagagaggaagtgctggccacaagtccggggtgtggccataaagtccggtgcacgcatcctctttggaggggggcaagccaccaggcacattcg

SEQ ID NO: 643227 - DNA, 173 bp, Homo sapiens
aggagccaggccatggtggtgctccacgaagaggaaaagctacagcgcctgagtctcacgggaggcaggtgtgaggatgagaatggttgtcccaccctccaggaaagcagcccgggcgtggctgcagcacacagcagtctgctccaagctcagccctgcaagatggggcacct

SEQ ID NO: 643228 - DNA, 109 bp, Homo sapiens
tatccaacccggtgccttggaccataccgaggcaagcgtccctacatagagcaccaacagcacaacaagtatgagaaatagacccagtccgaccgactctccccattta

SEQ ID NO: 643229 - DNA, 302 bp, Homo sapiens
cgctactatacatatatggcgcagtgctctcgctgtgcattatatctactctcatgacctttaacacccactctatcttagccaatattgggcctaatgcgcatactatgatttggcgcctgcgaagcaatcgagggactagccctactagacttaatcttcaacacgtatggcctagagctacgacataacctatgacctacttcaatgctataactatatcggccaacaagtatgtgactaccactgacctgacttttctccccctactattgcttaaccgcaacgccaacctttggtgt

SEQ ID NO: 643230 - DNA, 232 bp, Homo sapiens
gaagttggaaatttttggtttatgcctttgtttaaaaaaaaaatagttttaaacccatttttgttccccaaacaactttaaaaaaacagtggctggccagttttcattatcatcatcatggtcatcatcaaagggaacagttatatcaagcttaatatgtgttgaacattgttttgaaccctttaggtaaatgaactaaatgtatgtgaataaaaattatttggtcctccca

SEQ ID NO: 643231 - DNA, 112 bp, Homo sapiens
aggcttcaggggagaagccgccgaacaccaccgagtggatcgcgccaatgcgggtacaggccagcatggccaccaccgcctccgggatcattggcatatagatagtctctgc

SEQ ID NO: 643232 - DNA, 176 bp, Homo sapiens
ggtgagaggtcattgggctccatctgcaagctccatctacaaggcatcaatctgcgttgtggcatcaacgttaaaatgttctacagctatagggatcttacttgaagtcaaggttccatagcacataaactagatatgaccgagaggctcaactttagacagatgcagtcatcttg

SEQ ID NO: 643233 - DNA, 506 bp, Homo sapiens
  misc_feature (81)..(81): n is a, c, g, or t
  misc_feature (107)..(107): n is a, c, g, or t
  misc_feature (148)..(148): n is a, c, g, or t
  misc_feature (163)..(163): n is a, c, g, or t
  misc_feature (328)..(328): n is a, c, g, or t
gggctgggcaaccagattgtccccgacgcccccaaggaccacgccttcaagtggcgttcggcaagtgcccaagattgagcntggggtgcccggcacccagagggtgntgcccaccatgttcttgagcctcccaagagttgcagcccangggcccggcccggcntggcccttcaggggatggccactgtgaaggacgccttcccagcctgcccgttgccaatttgttgtgagaggggggcctccctgccttggggccttagccctggttttgcatttttcctccggggagaaaggacattgcccctcccccgacttgggcccacaatgntgccttttcccaggagggaggtttttggaccctgggaccccatcccattcagccaagtgtttttttgggtttggggggaggaggggatgatatccgtggggttcgatgtattatttttaagctccgtgggggggggggtcagggtttgcatgaagtggaataaattgccccccgccca

SEQ ID NO: 643234 - DNA, 419 bp, Homo sapiens
agtctcaacaaatttaagaaaattgaaattatagcaagtactctctcagaccacagtggaataaaattggaaatcagctccaaaaggaaccctcaaaaccaggcacgtacatggaaattaaatgatcttctcctgaatgatcattgggtcccctatgagatcaagatggaaatgaaaaaatcctttgaactgagcggcaataatgacacaagctatcaaaacctctgggatacaggaaaagcaatgctaagaggaaaattcatagcattgaatgcctacatcaaaaagtctgaaagagcacaaatagacaatctaagttcacacctgaaggaactagagaaagaagaacaaaccaaacccaaacccagcagaagaaaagaaatagcaaagatcagagaagaagtaaaagctattgaaac

SEQ ID NO: 643235 - DNA, 356 bp, Homo sapiens
  misc_feature (298)..(298): n is a, c, g, or t
ccgcggcgcagcgcgtcgagcgccggcgcgatccagtcgcggtcgagtgcttcgaccgcttgcgtccaggctgcggcgtccaggtagagggcgggcgccagcgcgtcctgcagcagtacgagattgccttcctgcagtgcgacgccggtcttgtccggcagcggtgccgcccgcacgccggcggcgtgcgccagaccgtgcgccagcgggtcgtccgcccacagctgcatgcagggaatgtcggcgcgtaccggcaggctgccggcgccccagaaccacaggctgttgatgaccggcncggccgcctcttcgcgtgcgacgttgaccgggtgggcgtggaacagcatctgcgtttc

SEQ ID NO: 643236 - DNA, 346 bp, Homo sapiens
tgttcctcctccaaggactgtcccgttgcaatactgaatgcctttttttttttgagatggcgtttcgctgtcacccaggctggagtccagtggcacgacctcaggtcactacaacctccgcctcctgggttcaagtgattctcctgcctcagcctcctaagtagctgggattacagctgctaccacgcccgagtaatttttgtatttttagcagagacggggttttaccatgttggccgggctggtcctgaactcctgacctcaggtgatccgcctgcctcggcctcccaaagtgctgggattacaagtgtgagccactgcacccggcctgaatgctttttttgat

SEQ ID NO: 643237 - DNA, 1160 bp, Homo sapiens
ctttgactctcgtcgggaatcccactgattgaggttgatctcttcatcctcaaaaggtctcttcagacgtttaactgtgcccagtggtgctgtcaactgtgtatctatgaagcgccctagagctccgggacacatgataagaactcgctatatggggacgggtgctctcaaaggcttgtcagagcacatcactaacactattgcgcctgccctgattagcaagaaacttgaacgtcacgagaacaagagaagactctgagaagatctgatgatcgagactggatggaaacagagaaataaatctaactttggctgcgaacgccattgctggagggtagtccctatgccgtctcgcttatagctaggtagcctggatgagaagtggggtaccccactgtacgctgcaacgatcgctgactttggcctgaggtaactctgcaagtctatcctgccaagtcccgagcgttcaattgtcatacaaattggcggttctcatggctgtgcaacacagtctgtggcatagcgaggaagtacatgatctctcccaagtcggatagcatgcaaagcttgcagtgtaagtccatgcgacattggaggcagaggtaaagcgacaaagcctgaagaatgtcgatcgaacggacgaacctattggccgaaacaggatggccacccaaatagtagggccgcaaccaagggggcgcggcatagggctcgccagacagatacctggaagaagcgacaagaaacgggcctaggaagcgcgacggaaagaccggcgacgcaggggaaaaggctaggcatacacgcgaattaagggaaggggcacaccggacatagacagctgaagacaggaccaaactcggaagggtacatgcgagggggacatagcgaagagggagtgacagtggggagattcaaaaggtagtcgccggagaggaccacaaaagcagagaaaagagacaaggcccgtgaagaagaagggcaagacgcaggaaaccagaacgccgagacacgaggaggggaaaccccaggaggacgaataagaaaaagaaggccggtgagaaaggggagaaccatgggaagcataggacgaagaaaccacgaggaggcataacacagaagaagaggagaataaaatagaagagaagaaacagaaaaag

SEQ ID NO: 643238 - DNA, 401 bp, Homo sapiens
  misc_feature (361)..(361): n is a, c, g, or t
  misc_feature (391)..(391): n is a, c, g, or t
tcccccaccctggctgtggctcacccttgaacccaggaatcagagactggttcctctgggcccctggggctgggggtgctgcatccccagctttaacatttttattcttcgacccaggcacagtggctcacacctgtaatcccagcactttgggaggccaaggcgggcggatcacttgaggtcaggagttcaagaccagcctgaccaacatggagaaactgtctctactaaaaatacaaaattagctggcctggtggcacacgcctgtgatcccagctactcgggaggctgaggcaggagaatcgcttgaacctgggaggtggaggctgcagtgagccaagatcacaccatggcacttcancctgggcaacaagagcgaaagaaactccanataatactaa

SEQ ID NO: 643239 - DNA, 383 bp, Homo sapiens
cgacttctagaggatcccccccaaatgaatccgaaggatataattcctacgccctctcggctcgatgtaatcagttcgaataggttgtttgcggtaactaagattagtatggtcattaggaagattagtatatatctcaagaactgattaatgttcgggtctgagtttatatttcacacgtgagaattctatgaatggaccctgtcacgaacaatgctacagggatccttattatgtgcagccgtcgtctcagttttgaagcttagggcgagctgggttgtctgggtcgtggctcagtgtctgctcgcgattatcacttcttggtctaggcacgtgaatattgttgtgcggaagagactgctcctaaaggtggatgcgactat

SEQ ID NO: 643240 - DNA, 587 bp, Homo sapiens
  misc_feature (546)..(546): n is a, c, g, or t
gactggttctagcagggggctctggagtcagtacccatgcttcccgcaaattcttttcttgctccacagaattctgaagggaccatcgctaggagcagatgtagcctcggtgccatttgtgggatcgtcaggatgatggtggattgtggctggaaaggggtgtctgcagtgtgaggccatggggccttgcatgctcgcacagcttgggagggtggatgagggccatcctttggtaagcatcccatagcaaggccaggaaaggtgtgtggacagggcctcatgcggtggctgaagcattaaagcgatcggtggtgcttgagccaagcaagggcatggaggcaatgaccgaagcttacaggcagaggctaagctgggagagatgaaagcaggcaaggctgattggaaacctctggcctgatgtcacggtgtcttcccagctaggaaatcatcctcaaggcccctgcctgtgactggaggccatttccaggtagttgccacactgacccctgactgctactccttggcagtgcagtggggggggcctgnctcagacacatattccgaggaggagaagcagcaggtaccga

SEQ ID NO: 643241 - DNA, 221 bp, Homo sapiens
cgtagactgatagaatcgagtcggtaccgaattcgaaagttgtgcaaaaggtcaagtgtatctacccataagaggtacgagagtagtcaaatttatagggacagaaagaaggggggctgccaggggctggggaaaggaagaagggggaatgagtgtttcatggggacagagcttcgatttggggagatgagaaagttctggagatggatggtggtggtggc

SEQ ID NO: 643242 - DNA, 460 bp, Homo sapiens
gacatgaattacgtgccacaaggatggtggccaagtgctgggttggtgaggtgccggcggaaggatgagaatccacatctcaacctgacagtatgattttctaaccatccttatacacacttccaaagtgctgaaaactttatttcctcatgaaacacaaccattcatgagagattaaacttgcaggtgagaaaatacgcaggaaacacttatttctctatgaaaatatgagtctgaagaaagtcaagagactctacaaacatttctgcagccctctattggagatttgcaaaggtctgcatgtgcacccctttggatgtcaagggcttactgaataccatttccacacggtctatcgctatgtcaaagggcaactgctccaccatcatttctgatccacagacctgttagatgttagtctggagaaggagaaataaaactcaatgttgttaattgcaaa

SEQ ID NO: 643243 - DNA, 254 bp, Homo sapiens
agctgaaggctgcggggcctttcccatgtggcctgctgttgtgtatagcaacttcccagcagtcagcacggctactgtatctatggtcagtgtctcacctatttgtcacccgcagcttcaagtgtactcatattctccgtttcaaggcggtgtcaaatttctcgatttagctgttcgcaagtcttgatacgacaacgacatatcgaacgagcttgagaacagtctgcggattttcttggatgctgccgcgtgaa

SEQ ID NO: 643244 - DNA, 1975 bp, Homo sapiens
gcagaccgcatcttcttttgcgtcgccagccgagccacatcgctcagacaccatgcgggaaggtgaaggtcggagtcaaacggatttggatacgtatagggacgcctggatcaaccagggactgctataacaacatctgagataaaagtaggctcattgtaagccagtcacatgacccgcttcatctgcacctcgaacgtacactggtattacagtgtatccaagtcatgcattccacacccatgagccaaattaccgataggctacctgtccaatggcttggcagcaaccgagcgacagctatgtccaatcccaatgagaacattccccattcacacccaatcctatccacagaaaagccgaagccataccccttccccacacaaatacaacaggttgcgtggctcggcatagccttagagcagcccttgcaagctcaccgataccgattaggagaagtacccccaccttgggagctgattcgtaaacagaccccaaaccccattagcgacaagcaaacgcgccttagcgcagagcctacccaatccactgcacacgaggaagagagaagaaaagaacacctaaagaatacataatgaaggtaaccagtaaccacatagacgttactaaagagagcacacccaccaaaaccttagaggacttagaacattggaacacaacacaccccaactggatgaatgcacggactcacaaaactttcaaatctaccattctctctctagtacacaacacaaccccaacattaacacacagacaaaataatacatacaaattactcacacaccacaaaactccacaagaaaccacccatatacacaaatcttcacaacattccaacacaactccaaacatacaccaacaccatctactacccccaatatccccccattttaggaaccacacaaaccacaaaaacacaccaaaacaaaactccatattaggacactctataacaaacacaccacacaacccatcacaccacccaatatagtaagaacccaaccaataaatcaagatcgatatatcccaacactatacaccaacacaaaatatagaaaaaccaaacaaaccacagatctaatcaaaatcaagtagaccatcaacaatatcaccagagccacttgggctcgacaaactacctgggatggagacaatacgacggtgttaccccacgacgaatttgcgacactacaagccgctcaactatactcaccaagagtgtcggctcagccgccgcacaaacaagctggatgcatcccccaaaacataattacgcaacacctacactatgggagtatcgcacgccaacagatagcatcctccacaacataaagtggacaaaacaacggtcaaaaagacgacttatgcgaactacgaaagcgaacaacaattatacggaggagacacacaccacagcacaaataattacacccgaactgacaagtaagcagaaagaagtaacaaaaccacaattcgggaagattaagtcagcagaatctggtcaactagtcgcacaaacaataatagagagagaagacaaccaaccagctagatactacgacctagatactatgcatacgacacgcataattacgccacgttatagtaccacaccaaaccgacctacaaacaaaatccagaaagacaaaatattacacaacaaaattaaatccacactacctaatatttaaaataacacaccaaatttacgtcacactataaccacaaccacaaaaatagagagaatacacatagatagatcctacctaataagatgatcacacaccccacaaaaacaaaacacaacgatgcatacaccactcatacgacgataatcacagacgaatatacaacaacacaaacaaaagaagaagaaaaatacaacaaaacaattataccgcccactcctacaattataataaacatagaacacaattatagataaaacacacac

SEQ ID NO: 643245 - DNA, 216 bp, Homo sapiens
tcagtgtagtgactgctatggcaaaagaggttagtgatcttgaaggttagtggtaaacgatggctagttgtataacagaagacccggtctcactctgttgtccaggctagagggtagtggcacaatcatagctcactacagcctcaagctcctggacttaacctcctgagaagctgggattacaggtgcacgttgccagggccggcataaattatt

SEQ ID NO: 643246 - DNA, 116 bp, Homo sapiens
gtagaggtgtggaggctcattctctcatcaggcggacgcagtggcgtgatctcagctcacgcaacttcgcctcccgagcccaagtgatccgccaacctctacaacctccacaacct

SEQ ID NO: 643247 - DNA, 233 bp, Homo sapiens
gggttatgatgcctccgttacttcataaaatatccaactccatacaaatgagtatttaaaacaagaagtttactacattttaatttctatttcattagctttcatatagtaactacagttcaggggacaaaacaatattttggcctgtatccacataaatcccttctttaaaggaaggtctccgtgctttaaatatttaaactctaaacaactaaggggcatcgataaacacg

SEQ ID NO: 643248 - DNA, 267 bp, Homo sapiens
agtaatggttaagggggagggatttttttcaaatgatcagtcccctgtggaacagtttttccctgggcctagttcgccagcgttgtgctcctcatggacgggagcgcagtggggaaggtaggggaaaaatgaggcccagtgttgatggggcagtgaccagacagtcctgagacccaaaaggcccaggtggcccaagtgtttttggtggcccagtttggccagcacacactttcctcctatagcaccccctttaccccctttagagcc

SEQ ID NO: 643249 - DNA, 261 bp, Homo sapiens
ccggtattttaagaacatgccgtacccaaagtctcgctatctgccgaggttgtcctaatgccaagattcgcatttgttgacctggggcggctaaaggtataagtggataagtttcctgctttgtgggcacatagtgttcgattaatatcagcagctgtcctctgaagccctgtgaggctgtccgaattcgtgccacttcgtacatagtaaaaagttgtggccgagatggcttccatatccgggcgcagtctgtgcacgggc

SEQ ID NO: 643250 - DNA, 154 bp, Homo sapiens
cccagcttgaaactggaacttttgattgacaaattaataaacctctctatgcctcaggtctcatctgtaaacaggatgctaccgtatgggttggtgtgaggattaactgagatcacacttgatagtgccttgcatggcttggcatgtgggtgct

SEQ ID NO: 643251 - DNA, 217 bp, Homo sapiens
ctattcctgtgagggatcattatgagcaagctccatctgcctacgacaaacaggacctaaaatcgctcattgcatacgcggcaatcggccacatagccctcgtagtaacaggcattctcatccgaagacccccgtgaagcttcaccggcgcagtcaattctctatatatcggccaggggcttacatcctcattcactattgtgcctcaggtagagca

SEQ ID NO: 643252 - DNA, 305 bp, Homo sapiens
aggatttaaagtttaatggaaattttgttttttataccccccaatacaaacaagtaattccaaacagatcaatccctttcctttcagtagttatgctgggcaactttgtaatcatatttaattaatttttttcactaaggggaaatgttcattaacctaattagcagcttttttttagaagctaattaataaagggaagtgtcagtgatggtatttatgggaggtgttaaaaattctcaaaacttcttttgtttgcatacacaggaaaatttctatattttttggcgttagaaggggataaaagt

SEQ ID NO: 643253 - DNA, 544 bp, Homo sapiens
gcggaggtcagtgggcaggcaaagatggtacagtatcttgcaacgaaggatgcttaatcttaaacacggaaagactggaagaagggaatatacaaggaggaggtctccagaaaatagtcagacaaataacagagccttaaaattagaagcttgggggctgggtgggccaggttctcaattgctgcctctacaggaaagtcttagggttcggaggattccagaaacatgaaggagaagtgggaggacatggagagtgtcctcaaggacctgacagaggagaagagaaaagatgtgctaaactccctcgctaagtgcctcggcaaggaggatattcggcaggatctagagcaaagagtatctgaggtcctgatttccagggagctactcatggaggactcagacaagcctctcctaagcagcctttttaatgctgctggggtcttggtagaagcgcgtgcaaaagccattctggacttcctggatgccctgctagagctgtctgaagagcagcagttcgtggctgaggccctggagaaggggacca

SEQ ID NO: 643254 - DNA, 217 bp, Homo sapiens
  misc_feature (67)..(67): n is a, c, g, or t
  misc_feature (125)..(125): n is a, c, g, or t
  misc_feature (163)..(163): n is a, c, g, or t
  misc_feature (175)..(175): n is a, c, g, or t
tgacctcagttgatccacccaccttggcctcccaaagtgctagtattatgggcgtgaaccaccatgnccagccgaaaagcttttgaggggctgacttcaaatccatgtagggaagtaaaatgganggaaattggggtgcattttctaaggacctttctaacanatggctataatntaaggggtttagggtccttttttttttttcagggatacattt

SEQ ID NO: 643255 - DNA, 229 bp, Homo sapiens
taaggagtgcccacgagaaagaaacatctacactcaaaggaatggaaaaagatattccatgcaaatggaaaccaaaagcaagcagaaggagctatacttatatcagataaaattaagtcaaaaagagtaaaaagggctgggtgtggtggctcacgcctgtaatcccagcactttgggaggccgaggtgagctcagaagtttgagaccagcctgggcacacattatggag

SEQ ID NO: 643256 - DNA, 336 bp, Homo sapiens
  misc_feature (96)..(96): n is a, c, g, or t
cagggtcccctcccatggggtctggcctccgttccagcatgtccagcccctaaagttggagtgggggtcggtctgcctttgctccccctggcaggntttttcctcccccttcccctagggccctacatcgggattgggccccccccctgggtggtcttttgagtatgggccgcccctggccacaatggccggccgcagggggggtggggttttcccccaccaacgggtgccccctctttgcccccggacccccggccgcctacccgggccccccccttaccttgtgtgttcttggtggctgacgaatgaatgcgtggccaataaaaagcaaaccta

SEQ ID NO: 643257 - DNA, 168 bp, Homo sapiens
ggtctgccgccaagtacgttaatacccccgagactccggtctacaagaaatcacatgtcctgtacggactggatcctggtcccgggccaacatcggtctaagaagagccaggccgtcatcgtcgaggggtacaccgacgtcatggcggtgcacctgtccggcatagat

SEQ ID NO: 643258 - DNA, 183 bp, Homo sapiens
ccgtcctggagagatttatcagcccttagatagttgctatgacttaatcagttctacaaggcttattatgaaaagcaatatacacatccattcccctctccccagaggcatattggtagctatttttataaaccatcattatcttatgtgaaggatgggttaggcataaagggagttagggaa

SEQ ID NO: 643259 - DNA, 121 bp, Homo sapiens
atgtatacaagcaacaatttgttatttttatttttttggatttttaaggccacctctgtgggcatatggagtttcccagtctaggggtcaaatcagagctgggagctgccagccttacacc

SEQ ID NO: 643260 - DNA, 663 bp, Homo sapiens
  misc_feature (20)..(20): n is a, c, g, or t
  misc_feature (80)..(80): n is a, c, g, or t
  misc_feature (87)..(88): n is a, c, g, or t
  misc_feature (92)..(92): n is a, c, g, or t
  misc_feature (95)..(95): n is a, c, g, or t
  misc_feature (117)..(117): n is a, c, g, or t
  misc_feature (126)..(126): n is a, c, g, or t
  misc_feature (131)..(131): n is a, c, g, or t
  misc_feature (142)..(142): n is a, c, g, or t
  misc_feature (144)..(144): n is a, c, g, or t
  misc_feature (149)..(150): n is a, c, g, or t
  misc_feature (162)..(162): n is a, c, g, or t
  misc_feature (190)..(190): n is a, c, g, or t
  misc_feature (193)..(194): n is a, c, g, or t
  misc_feature (196)..(196): n is a, c, g, or t
  misc_feature (200)..(200): n is a, c, g, or t
  misc_feature (224)..(224): n is a, c, g, or t
  misc_feature (232)..(232): n is a, c, g, or t
  misc_feature (234)..(235): n is a, c, g, or t
  misc_feature (251)..(251): n is a, c, g, or t
  misc_feature (257)..(257): n is a, c, g, or t
  misc_feature (266)..(266): n is a, c, g, or t
  misc_feature (301)..(301): n is a, c, g, or t
  misc_feature (313)..(313): n is a, c, g, or t
  misc_feature (379)..(379): n is a, c, g, or t
  misc_feature (381)..(382): n is a, c, g, or t
  misc_feature (409)..(409): n is a, c, g, or t
  misc_feature (416)..(416): n is a, c, g, or t
  misc_feature (439)..(439): n is a, c, g, or t
  misc_feature (444)..(444): n is a, c, g, or t
  misc_feature (470)..(470): n is a, c, g, or t
  misc_feature (474)..(475): n is a, c, g, or t
  misc_feature (480)..(480): n is a, c, g, or t
  misc_feature (482)..(482): n is a, c, g, or t
  misc_feature (495)..(495): n is a, c, g, or t
  misc_feature (497)..(497): n is a, c, g, or t
  misc_feature (499)..(499): n is a, c, g, or t
  misc_feature (518)..(518): n is a, c, g, or t
  misc_feature (572)..(572): n is a, c, g, or t
  misc_feature (577)..(577): n is a, c, g, or t
  misc_feature (583)..(583): n is a, c, g, or t
  misc_feature (603)..(603): n is a, c, g, or t
  misc_feature (635)..(635): n is a, c, g, or t
gcctgcatacatctcaagtngggggacaaaaaagggggaagggggggcacgaaggctcaacattaaaaaaaaaacaaaanaaaaaannatanaangcgaagattcaacaaaaatttngcataacanaattnacacgaaagcnangcaannacctcccctgtntggacttgggagaggactgggccattcnccnnanaganaagtggggcggctataaggaaggnaagggacnannaataacaatgcatctnaaattntcgcgcaancactaccaaaaaaacaacaatgtgcaaacaaagtnctcggccacatngtgcaacctggggggaggcccgccccaaccgactgcagtaaccttcaccgtcccagtatttaaatncnnagtaaagccaaaaaaaaaaaaaaaacnaaaaccncccaaaaaaaaaaaaaaaaaacnaaacnaaaaatcaacaagtttcctgcgcaantaannttttntnaagaaagggtgtnangnaactaagtaatagttcgcntagaagcatttgcggtggacgatggaggggccggactcgtcaaactcctgcttnctganccacanctgctggaaggtggacagcnaggccaggttggagccgccgatccacacggantacttgcgcccaggaggagcaatgatct

SEQ ID NO: 643261 - DNA, 222 bp, Homo sapiens
  misc_feature (142)..(142): n is a, c, g, or t
  misc_feature (147)..(147): n is a, c, g, or t
  misc_feature (151)..(151): n is a, c, g, or t
  misc_feature (162)..(162): n is a, c, g, or t
  misc_feature (210)..(210): n is a, c, g, or t
gcagcattgtgtgatattctcagaggcaggggaaaatagagggaaaatatagagactatttgtatgttcttcccatcagcgaggtagtgtaacgtggcaccactgtgacgggaagtagaacagtggagatgggaaatgagangtccnaccnctgtgtagcangatttaggggccaagtgcgtagcagtgtgagacagagatcccttgganttttgtcatgtg

SEQ ID NO: 643262 - DNA, 940 bp, Homo sapiens
  misc_feature (3)..(3): n is a, c, g, or t
  misc_feature (81)..(81): n is a, c, g, or t
  misc_feature (96)..(96): n is a, c, g, or t
  misc_feature (107)..(107): n is a, c, g, or t
  misc_feature (110)..(110): n is a, c, g, or t
  misc_feature (127)..(127): n is a, c, g, or t
  misc_feature (135)..(135): n is a, c, g, or t
  misc_feature (138)..(138): n is a, c, g, or t
  misc_feature (144)..(145): n is a, c, g, or t
  misc_feature (148)..(148): n is a, c, g, or t
  misc_feature (161)..(161): n is a, c, g, or t
  misc_feature (164)..(164): n is a, c, g, or t
  misc_feature (171)..(171): n is a, c, g, or t
  misc_feature (175)..(175): n is a, c, g, or t
  misc_feature (182)..(182): n is a, c, g, or t
  misc_feature (216)..(216): n is a, c, g, or t
  misc_feature (237)..(237): n is a, c, g, or t
  misc_feature (254)..(254): n is a, c, g, or t
  misc_feature (274)..(274): n is a, c, g, or t
  misc_feature (309)..(309): n is a, c, g, or t
  misc_feature (336)..(336): n is a, c, g, or t
  misc_feature (385)..(385): n is a, c, g, or t
  misc_feature (414)..(414): n is a, c, g, or t
  misc_feature (450)..(450): n is a, c, g, or t
  misc_feature (543)..(543): n is a, c, g, or t
  misc_feature (549)..(549): n is a, c, g, or t
  misc_feature (574)..(574): n is a, c, g, or t
  misc_feature (583)..(583): n is a, c, g, or t
  misc_feature (585)..(585): n is a, c, g, or t
  misc_feature (588)..(588): n is a, c, g, or t
  misc_feature (627)..(627): n is a, c, g, or t
  misc_feature (715)..(715): n is a, c, g, or t
  misc_feature (878)..(878): n is a, c, g, or t
  misc_feature (898)..(898): n is a, c, g, or t
  misc_feature (915)..(915): n is a, c, g, or t
atncctattacaaatttcagctgtgggatattggctggtattctggcctcactggtaacttcaactgcggatgttatcaanactcatatgcagctntatccactgangtntcaatggattggccaancattgacnctnattttnnaanactatggaccatnttncttcttntaangtggcancccccgagccctccgcagaactcgatatgtcagnaatggcgtggacggtgtatgntgagatgatggccaagntgggcctgaagtcctgaccnagagaggactgggaacgtgcgaaatctttttcccngcttggcctctgccaagggctgctgcntcttactattctgcagtaagatgaagtcctacctggaaaaccaggcagnaattgtgttgcctttgccttcagtaatcnccttaaggagaaaatatatggacctgatttcagccntcagaatctccaaaagaggagtcatcaattcatagagcacactagggtgttaggagagagctttgtatactctgagaggctacttggaaaggnattttnccaggagagttctttcaggtgctgngcttcagcncnacncctacaccacagggtctctttgggtatgttcttgggcangcaattacaaagccagagaagctgtaagctgcctgccgggcttgaggagctccaaccagggaagactggatgtgaggagaggagttantgtcaccaggtcacagactgactgaggtgatggtaggatgaggaggaacagatgcccttctttaattggttctcagttaacttctcagaggctctggagaacgggacagtggctttctagcctttgaatgttccaaataaaattttttggtcttggcccctgnactgttttacctctaaattntggcattttttttcccngcaattaaagtgctaaactttaaaa

SEQ ID NO: 643263 - DNA, 364 bp, Homo sapiens
  misc_feature (325)..(325): n is a, c, g, or t
agtaaaccacaagctgcagagccagagcatgttttttatgcctggaacagctaacatccaaaccaaagtgcatgctgtcagttgaggacaaacaagcgaagaggagccaaaaaggagcacctgtccacccatccatcaaccgagtacaagagggtgcctgagggaccagtgcagaactggcagacctaggagagtggctcaaggcctgctgggcaggtgcatggacctagacctgcagggtcgctcccaggaacagcaagagtcagaagacccaggtcaagggaggcagagacaaatgtttccagatgaagcaggagagcactgncgccgatctccagggccctgaggcaatgaggagtgcaca

SEQ ID NO: 643264 - DNA, 903 bp, Homo sapiens
  misc_feature (7)..(7): n is a, c, g, or t
  misc_feature (280)..(280): n is a, c, g, or t
  misc_feature (305)..(305): n is a, c, g, or t
  misc_feature (323)..(323): n is a, c, g, or t
  misc_feature (331)..(331): n is a, c, g, or t
  misc_feature (338)..(338): n is a, c, g, or t
  misc_feature (359)..(359): n is a, c, g, or t
  misc_feature (361)..(361): n is a, c, g, or t
  misc_feature (365)..(365): n is a, c, g, or t
  misc_feature (391)..(391): n is a, c, g, or t
  misc_feature (411)..(411): n is a, c, g, or t
  misc_feature (440)..(440): n is a, c, g, or t
  misc_feature (466)..(466): n is a, c, g, or t
  misc_feature (470)..(470): n is a, c, g, or t
  misc_feature (481)..(481): n is a, c, g, or t
  misc_feature (485)..(485): n is a, c, g, or t
  misc_feature (495)..(495): n is a, c, g, or t
  misc_feature (526)..(526): n is a, c, g, or t
  misc_feature (539)..(539): n is a, c, g, or t
  misc_feature (561)..(561): n is a, c, g, or t
  misc_feature (585)..(585): n is a, c, g, or t
  misc_feature (597)..(597): n is a, c, g, or t
  misc_feature (601)..(601): n is a, c, g, or t
  misc_feature (610)..(610): n is a, c, g, or t
  misc_feature (623)..(623): n is a, c, g, or t
  misc_feature (631)..(631): n is a, c, g, or t
  misc_feature (634)..(634): n is a, c, g, or t
  misc_feature (665)..(665): n is a, c, g, or t
  misc_feature (687)..(687): n is a, c, g, or t
  misc_feature (771)..(771): n is a, c, g, or t
  misc_feature (790)..(790): n is a, c, g, or t
  misc_feature (794)..(794): n is a, c, g, or t
  misc_feature (900)..(900): n is a, c, g, or t
attactncattgtttacaatggaaaaaataagttttaagtagtgttatttttcattgctcaaattctattcaattcttatacaccaaaggagcatctacatgtcatttagcgtttagaggattaatttataaactcatggattccagagtagctgatgaagaaatgacctaagagtctttataaaaaacttatttttcttatttgtaaagtagcaaccacaaggtgaaattgttttttttttttatacaacagcaacaacgacaacaaaaaacaactacnagggagaaaaaagaatgattccccnctaatacaaattcattcnctattgtnctaaacncacacattcagattatagttncncctncatttaaaataagtcaattcacttcnggctgtcagtctgaattacngaaaaggtttaaactttttttttaattgnggacaagtccaattaaccagtaaaanattnccaacaatgcntggnaaatgtttcncccataaagcaattcccttaagatgtaagcnagtggcagaaaanagaaaaacaatgaaagtatggngaacactgtagcttcatttaatanaaaaacctcccngggngggggtttngcccatgtttganttcaaganatncttataagcagaacgctacttatctcttgtntataaagaatgtaacataacanaagttccaaaaatggtatctcctaaaactactaaaagacaaggtttaagtagctttttttcccaaccaggtagggaactattanagctgaggacacttgactnagtncttttatatgtatgttgtctcaaaactttttactgaatcaataaagaagattattttgattttttattgttgctgaaaatatatagcagagaatactacaaattanagt

SEQ ID NO: 643265 - DNA, 434 bp, Homo sapiens
tgttctcagtgcccttgggcacatacctaggagcggaattgctgacttatgtcataacactctgtttttgaggagctgcctgacgattttccaaagtggctgcaccattctactttcagcagtgtgtgagggttcccatttctccacatcttcaccagcatttgctattatctgcctttttttttattccagctgtgatgctgggtgtgaagtggtatctaattgtggtttgatttgcatttccctaatgactaatgatactgagtatctttccatctatttatctgccatttttatatcctttttagagacatgactatgtgaatccttgggctatttttaaattgacttatttgtccttttattgttgggttgtcagagttctttatatattttggatacaggttttgaatgatatatatgtgttgcaaata

SEQ ID NO: 643266 - DNA, 86 bp, Homo sapiens
cttacatgccatggccttctacgttgtgaaaatgtacaaacacctgaaatgtaaacgtgaccctcatgttaagatagaagggaagg

SEQ ID NO: 643267 - DNA, 1065 bp, Homo sapiens
ctctgtctcaaaaaaggaaagaaaaataggctgggcacagtgactcatgcctgtaatcccaacactttgggaggccgaggcaggtggatcacgaggtcaggagttcaagaccagcctggccaagatggtaaaacctcgtctctactaaaaatacaaaaattagccaggtgtggtggcaggctcctgtaatcccagctactcaggaggctgaggcagagaattgcttgaacccgggaggcagagtttgcagtgagccaagatcacaccactgcactccagcttggacgacagagcgagactctgtctcaaaaaataataggccaggcatggtggctcaacgtctgtaatcccagcactttgggaggccgaggcgggcagatcacaaggtcaggagttcgagaccagcctgacgaccaacatggtgaaacctcgtctctactaaaaatacaaaaattagccaggcctggtggcacgcgcctgtaatcccagttacacagaagactgaggcaggagaatcgcttgaacgcaggaggcagaggttgcaggagctgagatcgcgccatggcactccagcctgggcaacagagtgagactctgtctcaaaaacatataactaaataattgaacacacttgctgctgagtccgaggggggcagagcagaggacagcgtgctttgtgtaccgttggaaagacttggtcctcctgtacagcaacatctgagccacttgtgcaccgcctgccagggaacatcaggacatggccggtgacaccacagatactgggagcagtcaagcctaccgaaaagccggattggccgatgatacaactgagagggcctgtgtaacattaccacgtattccaagggcaatgggctaaactgaaaaggatgagagcagtataaacatagtgatacaaacacttgtgaaagaacatcatgagagatagctgaacatcagactcaaaactcctacaactggtacaccactataacaaatacaaaagacaaccccgcactaatccaataatctactaatgacaatcatcaacttgaccaatataatgag

SEQ ID NO: 643268 - DNA, 1250 bp, Homo sapiens
ggccgaccacggatttgcattgccgaggatgtgaccccagggcagcgaagcagcaatggccaactatgcatgtggactggtggacaagactggaacgagctgtacagtcgcctggagtcagctgtctgcagagtcccacaggcccccgtgtcgcaactgcgtgggaaagtcaatggtgtcattgcaggtgtggcaccctccgatggaagcctttgaacaagctgatggacacgtatggtggccgagatgattaaagaacacgtaggatccttgctggggacgttggagacctcatgcatgatattgtgtgcacacgatgctttaccgaggtcccatgcggggcttaccgttctgatgtgcctctcagtaccagacaagcgccacgagaatgacgtggtcgacacttctgaaatccatatcgggaaagagatgcaggaacatcccgagagttcagcagatgagataagcgggggcagtaacgatgtaaagtcagtctttcgggctgccagcgaaaggcatccctgcccttggatggataggctgtgtctcccataacctgtatccttattgtcaaggtaggatgacatgacgctgacagcctttgacactaacagaggtcataaaacgagactacaaccacgagggatcggcgtcactgtgcattgggtcaaagccatattggaccatcgggaggtcacccttcacagccatacatcactggaaggccacaccacagtggcgcacgcctagtaagcaaaacaagggcatggcagaatccagccgatcaaggagagcgggcctcaccgttgggggcagggcttactgcacacccggaaagcaaggcaccacacaggggaccctactataacgagaagaagcggacaaagagagcaccagccaccccagagaattgagacgaaaacggggaacacgacagcaaggcgccccgcatcgatagatcagacgaactaatataacgaccacggcaacgagaggagatactccatagagtacacaagagataagaacatgcataatcagcggcgttaggcagtgggtagccaggtggctcaaaacgtatgatgagagtatgaagctttctacgtcatttgtcactggtcgtatggagagacatgagaaatcagaagagagaaacacaatcacgtacaacgagaaacacagagacgacgagacagtagacgagagagatcagagcgagaaaaggagataaggacaacagtagaagcaag

SEQ ID NO: 643269 - DNA, 187 bp, Homo sapiens
  misc_feature (3)..(3): n is a, c, g, or t
  misc_feature (9)..(9): n is a, c, g, or t
  misc_feature (39)..(40): n is a, c, g, or t
  misc_feature (85)..(85): n is a, c, g, or t
ttnagggtnaagaataagagggtgaaaggaaatgaggtnnagttgggtttaaaaatggagaagcagtaagaggcaaaacagtatnaaaagttaattaccacaggaatttagaagtgactataaaaaataaaatggcccttcttagaagactagagcaaaagatccagccatagttataagccttatt

SEQ ID NO: 643270 - DNA, 973 bp, Homo sapiens
  misc_feature (10)..(10): n is a, c, g, or t
  misc_feature (76)..(76): n is a, c, g, or t
  misc_feature (78)..(78): n is a, c, g, or t
  misc_feature (80)..(80): n is a, c, g, or t
  misc_feature (109)..(109): n is a, c, g, or t
  misc_feature (113)..(114): n is a, c, g, or t
  misc_feature (125)..(127): n is a, c, g, or t
  misc_feature (144)..(144): n is a, c, g, or t
  misc_feature (188)..(188): n is a, c, g, or t
  misc_feature (199)..(199): n is a, c, g, or t
  misc_feature (207)..(207): n is a, c, g, or t
  misc_feature (220)..(220): n is a, c, g, or t
  misc_feature (237)..(237): n is a, c, g, or t
  misc_feature (241)..(241): n is a, c, g, or t
  misc_feature (254)..(254): n is a, c, g, or t
  misc_feature (262)..(262): n is a, c, g, or t
  misc_feature (281)..(281): n is a, c, g, or t
  misc_feature (288)..(288): n is a, c, g, or t
  misc_feature (309)..(309): n is a, c, g, or t
  misc_feature (313)..(313): n is a, c, g, or t
  misc_feature (316)..(316): n is a, c, g, or t
  misc_feature (320)..(320): n is a, c, g, or t
  misc_feature (331)..(331): n is a, c, g, or t
  misc_feature (384)..(385): n is a, c, g, or t
  misc_feature (387)..(387): n is a, c, g, or t
  misc_feature (415)..(415): n is a, c, g, or t
  misc_feature (455)..(455): n is a, c, g, or t
  misc_feature (640)..(640): n is a, c, g, or t
  misc_feature (672)..(672): n is a, c, g, or t
  misc_feature (731)..(731): n is a, c, g, or t
  misc_feature (777)..(777): n is a, c, g, or t
  misc_feature (864)..(864): n is a, c, g, or t
  misc_feature (932)..(932): n is a, c, g, or t
atttgtttgnagtctccaaacgagaagacagaagaaaagaaacagaaaaaatatttgaagaatttggactcaaatntncnaagtatgcaaagaatacgaatgcagaatnaagnngatccatgaannntggccccgacaacaggntcacgggcatccttggaggtcgcgtagtccataccatagaagtngagccccaggnggcttttntttcgccacttgngctttgggtccaggtcntggncgcaggctcgaanccaggtgnggggtgcattagggccagngtgatgngctgtagagtagtggtaggtnatgnggntganaccatccagcntgggggccagctgctcaaactccttgttcgttatcatgcccagctggtcggtnntnggggttatggtaggtgggatgatttggngggccagcagctgggcctggtgcagagcctcggccaagtnggtgagcatgtggatgaggcccacgcgcttttggcttagcagctggttccagacctccaccacgaagccatcgaaatgctggttctttgccacctggaccacggtcttgctcagctcctctatctcatcctcactgtctaagacgttccggaaatcatcgtaagttcagttctcaaacaggagcngaggcactatgtgcaggcccttggcatgcttnctgacagctcgcatccacccttggtccacgtcgtggaggcccgtgacctcaaacatctnacggccacgtctcttcagctgcagccagacgggtgagaactgtgtnaacttgctcccaaagaccttggtgacatcgtagccatggctgttccatggagttacaaagcccagtacatccccagcaaagtgtctnttccgggcctttgccgagcagtagctgcgatgctcaagaaccacactctcagctttgaggtccgttancaccaaacccccggtcttgcaccggcttatcttaaaactga

SEQ ID NO: 643271 - DNA, 526 bp, Homo sapiens
cggcacgaggctggcgggccgcttcgacgcgcgttacaagatcctgctcgggctgggcctgaccagcctgtcgctgtgggagatgacggccttcaccaccgacatcagcgcctgcgacatcgtgcgcaccggcgtgattcaggggctgggcctgggtttcatcttcgtgccgctgtcgaccatgacttttgccacgctggcgccgcgttatcgcaacgagggcacggcgctcttcagcctgatgcgcaacatcggcagcagcatcggcatttcagtcgtcatcacctacctggcgcagcgcacgcaggccaaccatgccgtgttctcggaatacatcgatcccgcgagtctggcggtgcgccaggcggtggagagcggtgcgatggacctgggcacgccgctgggcctgagcctggtggacgcgcaggtcacgcggcaggcggccactctggcttacctgcaggatttccgcctgatgatgtgggtgacgctgtcggccatcccgctgctgttcctgttgcggccg

SEQ ID NO: 643272 - DNA, 974 bp, Homo sapiens
acatggaggcggaggtcgataagctggaactgatgctgtcaccactgactaaagaagagaaaactgcggcagagcaattcaaatttcacatgccagatttatgaacgaacatggacttggcaaaggacaattctaacagagaagagcttaacttccggagaacatttacggaacgatgtctctgttaacccttgatgtctacgagacttgggcggctggctgaacgggggttctggcttcaactgacctggataatgatatctttcactgagagagacttatacagaagaacgggcagataactatactgaactaaacgttcagccaaagaggatcaaactgacgaattaaaacgactttcaacactatcatgtacacagcgccatgcacacacacactatagctcttgataaatttcagcgcccagcaacatcctcaaccactatcttatgcactctgtaccacctatttagcttacagtcatgactcacatatagcatgtcctggtctaatcataaaacagcaactgttctactgtcacattcaccagcacattccgagatatcgtggcttaggtaacaattcaaaacgtatacgcgccaacacacattacggcgtcacaaacatcgcatactataatttacaatatcggtacaacagctagcagtcgcaccactatcggccaccatttacacgcttgacgacccgcctcttactgctggacccctggcaggatcctccccagcaagcaaacaccacaacaaggctaactaaaggcccgaacacttcttcctctggacaaattagcccaagatattggcggtaaattacacacagacccgtcagtcttcaccataggacatagccaaaggaaggaaccaagatgaacccttgccagcacgaagtccctgttacaagagcaggaccggagttggaatccaacataatatagcctgcgacactctaccggctta

SEQ ID NO: 643273 - DNA, 2667 bp, Homo sapiens
  misc_feature (10)..(10): n is a, c, g, or t
tttcttctgngagctttatttgtgaaccctcttgcagtgtcacactgagtccccgccagggcctcccgaggatcccactaaggggcatcttccagggagcgaaggtggtgcgaggccccgactgggagtggggctcacaggatggtgagtggaggcagaggggcggggtcagggctgggctgtggctggctcatggctcagccttagcctgctgggggggcctctttccccaggaggggaagggaaaccgggccgtgtggtggacatccgtggctgggatgtggagacaggccggagtgtggccagcgtgacgtgggctgatggtaccaccaatgtgtaccgtgtgggccacaagggcaaggtggacctcaagtgtgtgggcgaggcagcgggcggcttctactacaaggaccacctcccaaggctcggcaagccggcggagctgcagcgcagggtgagtgctgacagccagcccttccagcacggggacaaggtcaagtgtctgctggacactgatgtcctgcgggagatgcaggaaggccacggcggctggaaccccaggatggcggagtttatcggacagacgggcaccgtgcatcgtatcacggaccgcggggacgtgcgcgtgcagttcaaccacgagacgcgctggaccttccaccccggggcgctcaccaagcaccactccttctgggtgggcgacgtggtccgggtcatcggcgaccttgacacagtgaagcggctgcaggctgggcatggcgagtggacggacgacatggcccctgccctgggccgcgtcgggaaggtggtgaaagtgtttggagacgggaacctgcgtgtagcagtcgctggtcagcggtggaccttcagcccctcctgcctggtggcctaccggcccgaggaggatgccaacctggacgtggccgagcgcgcccgggagaacaaaagctcactgagcgtggccctggacaagcttcgggcccagaagagtgacccagagcacccgggaaggctggtggtggaggtggcgctgggtaacgcagcccgggctctggacctgctgcggaggcgcccagagcaggtggacaccaagaaccaaggcaggaccgctctgcaagtggctgcctacctgggccaggtggagttgatacggctgctgctacaagccagggcgggcgtggacctgccggacgacgagggcaacacggcactgcactacgcggccctggggaaccagcccgaggccaccagggtgctcctgagtgctgggtgccgggcggacgccatcaacagcacccagagcacagcactgcacgtggccgtgcagaggggcttcctggaggtggtgcgggccctgtgtgagcgcggctgtgacgtcaacctgcccgacgcccactcggacacgcccctgcactccgccatctcggcgggcactggagccagcggcattgtcgaggtcctcacggaggtgccaaacatcgatgttaccgccaccaacagccaggtttcaccctgctgcaccatgcctccctcaagggtcacgcgctagctgtgagaaagattctggctcgggcgcggcagctggtggacgccaagaaggaggacggcttcacggcgctgcatctggctgccctcaacaaccaccgcgaggtggcccagatcctcatccgggagggccgctgtgacgtgaacgtgcgcaaccggaagctgcagtccccgctgcatctcgccgtgcaacaggcccacgtggggctggtgccgctactggtggacgctgggtgcagtgtcaacgccgaggacgaggagggggacacagccctgcacgtggcgctgcagcgtcatcagctgctgcccctggtggctgatggggccgggggggacccagggcccttgcagctgctgtccaggctacaggcctcgggcctccccggcagcgcggagctgacggtgggcgcggcggtcgcctgcttcctggcgctggagggcgccgacgtgagctacaccaaccaccgcggtcggagcccgctggacctggccgccgagggtcgcgtgctcaaggcccttcagggctgcgcccagcgcttccgggagcggcaggcgggcgggggcgcggccccgggccccaggcaaacgctcgggacccccaacaccgtgacgaacctgcacgtgggcgccgcgccggggcccgaggccgctgagtgcctggtgtgctccgagctggcgctgctggtgctgttctcgccgtgccagcaccgcaccgtgtgtgaggagtgcgcgcgcaggatgaagaagtgcatcaggtgccaggtggtcgtcagcaagaaactgcgcccagacggctctgaggtggcgagcgccgcccccgcccccggcccgccgcgccagctggtggaggagctgcagagccgctaccggcagatggaggaacgcatcacctgccccatctgcatcgacagccacatccgcctcgtgttccagtgcggccacggcgcatgcgccccctgcggctccgcgctcagcgcctgccccatctgccgccagcccatccgcgaccgcatccagatcttcgtgtgagccgcgccgtccgccgcgcccgagctgccttcgcgtgcccccgccctgtgttttataaaaagaaagattctcggaaaactacagacaacaacg

SEQ ID NO: 643274 - DNA, 889 bp, Homo sapiens
agacgatggctgaccacaagcctgacagcgactccacgccgcgcacgctgctgcgactgcgtgcgtaggatacagcggacccagtgcacgcctcgggcgaccccggagtgctcgggcgtggagcccggagtagccctgcgttgaaacggcttccgcccaggaagttgagtggccaagacatacggtagctgatagccacgtagtggcgttccccatggtacgccagtgtctgttggcacgagtcggcccgatattcaggccatgtgggcgacgttggcaaggatacatgacgaccgtctggactgctgacgtgagagaagcatccgtactaagcgtgcgcccagaagtcttccatcctgaatgccgtgaggtcggtacgtgaaggccagatgccagcaccgtcagggcggtccaaccctaccggagcagagatgatgcagattgcgggcagtcctgtgagtcatgcgaatcttgcctgaagctcgcagccgctcgccacaatccctggtctccgaggtcgtgctggtcccctggccgggaggataacagaggctgaggactgtcagtgtttcagcagcggaggtggcaccagggtgactgtcgtctgctctccaaggagcctcaagggaatgcttgatgccgtcttccctcaccagatccctcagcctgacctttgccaaacctcttcagccacagtcagtgctgaggcctggctttggcccgcagacctccagtccgccgagctgtagacgtgggtgcctttttgcgggatctgcgagatacttcgccgtggctcctccaaacattgtgttggaggacacccatgccgttctctcaggccatgggttggtcgccccaacgtgtatccattcccttgccttgaagccat

SEQ ID NO: 643275 - DNA, 274 bp, Homo sapiens
gtcgctcctccaggttttcccgctggggggtggtggatggtgtcgccactcggcggcgctgccgcacgccgttgccgtccttgtcgcccccgcggccggcctcgcggctctcctcctcgttgtccgtgtccttccatcttcctggccctcctgcccagtgcctcgtggccacatgtccccggggtcacagtgcccggcagttcgatccattttgtgccatctgtgtgcccatgtgcccaaccccggggcatcctctcacgtcgcactgcaggcc

SEQ ID NO: 643276 - DNA, 3698 bp, Homo sapiens
  misc_feature (360)..(360): n is a, c, g, or t
cgggcccgggtaggacggtcccggactggccgtgatctcagcggtgtccaggtccggcgtgactcgaaaccgccggataggcccgcactggtggagtcggcaagagctgacttacggcgcggcaagtgccggccagtgccagcgagcgcgacgtcgctcgccaagcccccgtctctatggcaaccgagtgcgtctctaggaccgccacggcgcaggcgcccggaggctaagccgctcggaacctagctgcgccacgcagggtaggcgacgcagacgctcccgcgtgacgcacttccggtgcttgccctgcccatccccgtgcggtgggcgtggccatggcgggggcgctccggccggcgncggcccctgggctcccgcccttcgggtcccacagtttccagccgccgctctcctcagtgcccggtggcccaggagggcctgggagcccgaagccgtccccgagtcgctcctaggtcactggcgcgatgcgggccgtcctctcggctgatgggttggaagcccagcgaggctagaggccagtcccaaagtttccaggcatcagggctgcagcccaggagcctcaaggcggcccggcgggcgactggacggccggacaggtcccgagcagccccgcccaacatggacccagacccccaggcgggcgtgcaggtgggcatgcgggtggtgcgcggcgtggactggaagtggggccagcaggacggcggcgagggcggcgtgggcacggtggtggagcttggccgccacggcagcccctcgacacccgaccgcacagtggtcgtgcagtgggaccagggcacgcgcaccaactaccgcgccggctaccagggcgcgcacgacctgctgctgtacgacaacgcccagatcggcgtccggcaccccaacatcatctgtgactgctgcaagaagcacgggctgcgggggatgcgctggaagtgccgtgtgtgcctggactacgacctctgcacgcagtgctacatgcacaacaagcatgagctcgcccacgccttcgaccgctacgagaccgctcactcgcgccctgtcacactgagtccccgccagggcctcccgaggatcccactaaggggcatcttccagggagcgaaggtggtgcgaggccccgactgggagtggggctcacaggatggaggggaagggaaaccgggccgtgtggtggacatccgtggctgggatgtggagacaggccggagtgtggccagcgtgacgtgggctgatggtaccaccaatgtgtaccgtgtgggccacaagggcaaggtggacctcaagtgtgtgggcgaggcagcgggcggcttctactacaaggaccacctcccaaggctcggcaagccggcggagctgcagcgcagggtgagtgctgacagccagcccttccagcacggggacaaggtcaagtgtctgctggacactgatgtcctgcgggagatgcaggaaggccacggcggctggaaccccaggatggcggagtttatcggacagacgggcaccgtgcatcgtatcacggaccgcggggacgtgcgcgtgcagttcaaccacgagacgcgctggaccttccaccccggggcgctcaccaagcaccactccttctgggtgggcgacgtggtccgggtcatcggcgaccttgacacagtgaagcggctgcaggctgggcatggcgagtggacggacgacatggcccctgccctgggccgcgtcgggaaggtggtgaaagtgtttggagacgggaacctgcgtgtagcagtcgctggtcagcggtggaccttcagcccctcctgcctggtggcctaccggcccgaggaggatgccaacctggacgtggccgagcgcgcccgggagaacaaaagctcactgagcgtggccctggacaagcttcgggcccagaagagtgacccagagcacccgggaaggctggtggtggaggtggcgctgggtaacgcagcccgggctctggacctgctgcggaggcgcccagagcaggtggacaccaagaaccaaggcaggaccgctctgcaagtggctgcctacctgggccaggtggagttgatacggctgctgctacaagccagggcgggcgtggacctgccggacgacgagggcaacacggcactgcactacgcggccctggggaaccagcccgaggccaccagggtgctcctgagtgctgggtgccgggcggacgccatcaacagcacccagagcacagcactgcacgtggccgtgcagaggggcttcctggaggtggtgcgggccctgtgtgagcgcggctgtgacgtcaacctgcccgacgcccactcggacacgcccctgcactccgccatctcggcgggcactggagccagcggcattgtcgaggtcctcacggaggtgccaaacatcgatgttaccgccaccaacagccaggtttcaccctgctgcaccatgcctccctcaagggtcacgcgctagctgtgagaaagattctggctcgggcgcggcagctggtggacgccaagaaggaggacggcttcacggcgctgcatctggctgccctcaacaaccaccgcgaggtggcccagatcctcatccgggagggccgctgtgacgtgaacgtgcgcaaccggaagctgcagtccccgctgcatctcgccgtgcaacaggcccacgtggggctggtgccgctactggtggacgctgggtgcagtgtcaacgccgaggacgaggagggggacacagccctgcacgtggcgctgcagcgtcatcagctgctgcccctggtggctgatggggccgggggggacccagggcccttgcagctgctgtccaggacatggggcgccggctgctggggctgccaggtgccaggagacgcctccctcgggcctgccccggcgcccgccctcaccggcgtctgtcctgccgcccagctacaggcctcgggcctccccggcagcgcggagctgacggtgggcgcggcggtcgcctgcttcctggcgctggagggcgccgacgtgagctacaccaaccaccgcggtcggagcccgctggacctggccgccgagggtcgcgtgctcaaggcccttcagggctgcgcccagcgcttccgggagcggcaggcgggcgggggcgcggccccgggccccaggcaaacgctcgggacccccaacaccgtgacgaacctgcacgtgggcgccgcgccggggcccgaggccgctgagtgcctggtgtgctccgagctggcgctgctggtgctgttctcgccgtgccagcaccgcaccgtgtgtgaggagtgcgcgcgcaggatgaagaagtgcatcaggtgccaggtggtcgtcagcaagaaactgcgcccagacggctctgaggtggcgagcgccgcccccgcccccggcccgccgcgccagctggtggaggagctgcagagccgctaccggcagatggaggaacgcatcacctgccccatctgcatcgacagccacatccgcctcgtgttccagtgcggccacggcgcatgcgccccctgcggctccgcgctcagcgcctgccccatctgccgccagcccatccgcgaccgcatccagatcttcgtgtgagccgcgccgtccgccgcgcccgagctgccttcgcgtgcccccgccctgtgttttataaaaagaaagattctcggaaaactacagacaacaacg

SEQ ID NO: 643277 - DNA, 244 bp, Homo sapiens
ttttttcaaaaaaaggggggtttttgggttaaccccccccccccaaaaaccccttcctctatgggggaacccccttgggggcccccccttcctttataaaaatttttttgggggcgggggatttccctttttgggggggggtttgaattttcccttaccccaatttgcccccacttgggggtgggggtttttgttccccccccctttggggttttgaggttccccctaaaaattttgtttttca

SEQ ID NO: 643278 - DNA, 3656 bp, Homo sapiens
  misc_feature (360)..(360): n is a, c, g, or t
cgggcccgggtaggacggtcccggactggccgtgatctcagcggtgtccaggtccggcgtgactcgaaaccgccggataggcccgcactggtggagtcggcaagagctgacttacggcgcggcaagtgccggccagtgccagcgagcgcgacgtcgctcgccaagcccccgtctctatggcaaccgagtgcgtctctaggaccgccacggcgcaggcgcccggaggctaagccgctcggaacctagctgcgccacgcagggtaggcgacgcagacgctcccgcgtgacgcacttccggtgcttgccctgcccatccccgtgcggtgggcgtggccatggcgggggcgctccggccggcgncggcccctgggctcccgcccttcgggtcccacagtttccagccgccgctctcctcagtgcccggtggcccaggagggcctgggagcccgaagccgtccccgagtcgctcctaggtcactggcgcgatgcgggccgtcctctcggctgatgggttggaagcccagcgaggctagaggccagtcccaaagtttccaggcatcagggctgcagcccaggagcctcaaggcggcccggcgggcgactggacggccggacaggtcccgagcagccccgcccaacatggacccagacccccaggcgggcgtgcaggtgggcatgcgggtggtgcgcggcgtggactggaagtggggccagcaggacggcggcgagggcggcgtgggcacggtggtggagcttggccgccacggcagcccctcgacacccgaccgcacagtggtcgtgcagtgggaccagggcacgcgcaccaactaccgcgccggctaccagggcgcgcacgacctgctgctgtacgacaacgcccagatcggcgtccggcaccccaacatcatctgtgactgctgcaagaagcacgggctgcgggggatgcgctggaagtgccgtgtgtgcctggactacgacctctgcacgcagtgctacatgcacaacaagcatgagctcgcccacgccttcgaccgctacgagaccgctcactcgcgccctgtcacactgagtccccgccagggcctcccgaggatcccactaaggggcatcttccagggagcgaaggtggtgcgaggccccgactgggagtggggctcacaggatggaggggaagggaaaccgggccgtgtggtggacatccgtggctgggatgtggagacaggccggagtgtggccagcgtgacgtgggctgatggtaccaccaatgtgtaccgtgtgggccacaagggcaaggtggacctcaagtgtgtgggcgaggcagcgggcggcttctactacaaggaccacctcccaaggctcggcaagccggcggagctgcagcgcagggtgagtgctgacagccagcccttccagcacggggacaaggtcaagtgtctgctggacactgatgtcctgcgggagatgcaggaaggccacggcggctggaaccccaggatggcggagtttatcggacagacgggcaccgtgcatcgtatcacggaccgcggggacgtgcgcgtgcagttcaaccacgagacgcgctggaccttccaccccggggcgctcaccaagcaccactccttctgggtgggcgacgtggtccgggtcatcggcgaccttgacacagtgaagcggctgcaggctgggcatggcgagtggacggacgacatggcccctgccctgggccgcgtcgggaaggtggtgaaagtgtttggagacgggaacctgcgtgtagcagtcgctggtcagcggtggaccttcagcccctcctgcctggtggcctaccggcccgaggaggatgccaacctggacgtggccgagcgcgcccgggagaacaaaagctcactgagcgtggccctggacaagcttcgggcccagaagagtgacccagagcacccgggaaggctggtggtggaggtggcgctgggtaacgcagcccgggctctggacctgctgcggaggcgcccagagcaggtggacaccaagaaccaaggcaggaccgctctgcaagtggctgcctacctgggccaggtggagttgatacggctgctgctacaagccagggcgggcgtggacctgccggacgacgagggcaacacggcactgcactacgcggccctggggaacgcagccctgatgtggccaccagtgtgttgctccttgatgttgctggtgttgccttgtgtgctgtgtactggctcattcaatcatgtcatccccatgaatgtcacgatgtcagcttgcactggtgtgcctgttgcacgatggtggcccttccttggcacgtgtggttgctggtgccctttgtgtgagcgcggctgtgacgtcaacctgcccgacgcccactcggacacgcccctgcactccgccatctcggcgggcactggagccagcggcattgtcgaggtcctcacggaggtgccaaacatcgatgttaccgccaccaacagccaggtttcaccctgctgcaccatgcctccctcaagggtcacgcgctagctgtgagaaagattctggctcgggcgcggcagctggtggacgccaagaaggaggacggcttcacggcgctgcatctggctgccctcaacaaccaccgcgaggtggcccagatcctcatccgggagggccgctgtgacgtgaacgtgcgcaaccggaagctgcagtccccgctgcatctcgccgtgcaacaggcccacgtggggctggtgccgctactggtggacgctgggtgcagtgtcaacgccgaggacgaggagggggacacagccctgcacgtggcgctgcagcgtcatcagctgctgcccctggtggctgatggggccgggggggacccagggcccttgcagctgctgtccaggctacaggcctcgggcctccccggcagcgcggagctgacggtgggcgcggcggtcgcctgcttcctggcgctggagggcgccgacgtgagctacaccaaccaccgcggtcggagcccgctggacctggccgccgagggtcgcgtgctcaaggcccttcagggctgcgcccagcgcttccgggagcggcaggcgggcgggggcgcggccccgggccccaggcaaacgctcgggacccccaacaccgtgacgaacctgcacgtgggcgccgcgccggggcccgaggccgctgagtgcctggtgtgctccgagctggcgctgctggtgctgttctcgccgtgccagcaccgcaccgtgtgtgaggagtgcgcgcgcaggatgaagaagtgcatcaggtgccaggtggtcgtcagcaagaaactgcgcccagacggctctgaggtggcgagcgccgcccccgcccccggcccgccgcgccagctggtggaggagctgcagagccgctaccggcagatggaggaacgcatcacctgccccatctgcatcgacagccacatccgcctcgtgttccagtgcggccacggcgcatgcgccccctgcggctccgcgctcagcgcctgccccatctgccgccagcccatccgcgaccgcatccagatcttcgtgtgagccgcgccgtccgccgcgcccgagctgccttcgcgtgcccccgccctgtgttttataaaaagaaagattctcggaaaactacagacaacaacg

SEQ ID NO: 643279 - DNA, 260 bp, Homo sapiens
atttctaaattgtctgttctgttttctcagaatttcttatgaagcttttaagcatcaattcaaggaaaatttaaaaatatcgattgtcttccaagaaaactattccccacctcccgtttagttggaacaacgtaaaaacagacattttcaatcacctgaacatcattctccgagttctcacgctaattaaaaatacaaaaatcgatgttctttctgtttcgtgcacattaaaaattcgtttgaacctgaaaattttgtaa

SEQ ID NO: 643280 - DNA, 3417 bp, Homo sapiens
  misc_feature (360)..(360): n is a, c, g, or t
cgggcccgggtaggacggtcccggactggccgtgatctcagcggtgtccaggtccggcgtgactcgaaaccgccggataggcccgcactggtggagtcggcaagagctgacttacggcgcggcaagtgccggccagtgccagcgagcgcgacgtcgctcgccaagcccccgtctctatggcaaccgagtgcgtctctaggaccgccacggcgcaggcgcccggaggctaagccgctcggaacctagctgcgccacgcagggtaggcgacgcagacgctcccgcgtgacgcacttccggtgcttgccctgcccatccccgtgcggtgggcgtggccatggcgggggcgctccggccggcgncggcccctgggctcccgcccttcgggtcccacagtttccagccgccgctctcctcagtgcccggtggcccaggagggcctgggagcccgaagccgtccccgagtcgctcctaggtcactggcgcgatgcgggccgtcctctcggctgatgggttggaagcccagcgaggctagaggccagtcccaaagtttccaggcatcagggctgcagcccaggagcctcaaggcggcccggcgggcgactggacggccggacaggtcccgagcagccccgcccaacatggacccagacccccaggcgggcgtgcaggtgggcatgcgggtggtgcgcggcgtggactggaagtggggccagcaggacggcggcgagggcggcgtgggcacggtggtggagcttggccgccacggcagcccctcgacacccgaccgcacagtggtcgtgcagtgggaccagggcacgcgcaccaactaccgcgccggctaccagggcgcgcacgacctgctgctgtacgacaacgcccagatcggcgtccggcaccccaacatcatctgtgactgctgcaagaagcacgggctgcgggggatgcgctggaagtgccgtgtgtgcctggactacgacctctgcacgcagtgctacatgcacaacaagcatgagctcgcccacgccttcgaccgctacgagaccgctcactcgcgccctgtcacactgagtccccgccagggcctcccgaggatcccactaaggggcatcttccagggagcgaaggtggtgcgaggccccgactgggagtggggctcacaggatggaggggaagggaaaccgggccgtgtggtggacatccgtggctgggatgtggagacaggccggagtgtggccagcgtgacgtgggctgatggtaccaccaatgtgtaccgtgtgggccacaagggcaaggtggacctcaagtgtgtgggcgaggcagcgggcggcttctactacaaggaccacctcccaaggctcggcaagccggcggagctgcagcgcagggtgagtgctgacagccagcccttccagcacggggacaaggtcaagtgtctgctggacactgatgtcctgcgggagatgcaggaaggccacggcggctggaaccccaggatggcggagtttatcggacagacgggcaccgtgcatcgtatcacggaccgcggggacgtgcgcgtgcagttcaaccacgagacgcgctggaccttccaccccggggcgctcaccaagcaccactccttctgggtgggcgacgtggtccgggtcatcggcgaccttgacacagtgaagcggctgcaggctgggcatggcgagtggacggacgacatggcccctgccctgggccgcgtcgggaaggtggtgaaagtgtttggagacgggaacctgcgtgtagcagtcgctggtcagcggtggaccttcagcccctcctgcctggtggcctaccggcccgaggaggatgccaacctggacgtggccgagcgcgcccgggagaacaaaagctcactgagcgtggccctggacaagcttcgggcccagaagagtgacccagagcacccgggaaggctggtggtggaggtggcgctgggtaacgcagcccgggctctggacctgctgcggaggcgcccagagcaggtggacaccaagaaccaaggcaggaccgctctgcaagtggctgcctacctgggccaggtggagttgatacggctgctgctacaagccagggcgggcgtggacctgccggacgacgagggcaacacggcactgcactacgcggccctggggaaccagcccgaggccaccagggtgctcctgagtgctgggtgccgggcggacgccatcaacagcacccagagcacagcactgcacgtggccgtgcagaggggcttcctggaggtggtgcgggccctgtgtgagcgcggctgtgacgtcaacctgcccgacgcccactcggacacgcccctgcactccgccatctcggcgggcactggagccagcggcattgtcgaggtcctcacggaggtgccaaacatcgatgttaccgccaccaacagccaggtttcaccctgctgcaccatgcctccctcaagggtcacgcgctagctgtgagaaagattctggctcgggcgcggcagctggtggacgccaagaaggaggacggcttcacggcgctgcatctggctgccctcaacaaccaccgcgaggtggcccagatcctcatccgggagggccgctgtgacgtgaacgtgcgcaaccggaagctgcagtccccgctgcatctcgccgtgcaacaggcccacgtggggctggtgccgctactggtggacgctgggtgcagtgtcaacgccgaggacgaggagggggacacagccctgcacgtggcgctgcagcgtcatcagctgctgcccctggtggctgatggggccgggggggacccagggcccttgcagctgctgtccaggctacaggcctcgggcctccccggcagcgcggagctgacggtgggcgcggcggtcgcctgcttcctggcgctggagggcgccgacgtgagctacaccaaccaccgcggtcggagcccgctggacctggccgccgagggtcgcgtgctcaaggcccttcagggctgcgcccagcgcttccgagtgcgcgcgcaggatgaagaagtgcatcaggtgccaggtggtcgtcagcaagaaactgcgcccagacggctctgaggtggcgagcgccgcccccgcccccggcccgccgcgccagctggtggaggagctgcagagccgctaccggcagatggaggaacgcatcacctgccccatctgcatcgacagccacatccgcctcgtgttccagtgcggccacggcgcatgcgccccctgcggctccgcgctcagcgcctgccccatctgccgccagcccatccgcgaccgcatccagatcttcgtgtgagccgcgccgtccgccgcgcccgagctgccttcgcgtgcccccgccctgtgttttataaaaagaaagattctcggaaaactacagacaacaacg

SEQ ID NO: 643281 - DNA, 3564 bp, Homo sapiens
  misc_feature (360)..(360): n is a, c, g, or t
cgggcccgggtaggacggtcccggactggccgtgatctcagcggtgtccaggtccggcgtgactcgaaaccgccggataggcccgcactggtggagtcggcaagagctgacttacggcgcggcaagtgccggccagtgccagcgagcgcgacgtcgctcgccaagcccccgtctctatggcaaccgagtgcgtctctaggaccgccacggcgcaggcgcccggaggctaagccgctcggaacctagctgcgccacgcagggtaggcgacgcagacgctcccgcgtgacgcacttccggtgcttgccctgcccatccccgtgcggtgggcgtggccatggcgggggcgctccggccggcgncggcccctgggctcccgcccttcgggtcccacagtttccagccgccgctctcctcagtgcccggtggcccaggagggcctgggagcccgaagccgtccccgagtcgctcctaggtcactggcgcgatgcgggccgtcctctcggctgatgggttggaagcccagcgaggctagaggccagtcccaaagtttccaggcatcagggctgcagcccaggagcctcaaggcggcccggcgggcgactggacggccggacaggtcccgagcagccccgcccaacatggacccagacccccaggcgggcgtgcaggtgggcatgcgggtggtgcgcggcgtggactggaagtggggccagcaggacggcggcgagggcggcgtgggcacggtggtggagcttggccgccacggcagcccctcgacacccgaccgcacagtggtcgtgcagtgggaccagggcacgcgcaccaactaccgcgccggctaccagggcgcgcacgacctgctgctgtacgacaacgcccagatcggcgtccggcaccccaacatcatctgtgactgctgcaagaagcacgggctgcgggggatgcgctggaagtgccgtgtgtgcctggactacgacctctgcacgcagtgctacatgcacaacaagcatgagctcgcccacgccttcgaccgctacgagaccgctcactcgcgccctgtcacactgagtccccgccagggcctcccgaggatcccactaaggggcatcttccagggagcgaaggtggtgcgaggccccgactgggagtggggctcacaggatggaggggaagggaaaccgggccgtgtggtggacatccgtggctgggatgtggagacaggccggagtgtggccagcgtgacgtgggctgatggtaccaccaatgtgtaccgtgtgggccacaagggcaaggtggacctcaagtgtgtgggcgaggcagcgggcggcttctactacaaggaccacctcccaaggctcggcaagccggcggagctgcagcgcagggtgagtgctgacagccagcccttccagcacggggacaaggtcaagtgtctgctggacactgatgtcctgcgggagatgcaggaaggccacggcggctggaaccccaggatggcggagtttatcggacagacgggcaccgtgcatcgtatcacggaccgcggggacgtgcgcgtgcagttcaaccacgagacgcgctggaccttccaccccggggcgctcaccaagcaccactccttctgggtgggcgacgtggtccgggtcatcggcgaccttgacacagtgaagcggctgcaggctgggcatggcgagtggacggacgacatggcccctgccctgggccgcgtcgggaaggtggtgaaagtgtttggagacgggaacctgcgtgtagcagtcgctggtcagcggtggaccttcagcccctcctgcctggtggcctaccggcccgaggaggatgccaacctggacgtggccgagcgcgcccgggagaacaaaagctcactgagcgtggccctggacaagcttcgggcccagaagagtgacccagagcacccgggaaggctggtggtggaggtggcgctgggtaacgcagcccgggctctggacctgctgcggaggcgcccagagcaggtggacaccaagaaccaaggcaggaccgctctgcaagtggctgcctacctgggccaggtggagttgatacggctgctgctacaagccagggcgggcgtggacctgccggacgacgagggcaacacggcactgcactacgcggccctggggaaccagcccgaggccaccagggtgctcctgagtgctgggtgccgggcggacgccatcaacagcacccagagcacagcactgcacgtggccgtgcagaggggcttcctggaggtggtgcgggccctgtgtgagcgcggctgtgacgtcaacctgcccgacgcccactcggacacgcccctgcactccgccatctcggcgggcactggagccagcggcattgtcgaggtcctcacggaggtgccaaacatcgatgttaccgccaccaacagccaggtttcaccctgctgcaccatgcctccctcaagggtcacgcgctagctgtgagaaagattctggctcgggcgcggcagctggtggacgccaagaaggaggacggcttcacggcgctgcatctggctgccctcaacaaccaccgcgaggtggcccagatcctcatccgggagggccgctgtgacgtgaacgtgcgcaaccggaagctgcagtccccgctgcatctcgccgtgcaacaggcccacgtggggctggtgccgctactggtggacgctgggtgcagtgtcaacgccgaggacgaggagggggacacagccctgcacgtggcgctgcagcgtcatcagctgctgcccctggtggctgatggggccgggggggacccagggcccttgcagctgctgtccaggctacaggcctcgggcctccccggcagcgcggagctgacggtgggcgcggcggtcgcctgcttcctggcgctggagggcgccgacgtgagctacaccaaccaccgcggtcggagcccgctggacctggccgccgagggtcgcgtgctcaaggcccttcagggctgcgcccagcgcttccgggagcggcaggcgggcgggggcgcggccccgggccccaggcaaacgctcgggacccccaacaccgtgacgaacctgcacgtgggcgccgcgccggggcccgaggccgctgagtgcctggtgtgctccgagctggcgctgctggtgctgttctcgccgtgccagcaccgcaccgtgtgtgaggagtgcgcgcgcaggatgaagaagtgcatcaggtgccaggtggtcgtcagcaagaaactgcgcccagacggctctgaggtggcgagcgccgcccccgcccccggcccgccgcgccagctggtggaggagctgcagagccgctaccggcagatggaggaacgcatcacctgccccatctgcatcgacagccacatccgcctcgtgttccagtgcggccacggcgcatgcgccccctgcggctccgcggccaggccttgcccattttcggcaatccatcgggaccgatccgaatttcgagttagcaggccgtcagcggccggactgcttcggtccccgcctggtttataacgaagatctggcactt

SEQ ID NO: 643282 - DNA, 202 bp, Homo sapiens
actgctatccaacgccgcttgcaagctgatatagcggggccatttcacaaagcgcgagtgagagtctcttgtagggctggatgtactgttcaattgccaaacttcttacgcctatttctcataacatgggcgattcaccacatttcttacgcctcactgcttcttctatcgacagctagggtgccggagccaccattacttt

SEQ ID NO: 643283 - DNA, 3299 bp, Homo sapiens
  misc_feature (360)..(360): n is a, c, g, or t
cgggcccgggtaggacggtcccggactggccgtgatctcagcggtgtccaggtccggcgtgactcgaaaccgccggataggcccgcactggtggagtcggcaagagctgacttacggcgcggcaagtgccggccagtgccagcgagcgcgacgtcgctcgccaagcccccgtctctatggcaaccgagtgcgtctctaggaccgccacggcgcaggcgcccggaggctaagccgctcggaacctagctgcgccacgcagggtaggcgacgcagacgctcccgcgtgacgcacttccggtgcttgccctgcccatccccgtgcggtgggcgtggccatggcgggggcgctccggccggcgncggcccctgggctcccgcccttcgggtcccacagtttccagccgccgctctcctcagtgcccggtggcccaggagggcctgggagcccgaagccgtccccgagtcgctcctaggtcactggcgcgatgcgggccgtcctctcggctgatgggttggaagcccagcgaggctagaggccagtcccaaagtttccaggcatcagggctgcagcccaggagcctcaaggcggcccggcgggcgactggacggccggacaggtcccgagcagccccgcccaacatggacccagacccccaggcgggcgtgcaggtgggcatgcgggtggtgcgcggcgtggactggaagtggggccagcaggacggcggcgagggcggcgtgggcacggtggtggagcttggccgccacggcagcccctcgacacccgaccgcacagtggtcgtgcagtgggaccagggcacgcgcaccaactaccgcgccggctaccagggcgcgcacgacctgctgctgtacgacaacgcccagatcggcgtccggcaccccaacatcatctgtgactgctgcaagaagcacgggctgcgggggatgcgctggaagtgccgtgtgtgcctggactacgacctctgcacgcagtgctacatgcacaacaagcatgagctcgcccacgccttcgaccgctacgagaccgctcactcgcgccctgtcacactgagtccccgccagggcctcccgaggatcccactaaggggcatcttccagggagcgaaggtggtgcgaggccccgactgggagtggggctcacaggatggaggggaagggaaaccgggccgtgtggtggacatccgtggctgggatgtggagacaggccggagtgtggccagcgtgacgtgggctgatggtaccaccaatgtgtaccgtgtgggccacaagggcaaggtggacctcaagtgtgtgggcgaggcagcgggcggcttctactacaaggaccacctcccaaggctcggcaagccggcggagctgcagcgcagggtgagtgctgacagccagcccttccagcacggggacaaggtcaagtgtctgctggacactgatgtcctgcgggagatgcaggaaggccacggcggctggaaccccaggatggcggagtttatcggacagacgggcaccgtgcatcgtatcacggaccgcggggacgtgcgcgtgcagttcaaccacgagacgcgctggaccttccaccccggggcgctcaccaagcaccactccttctgggtgggcgacgtggtccgggtcatcggcgaccttgacacagtgaagcggctgcaggctgggcatggcgagtggacggacgacatggcccctgccctgggccgcgtcgggaaggtggtgaaagtgtttggagacgggaacctgcgtgtagcagtcgctggtcagcggtggaccttcagcccctcctgcctggtggcctaccggcccgaggaggatgccaacctggacgtggccgagcgcgcccgggagaacaaaagctcactgagcgtggccctggacaagcttcgggcccagaagagtgacccagagcacccgggaaggctggtggtggaggtggcgctgggtaacgcagcccgggctctggacctgctgcggaggcgcccagagcaggtggacaccaagaaccaaggcaggaccgctctgcaagtggctgcctacctgggccaggtggagttgatacggctgctgctacaagccagggcgggcgtggacctgccggacgacgagggcaacacggcactgcactacgcggccctggggaaccagcccgaggccaccagggtgctcctgagtgctgggtgccgggcggacgccatcaacagcacccagagcacagcactgcacgtggccgtgcagaggggcttcctggaggtggtgcgggccctgtgtgagcgcggctgtgacgtcaacctgcccgacgcccactcggacacgcccctgcactccgccatctcggcgggcactggagccagcggcattgtcgaggtcctcacggaggtgccaaacatcgatgttaccgccaccaacagccaggtttcaccctgctgcaccatgcctccctcaagggtcacgcgctagctgtgagaaagattctggctcgggcgcggcagctggtggacgccaagaaggaggacggcttcacggcgctgcatctggctgccctcaacaaccaccgctggtggacgctgggtgcagtgtcaacgccgaggacgaggagggggacacagccctgcacgtggcgctgcagcgtcatcagctgctgcccctggtggctgatggggccgggggggacccagggcccttgcagctgctgtccaggctacaggcctcgggcctccccggcagcgcggagctgacggtgggcgcggcggtcgcctgcttcctggcgctggagggcgccgacgtgagctacaccaaccaccgcggtcggagcccgctggacctggccgccgagggtcgcgtgctcaaggcccttcagggctgcgcccagcgcttccgagtgcgcgcgcaggatgaagaagtgcatcaggtgccaggtggtcgtcagcaagaaactgcgcccagacggctctgaggtggcgagcgccgcccccgcccccggcccgccgcgccagctggtggaggagctgcagagccgctaccggcagatggaggaacgcatcacctgccccatctgcatcgacagccacatccgcctcgtgttccagtgcggccacggcgcatgcgccccctgcggctccgcgctcagcgcctgccccatctgccgccagcccatccgcgaccgcatccagatcttcgtgtgagccgcgccgtccgccgcgcccgagctgccttcgcgtgcccccgccctgtgttttataaaaagaaagattctcggaaaactacagacaacaacg

SEQ ID NO: 643284 - DNA, 275 bp, Homo sapiens
tgaaaaactagctagagactgaaggactcaaggaatgaacatggatttaaaatttttaaccttatacatcaaaacctcagaagctgaagaagcctgcaacccagaaatgccaactggttcagaacaaaaaaaccaagttccaacgaaaaggctgttctctctagtcaaaggaacaagaaaggggcagcctagaaagacagaagcaatatcattttgctctcgttgaacaccacaaagaattatggtcccatccccatgtacacctgcaaaggcaa

SEQ ID NO: 643285 - DNA, 501 bp, Homo sapiens
  misc_feature (4)..(4): n is a, c, g, or t
  misc_feature (20)..(20): n is a, c, g, or t
  misc_feature (103)..(103): n is a, c, g, or t
  misc_feature (108)..(108): n is a, c, g, or t
  misc_feature (247)..(247): n is a, c, g, or t
  misc_feature (438)..(438): n is a, c, g, or t
  misc_feature (450)..(450): n is a, c, g, or t
  misc_feature (453)..(453): n is a, c, g, or t
  misc_feature (455)..(455): n is a, c, g, or t
  misc_feature (458)..(458): n is a, c, g, or t
  misc_feature (473)..(473): n is a, c, g, or t
  misc_feature (475)..(475): n is a, c, g, or t
  misc_feature (488)..(488): n is a, c, g, or t
  misc_feature (492)..(492): n is a, c, g, or t
  misc_feature (501)..(501): n is a, c, g, or t
aaancaaaggtctaaccccnagtggcttaaaaaattggattggcaggaaaaactagttgcttggcctaagtttaaagctaggttccaaaatccggttttcttnatggnccagatatttggccaattcttccaactcaacagaacttccatcgatttccacattcattacagacaacaaatgttgtcattggttcatcagcactacgggttgtacctgtgtgtaagtgcaattcttctttttacattngccacatgggaacaagtcagtctgggtcccaccagtcttggccatctgatgctctctgatggcttctttggtcaagtttttccgcatctctttcaggtcatcactagccatttcctctgctgtcattctagcaaataagcaggaggatattccacagaggcatttttcctaaattggatttttgcatcttnagattgattccnctngnctnattttgattccgcanantcctcatcaaccnacanatcagagtn

SEQ ID NO: 643286 - DNA, 3599 bp, Homo sapiens
  misc_feature (360)..(360): n is a, c, g, or t
  misc_feature (3356)..(3358): n is a, c, g, or t
cgggcccgggtaggacggtcccggactggccgtgatctcagcggtgtccaggtccggcgtgactcgaaaccgccggataggcccgcactggtggagtcggcaagagctgacttacggcgcggcaagtgccggccagtgccagcgagcgcgacgtcgctcgccaagcccccgtctctatggcaaccgagtgcgtctctaggaccgccacggcgcaggcgcccggaggctaagccgctcggaacctagctgcgccacgcagggtaggcgacgcagacgctcccgcgtgacgcacttccggtgcttgccctgcccatccccgtgcggtgggcgtggccatggcgggggcgctccggccggcgncggcccctgggctcccgcccttcgggtcccacagtttccagccgccgctctcctcagtgcccggtggcccaggagggcctgggagcccgaagccgtccccgagtcgctcctaggtcactggcgcgatgcgggccgtcctctcggctgatgggttggaagcccagcgaggctagaggccagtcccaaagtttccaggcatcagggctgcagcccaggagcctcaaggcggcccggcgggcgactggacggccggacaggtcccgagcagccccgcccaacatggacccagacccccaggcgggcgtgcaggtgggcatgcgggtggtgcgcggcgtggactggaagtggggccagcaggacggcggcgagggcggcgtgggcacggtggtggagcttggccgccacggcagcccctcgacacccgaccgcacagtggtcgtgcagtgggaccagggcacgcgcaccaactaccgcgccggctaccagggcgcgcacgacctgctgctgtacgacaacgcccagatcggcgtccggcaccccaacatcatctgtgactgctgcaagaagcacgggctgcgggggatgcgctggaagtgccgtgtgtgcctggactacgacctctgcacgcagtgctacatgcacaacaagcatgagctcgcccacgccttcgaccgctacgagaccgctcactcgcgccctgtcacactgagtccccgccagggcctcccgaggatcccactaaggggcatcttccagggagcgaaggtggtgcgaggccccgactgggagtggggctcacaggatggaggggaagggaaaccgggccgtgtggtggacatccgtggctgggatgtggagacaggccggagtgtggccagcgtgacgtgggctgatggtaccaccaatgtgtaccgtgtgggccacaagggcaaggtggacctcaagtgtgtgggcgaggcagcgggcggcttctactacaaggaccacctcccaaggctcggcaagccggcggagctgcagcgcagggtgagtgctgacagccagcccttccagcacggggacaaggtcaagtgtctgctggacactgatgtcctgcgggagatgcaggaaggccacggcggctggaaccccaggatggcggagtttatcggacagacgggcaccgtgcatcgtatcacggaccgcggggacgtgcgcgtgcagttcaaccacgagacgcgctggaccttccaccccggggcgctcaccaagcaccactccttctgggtgggcgacgtggtccgggtcatcggcgaccttgacacagtgaagcggctgcaggctgggcatggcgagtggacggacgacatggcccctgccctgggccgcgtcgggaaggtggtgaaagtgtttggagacgggaacctgcgtgtagcagtcgctggtcagcggtggaccttcagcccctcctgcctggtggcctaccggcccgaggaggatgccaacctggacgtggccgagcgcgcccgggagaacaaaagctcactgagcgtggccctggacaagcttcgggcccagaagagtgacccagagcacccgggaaggctggtggtggaggtggcgctgggtaacgcagcccgggctctggacctgctgcggaggcgcccagagcaggtggacaccaagaaccaaggcaggaccgctctgcaagtggctgcctacctgggccaggtggagttgatacggctgctgctacaagccagggcgggcgtggacctgccggacgacgagggcaacacggcactgcactacgcggccctggggaaccagcccgaggccaccagggtgctcctgagtgctgggtgccgggcggacgccatcaacagcacccagagcacagcactgcacgtggccgtgcagaggggcttcctggaggtggtgcgggccctgtgtgagcgcggctgtgacgtcaacctgcccgacgcccactcggacacgcccctgcactccgccatctcggcgggcactggagccagcggcattgtcgaggtcctcacggaggtgccaaacatcgatgttaccgccaccaacagccaggtttcaccctgctgcaccatgcctccctcaagggtcacgcgctagctgtgagaaagattctggctcgggcgcggcagctggtggacgccaagaaggaggacggcttcacggcgctgcatctggctgccctcaacaaccaccgcgaggtggcccagatcctcatccgggagggccgctgtgacgtgaacgtgcgcaaccggaagctgcagtccccgctgcatctcgccgtgcaacaggcccacgtggggctggtgccgctactggtggacgctgggtgcagtgtcaacgccgaggacgaggagggggacacagccctgcacgtggcgctgcagcgtcatcagctgctgcccctggtggctgatggggccgggggggacccagggcccttgcagctgctgtccaggctacaggcctcgggcctccccggcagcgcggagctgacggtgggcgcggcggtcgcctgcttcctggcgctggagggcgccgacgtgagctacaccaaccaccgcggtcggagcccgctggacctggccgccgagggtcgcgtgctcaaggcccttcagggctgcgcccagcgcttccgggagcggcaggcgggcgggggcgcggccccgggccccaggcaaacgctcgggacccccaacaccgtgacgaacctgcacgtgggcgccgcgccggggcccgaggccgctgagtgcctggtgtgctccgagctggcgctgctggtgctgttctcgccgtgccagcaccgcaccgtgtgtgaggagtgcgcgcgcaggatgaagaagtgcatcaggtgccaggtggtcgtcagcaagaaactgcgcccagacggctctgaggtggcgagcgccgcccccgcccccggcccgccgcgccagctggtggaggagctgcagagccgctaccggcagatggannnttttttttttttttttttttttttcgacagccacatccgcctcgtgttccagtgcggccacggcgcatgcgccccctgcggctccgcgctcagcgcctgccccatctgccgccagcccatccgcgaccgcatccagatcttcgtgtgagccgcgccgtccgccgcgcccgagctgccttcgcgtgcccccgccctgtgttttataaaaagaaagattctcggaaaactacagacaacaacg

SEQ ID NO: 643287 - DNA, 611 bp, Homo sapiens
cacgtgttcagcgctgataagcctaaatatgctatgcgcaccttagtgcttgcctgatccaactggtctttgctggcgtatgcatatctgggacgtcgctgccctgcacctgtgcgccgactctaaccggcatcctagaagcccgatactcactatatgaataatgtcacgctctagatgggcaaacgcaagcgcgtggcttcattatagagaatcgcactttctatagcagattgtgtgactatgaacatgctagtatcctgagggcgattggattatgcatttactgtgattcgtaggcaggttgctagctagaatgatgagttaatttgaccatattcgttgctatcatgtatgtgtacatatcaccgcatggcctgctatattaacatgtaggctgttcatatatcattagagcgcatcaagatgatctactgagacatctgtagaaggatatggatctcatacgatactgacatgcatgacgtcagaagtcatcatatgattgcttgatcaccgtaatggctcaatgttgattactgattattattgctctcagtatactacactgagttacattaatgctaattgagcgctgatgcaccagccct

SEQ ID NO: 643288 - DNA, 1559 bp, Homo sapiens
ggcctgggaggggcccggcggggctgagcctgtgcgtcctggggtcgggcctggcggggctgagcctgtgcgtccagccaccgggcccggcgccctccctctcccacttcctctcctgtcaggaaccagcccgaggccaccagggtgctcctgagtgctgggtgccgggcggacgccatcaacagcacccagagcacagcactgcacgtggccgtgcagaggggcttcctggaggtggtgcgggccctgtgtgagcgcggctgtgacgtcaacctgcccgacgcccactcggacacgcccctgcactccgccatctcggcgggcactggagccagcggcattgtcgaggtcctcacggaggtgccaaacatcgatgttaccgccaccaacagccaggtttcaccctgctgcaccatgcctccctcaagggtcacgcgctagctgtgagaaagattctggctcgggcgcggcagctggtggacgccaagaaggaggacggcttcacggcgctgcatctggctgccctcaacaaccaccgcgaggtggcccagatcctcatccgggagggccgctgtgacgtgaacgtgcgcaaccggaagctgcagtccccgctgcatctcgccgtgcaacaggcccacgtggggctggtgccgctactggtggacgctgggtgcagtgtcaacgccgaggacgaggagggggacacagccctgcacgtggcgctgcagcgtcatcagctgctgcccctggtggctgatggggccgggggggacccagggcccttgcagctgctgtccaggctacaggcctcgggcctccccggcagcgcggagctgacggtgggcgcggcggtcgcctgcttcctggcgctggagggcgccgacgtgagctacaccaaccaccgcggtcggagcccgctggacctggccgccgagggtcgcgtgctcaaggcccttcagggctgcgcccagcgcttccgggagcggcaggcgggcgggggcgcggccccgggccccaggcaaacgctcgggacccccaacaccgtgacgaacctgcacgtgggcgccgcgccggggcccgaggccgctgagtgcctggtgtgctccgagctggcgctgctggtgctgttctcgccgtgccagcaccgcaccgtgtgtgaggagtgcgcgcgcaggatgaagaagtgcatcaggtgccaggtggtcgtcagcaagaaactgcgcccagacggctctgaggtggcgagcgccgcccccgcccccggcccgccgcgccagctggtggaggagctgcagagccgctaccggcagatggaggaacgcatcacctgccccatctgcatcgacagccacatccgcctcgtgttccagtgcggccacggcgcatgcgccccctgcggctccgcgctcagcgcctgccccatctgccgccagcccatccgcgaccgcatccagatcttcgtgtgagccgcgccgtccgccgcgcccgagctgccttcgcgtgcccccgccctgtgttttataaaaagaaagattctcggaaaactacagacaacaacg

SEQ ID NO: 643289 - DNA, 773 bp, Homo sapiens
ccgaacggggtttgaacttttaacgcccttttggggttggggagcttctttgaacaacttctggtcccccccctcttagagttcttctgtagagcccccccccaatttggaatcccttgggaaagaacttccttatgctgtccccttttgtgcctgcggcccaccaccacgcgtgcttccacggccccgcccttattatggtgcacatatagtacttcgccccaccgagccacttataggaaaatgaacaccacctctttttaaggaaaatgttgtttaactaaaagccacaatttccacaaacaaaattgttataagacccctaagcccccttgtgtgctctccccatttctgactccttccccaccttcgttgccccccatactttctgaggtgcacactgggaaggctccccctctctatttttggggcttgactgagctttctttttgtagctggggctttgatgttccttcccgtgtcactttctcagtccaccactagccctgagcctggccccctcacggtgttgtcacccacgagtctgagtgttgtaacccccctgaggaggacccgacgagaaatatagtgccctctcccccccctcttcctactggtctctctatgcctctttacagatctcgtctcttttaacctggcccctctcccttgggctctgatgaaaaattgctgactgtagctttggaagtttagctctgagaaccctagatgatttccgttttaggaaaattaaaccccttgattacctatta

SEQ ID NO: 643290 - DNA, 1652 bp, Homo sapiens
ggcctgggaggggcccggcggggctgagcctgtgcgtcctggggtcgggcctggcggggctgagcctgtgcgtccagccaccgggcccggcgccctccctctcccacttcctctcctgtcaggaaccagcccgaggccaccagggtgctcctgagtgctgggtgccgggcggacgccatcaacagcacccagagcacagcactgcacgtggccgtgcagaggggcttcctggaggtggtgcgggccctgtgtgagcgcggctgtgacgtcaacctgcccgacgcccactcggacacgcccctgcactccgccatctcggcgggcactggagccagcggcattgtcgaggtcctcacggaggtgccaaacatcgatgttaccgccaccaacagccaggtttcaccctgctgcaccatgcctccctcaagggtcacgcgctgtgagtgtggggtgggcacacagctgcagccggcctcttgctgtgctgcctgggggcagtcccaggtcccagaccaacctccctgctccacagagctgtgagaaagattctggctcgggcgcggcagctggtggacgccaagaaggaggacggcttcacggcgctgcatctggctgccctcaacaaccaccgcgaggtggcccagatcctcatccgggagggccgctgtgacgtgaacgtgcgcaaccggaagctgcagtccccgctgcatctcgccgtgcaacaggcccacgtggggctggtgccgctactggtggacgctgggtgcagtgtcaacgccgaggacgaggagggggacacagccctgcacgtggcgctgcagcgtcatcagctgctgcccctggtggctgatggggccgggggggacccagggcccttgcagctgctgtccaggctacaggcctcgggcctccccggcagcgcggagctgacggtgggcgcggcggtcgcctgcttcctggcgctggagggcgccgacgtgagctacaccaaccaccgcggtcggagcccgctggacctggccgccgagggtcgcgtgctcaaggcccttcagggctgcgcccagcgcttccgggagcggcaggcgggcgggggcgcggccccgggccccaggcaaacgctcgggacccccaacaccgtgacgaacctgcacgtgggcgccgcgccggggcccgaggccgctgagtgcctggtgtgctccgagctggcgctgctggtgctgttctcgccgtgccagcaccgcaccgtgtgtgaggagtgcgcgcgcaggatgaagaagtgcatcaggtgccaggtggtcgtcagcaagaaactgcgcccagacggctctgaggtggcgagcgccgcccccgcccccggcccgccgcgccagctggtggaggagctgcagagccgctaccggcagatggaggaacgcatcacctgccccatctgcatcgacagccacatccgcctcgtgttccagtgcggccacggcgcatgcgccccctgcggctccgcgctcagcgcctgccccatctgccgccagcccatccgcgaccgcatccagatcttcgtgtgagccgcgccgtccgccgcgcccgagctgccttcgcgtgcccccgccctgtgttttataaaaagaaagattctcggaaaactacagacaacaacg

SEQ ID NO: 643291 - DNA, 1699 bp, Homo sapiens
  misc_feature (1628)..(1628): n is a, c, g, or t
ggcatgtgtgaagaggtgggtcactgagttggttgatcatagagtgatacttgataacggatagccagatatgagcagtcctgtctcaatctcgcttggctgtcagatggtactgtcgcaggaataagatctagctgtgatcctacagcctatgatatactggtctgatgctgctgctgtgatgaagaagctgctcttctacagatgatggtagtaattagtgagtgatagacaatcggcgcaacttctttaacttgcactacacatcgtcaagagggagcgcgaggagaccccttcggcctgagattgtgcctagagatgtatgcagagctaactctacattcgtgaggatattaagaacaaaagtgagaatttgtatccctagggcaagaggaatcaagcacctaggagagagttaggcgagcgcgaacccatgaacgcgaaaggccactcatcgtagttaccatccacgaactgtgccatggacatggctaacccaggaaaccgcttgtccgtgtgtatccctagcataattggagcgaatagttaagaaataacagactctcgctaatgaacgcacaatgcgcatgtcgtgtgcctgcaatgcgccgtcgcgcgtcattgagccacacatgtgagcgttcaacgtgcgcgttgtaaaggggcccatgaggccggtgacggggtggaagaagccgtgggagcccctgtttttagagctctgcaagggggggccctgtagatacgttgttattaacagcgttgggataaagaggacgtgaccgtatttccatcgccttttagtccatgagccaaacaccccaccgtttcactgttttctccccttagctttggttccttttttatataccggacgccaaagaacttgcttccattcctagtccctacatattctccgcgccggaggaagcgaaattcccccaaatggcatcgggaggcccttcaagaagggggctttgtgagggccaccgccttttgtgtggtgacaacacgcgcagacgcaattattaaacgggggcgagacattcggttgaacggcgagccagaagttcggccgatttaagactttggtaccttgtatacaagaccatatggccaggttggtcatggctgagatttgttaaccaccaagtttatttcgctacaacgatataagctcttattgtggcagaggtatgaggctacctacgggatatgacaaaagccccagatttagtggttacaacacacaattttccccacagtagttaaatatttcgcgacgagggatcgcgtgaaacatgcataaggaacattccggaaatttccctctattgtctatcaccttttcgtggctgagagcgagtggactctatattcaagccttttaaagttgacagttatttacccgcccttgcttccaattaggcacggaagcaatgtgacaagcacgagggttgttacggagcccctgagccctataagcccgtggatgagagccacgacaaccatggaagacccccaatggggacgagagcttctccgcctgtctgtgcgcgaacacgccccttcaccttgtggttcgtgtggtagcgagaagagcttcagctataagctatcaatccagnagaagaaggtgtgctatttcccaggagaaggaggaagattatgcgcacaacaaaacactaggtcgacagga

SEQ ID NO: 643292 - DNA, 440 bp, Homo sapiens
tgtctaattgaaatatttagggcagcaacgttgaaatcacctgtgtgatgtaaacccatgcattacttgggggagaactgttgacataattcagtgtcaacaggggaaggaacatgttctctttccagaagggtataaaggtactggccaggtgcagagagtcacgcctgtaatcccagcactttgggaggccgaggcaggtggatcacctgaagtcaaggagttcatgaccggcctggccaacatggtgaaaccccgtctctactaaaaatgcaaaaattagcagggcacggaagcaggcgcctgtagtcctaactactcgggaggccgaggcagagggatcacctgaggttaggagtttgagaccagcctggccaacatggtgaagccccatctctactaaaaatgcaaaaataatccaagcatggtggcacatgcct

SEQ ID NO: 643293 - DNA, 1114 bp, Homo sapiens
  misc_feature (16)..(16): n is a, c, g, or t
ccggggccagcggcgntggggtcggcgctggggtcgtcgtccgggccgggtgggctgcggcgcgcggcaggcgctctggcctggcctggccgccgctgagcagtcggggccggtgggtggcctcgaacgccgggacagaccgacagacggactggccggcggtcccgcgcccccgagcggagcgggcgggacggaaacgtccgggcaagttggggtcggcagggttggaagcccagcgaggctagaggccagtcccaaagtttccaggcatcagggctgcagcccaggagcctcaaggcggcccggcgggcgactggacggccggacaggtgagctcttgatcgtccgcggcctgatagtttgcacttggctctcccactttggggctccgtggaagccacgtcagagaggctgtgtttgtgtctgagcatgcatgcgagtggaggggagtggtgagtaatcccgcgtctcctctctgagttcggaacccatggaggaagaaagcagaggtgccagacaggcctctgataggcacctgcaggattggggcagagcggccgcagcgcaggagcgccggcaagcctggcccttcccgggaggccccctttgtccggttccaccctggcctgttgcctcacatgcaacaagtgtctgaatgtggcgctctcctggccgagggcagccctgggcggtgagtgggatgacaccccagcctgcagggtgcctgtaggtctccacccagatgggcaggattggaggtggccgcagcgctcgtgggctttccctcagcaggtgtctccatgctggcctccccgcctcagggcttcatcccactccgtgggcctgatctccctggggcacctgggatgtccatctgcgttagctggagctactccatggcctgtggcgtgccacacacagcggcatttcggtgtcattaggcacagctggaggtgcaaggaggagggcagcctcatgtccagttccatgtaacttgcttcttctgaataaaggcaatttgctaactttctcgctaaaaggatttggtttctatggcttttaaagcttctccgataaaatacttgcaacaagggaactctctcctcctacactc

SEQ ID NO: 643294 - DNA, 807 bp, Homo sapiens
  misc_feature (188)..(188): n is a, c, g, or t
  misc_feature (191)..(191): n is a, c, g, or t
  misc_feature (316)..(316): n is a, c, g, or t
  misc_feature (343)..(343): n is a, c, g, or t
  misc_feature (439)..(439): n is a, c, g, or t
ctgcgtggggtcccgcgctgcagccgagaggccccccaggccgcggttccggagcgggaaagtccgcgcgggggcggtggcctcgggggcgggacggggcgggggcgggggcgcgggcggcgagccgaatcccctccacgggacgccccgtgctgctcgggaagaggcgggccctgcgcgcctgcgcncgncatggcggtttgggcggcgacgtgagcggctccgcggaccccgagcggggccccggccgcgacctgagccgccgccgagcgcccggggccatgcgaccgacgctgctgtggtcgctgctgctgcntgctcggagtcttcgccgccgccgccngtggccccgccagaccctctttcccagctgcccgctcctcagcacccgaagaattcgcctgtaacaacgcagagcaggtcctgagttgggagccangtggccctgagcaaatagcacgaggcctgtgtctaccaagtgcagtttaaatacaccgacagtaaatggttcacgggcgacatcatgtccatagggggtgaattgtacacagatcacagcaacagagtgtgacttcactggccggccagtccctcagcaggcttcccaatggatttcaagtgtcactctacgccttcgaggctgagctgggaaccactccattctgcctggggttgaaaatgcctttggtttccacacacttatcggaattgtgatgccgggcctcacagaaaaactttgaggttggacccaggagaaggtcctcataatcaggtctcctctccctttgaaatgctgaaacaccacgg

SEQ ID NO: 643295 - DNA, 258 bp, Homo sapiens
ctccgcctcccgggttcaagtaattctgccttagcctactgagtagctgggattgcaggcgcccaccaccatgcccagctaacttttgtatttttagtagagacagggtttcaccgtgtcggccaggatggtcttgaactcctgacttcagatgatctgcccaccttggtctccccaagtgctgggattaaaggtgtgagccactgtgcccagcccagtatttttttgtttgtttttaccgagatggagtcccgcccc

SEQ ID NO: 643296 - DNA, 837 bp, Homo sapiens
gggtctcccagtgtctagatgaatgcaacatgatgatggtgaatgatgacgatgagtttagatcatgtgttcattgtattgcctattagggctgagggaaagggaaggtgtgttggatgttctccccattatgccccattctgtctttctatgaggtgactatacaccacatgtaatgacgctagtgagctaatattgacttcccaagacccttgtactcttgggctgcagtttgaggctcatgtgtcagatctgactgcattgcgttgcgtaggatctggtatctgaagtgttggattccttgttccaggaattcaacattagattctccaatagatgtatcatggggacttgtgactattgacaagacatgtaactctatgtgtcccgagtttatcggtcttactcatttagcctgctctagtacttatcgggatgggtgtgtgcgtgcgtgtgtgatgtcacggctgccacgtaacaacttgcgagaaaatatcttaaaaagcagatccagtcctgttcttaggatgctcgtatagcgtaagtagaattgttcgaagtggtaacctgtagtataagatggtcttgtttaacgatattttcagtgttgtcttcgagctgctgaaatatgctaaatctggttaatcacgttatcctggtattatttgcgttaacttgtgccggttacacagtggtttacagcgataacaattgccctgggttgatgcacatgtagtgggcaaccagaaggggattcttccaagctgttaacatgtcatggcacggcattttgtgagggacctgtgtatcctttacagacaaacatcagcggttact

SEQ ID NO: 643297 - DNA, 110 bp, Homo sapiens
gactacattacttagttgtgttttatacgtggctggtaatggctttttctttccatatttagcgcttccttcaacagctcttgtaagaacacagttctctacttttccgg

SEQ ID NO: 643298 - DNA, 354 bp, Homo sapiens
atataatcaaagcgctggtaaataatttaaagaattgcctcaaaggatttgcagactagaaagagactcccttctctggtttaaggtgggagaaactgttttcattgtctttcccccaagatattttattcaggagtgtcccacacgggcttgaacttataagtggctgcatttttctcactatactctcatcccctctttcctttattgattctttttaaggatgctgtcggcaacatttatgtccaactttctgttcatctcagatctgtgccccctgctctttagatcaatgagagagtgcagggtcttggctgctgagatgattcatcctattagctctttccagagggt

SEQ ID NO: 643299 - DNA, 314 bp, Homo sapiens
tttgggttttgggtccccccctcccccccccccggggggtgggttttgtggggatcaaactttgtggcttttttttaaaaatcccgacccctgctttgggggccgcccccccctccccagggggttctttttaagccctttgccccttgggcccagggaccccagtggttgggcccccccagggccggggggcttgggcctttccccttttccccggggtgggggggggggatgggggtttcccctccccccccctgggggtgtttccccctcccctttattttccccgggaaaattaaccggggggactgcca

SEQ ID NO: 643300 - DNA, 197 bp, Homo sapiens
ggggttttcccggaaattccaaaaactctttttaaagggtgggggaaaaagcccccccccttttgggagtttttaatttttattgttttcccccccgggcaaaaccctttttttccccaaaaaagttggggtttggggggggttttttttttttggtttggttttggtttttttttttttggggtcgggggggggta

SEQ ID NO: 643301 - DNA, 220 bp, Homo sapiens
ctgttttaccgtccttgtccctcgtgtacataactcctgctcgagcctataacccctcatccatctcccttgagagcgagaaccttattttgcgaacgtcagaatgcctgcacccagtaattatatcatatgactaattttttcaacccaattcacgccgaggtgtcagggatgatcacatcttggagtgtgagtgttaagattcagacattgcccttga

SEQ ID NO: 643302 - DNA, 336 bp, Homo sapiens
gaggaaaggatatgttctttcaactaatggggctgggataagtggatttccatttgaagggaaaaaatggggactttttttaccccaagcccaaaaatttaaatgcaaaacctaaacttttaaaccatttaaccaaaaccaagggaataaaatttgggaccttgagttacacaaagatttttttgtttttccaccaaaagtagaatttaaggctaagtgcagtggcttatgcttgcagtcccaacactttgggaagcaaaagtgggcaaattgattgaacccaggagttcaagaccagcctgggcaacatggcaaaaccccttctttacgaaaaat

SEQ ID NO: 643303 - DNA, 81 bp, Homo sapiens
tgtgccagcagccaagagggactagcgggagcgtcgcagtacttcgggccgggcaccaggctcacggtcacagaggacctg

SEQ ID NO: 643304 - DNA, 224 bp, Homo sapiens
  misc_feature (67)..(67): n is a, c, g, or t
gtttacaaaaaaaaaaaaaaaaggtcttttttttattaaaaaaaaaaactttttgtggggggggggnttttttttaaaaaaaaaaaaaaaaggggctccttcttgggaaaaaaaaaaaaaacaacccccccgcgggggattttttttttgggggggcccccccacaaaatattttaaacaaggtttgtttttataacccccggtttttttaaaaacttttccta

SEQ ID NO: 643305 - DNA, 241 bp, Homo sapiens
ggatccccaatacgcttgcgcacaggagcacaagctacctcctgccagctgccatcctgcatacactgagcattgaaggcccgtttcttggacttccgagaggatccaggcacatggcatccaggcttgcatctggatttgcagaaggagcccaccttgcgcttattctctacgcaccgggcgccctgcaggcctgcatggagcatggactgtggtccttcccagaggccctgggcgcaag

SEQ ID NO: 643306 - DNA, 170 bp, Homo sapiens
taatctactcattgcgcaggatgaaatcaatgagctccagttctctctcgcagaggagctggtatcgagtcgtgaggcggaccggcggagcaggggattagcaggtccagctcactgtcttagccgagcgaatgtcatcatcatgatgcagaagcctcgggtatcagggc

SEQ ID NO: 643307 - DNA, 423 bp, Homo sapiens
  misc_feature (69)..(69): n is a, c, g, or t
  misc_feature (221)..(221): n is a, c, g, or t
  misc_feature (335)..(335): n is a, c, g, or t
  misc_feature (337)..(337): n is a, c, g, or t
  misc_feature (357)..(357): n is a, c, g, or t
  misc_feature (367)..(368): n is a, c, g, or t
  misc_feature (380)..(380): n is a, c, g, or t
  misc_feature (417)..(417): n is a, c, g, or t
aaaccagatgggtggccctgaaaccccgggctctggaaccctattaggctgtgcctgccatagggaaanattggttccgttccatcctttcccaaacctcagtttcccctctgttcctaaaatggggattccagtcattccagtagtcctttatcgagcaattacctgtactcccaggcattgttcctaggtacatgagattcattaacaaactaaacagntaaatattcctgccctcacagagttcccattctaacagagggagacagtccaaaaataataaatatactacattagaaaattatataaaattacagaatgtaggccgggcgtgngngcacgcctataatcccagcnctttgggacnngaggccggcggntcacaaggtcaggagatagagaccatcctggctctcncggtga

SEQ ID NO: 643308 - DNA, 333 bp, Homo sapiens
cggcacgagggattgttatattctcttgctcagttgacctctttattattatatagtgaccttatttttctcttcttacagtttttgtcttgaaatctattttgactgatacaagtgtagctactccagctcttttttgcttttgtcgccatggaatatctttttttcatctgcttattttcagcctatgtgtgtctttataagtgaaatgtgtttcttgtagacaacagataattgggtcttgtttttttatccattcagagccactctgtgtcttttgatttgagagtttagtgcgtttccattgttattaagaagtaaggatatgttctg

SEQ ID NO: 643309 - DNA, 101 bp, Homo sapiens
agacacaccgacatctgacacaccgacattagacacaacgacattagacacaccgaccattaggacacacacgacattagacacaacgcacattaaacaca

SEQ ID NO: 643310 - DNA, 419 bp, Homo sapiens
acatgctgggaaagagggccgaggaaacgatcattcatgtaccatgctcctgaaaactacggccatagagcagcactggaagactgcattggcgagatgttcagtttgccttggggcttcccttctacccagcctacgaggggcagtaaactctggaggagaagagcctgtcagctgaaaatcatgcagtactttacccacttcatcagatcaggaaatcccaactacccttatgagttcacacggaaagtacccacatttgcaaccccctggcctgacttatgtaccccgtgctggtggagagaactacaaggagtacagtgagctgctccccaatcgacagggcctgaagaaagccgactgatccttctggtccaagtacatctcgtctctgaagacatctgcagggggatcctcta

SEQ ID NO: 643311 - DNA, 300 bp, Homo sapiens
gactcgaggatccccgcagcttctcccatcagcctactcaagcgtgagacaacaatgaggatgaagaccttaatgaagatccactttcacataaggaatagtaaatatattttctcctccttatgattttcttcaaagcatttacttttctctagcttacgttatagcaagaatacagcatataatacatatacaaaatatgttaatcaactgtttatgttatgggtcaggcttccagtcaacagtaggttatcagtatttaagtgggggggcattaaaatgcatacacagatttgacta

SEQ ID NO: 643312 - DNA, 421 bp, Homo sapiens
  misc_feature (10)..(10): n is a, c, g, or t
  misc_feature (54)..(54): n is a, c, g, or t
  misc_feature (415)..(416): n is a, c, g, or t
  misc_feature (419)..(420): n is a, c, g, or t
gtccccccanacctaagtttttttagcaaaaaattagaaataaaatatgttttnccctttgggaaggattggtataaatttcagccccatcccatactcctagaatccctcttcagatattaaaatatttgaaaaattaaatgtgggcccaggtgtggtggctcacacctgtaatcccagcattttgggaggccgaggtgggggcatcacttgagcccagttgttcaagacaagccctggccaacataacaaggcctcatctctacaaaaaaatagaaaaaaatagcctgtagccctagctactcaggaggtgggaggatcacatgtgcccaggagtttgaggctgtagtgagtcgtgatcgcactactgcactccagcgtgggtgacagagcaagatcctagctcaaattaaannttnnt

SEQ ID NO: 643313 - DNA, 867 bp, Homo sapiens
gacactcgcgcacactcgcgctcgggcgcacacggagcaggaccggcgcccggagcgagccaggagcggtaaccggggacccaccgcgcgagccagctagctgccaggagcccaacccggagaccagcccctgagccccgaagccggaccccgtgcgcggcggtgtccccaccgacatccctgacccatggcgctgaagaggattcagaaagaatggagtgatctacagcgcgatccacctgctcaccttgttcagctggaccgtgtgggagatgacttgttccattgcaaggccacctattatgggggcctcctgatagcgcatatcagggtggagtcttctttctcactgtacattttccgaccagattatccttttaaaccaccaaagatggtttcacaacaaaaatttaccatccaaaacataaacagtaatggaagtattggtctcgatattcgtgagggtcacaagtggtcaccagctctgagtgtatcaacaacgttttatggtccatatgttctctactttggtgatcctaatccagatgacccttagtaccagatattgccaaactctataaatcagaccacgaaccataccaccagaccttgccaagagaatggctcaggaatattgccatgttacaaatcaaaaccttttcatattaccagagtctgtgacacctaggttttttccacattagcggtaaatgaggcgggtgctgctccttgtccatgaaaccttgttttccctttatgtgttcgcgccgacacaattcaaaacctagaggggagcctcactggtgcggcaaacacttggtgaacgcgccgctctccacaagcgacaccacttgcggtctcaccgcg

SEQ ID NO: 643314 - DNA, 124 bp, Homo sapiens
ttgcaaatcagtctctacagatgagctagtttccgtttgaagtagctcggttaggggacactacagtcagtcttgggggagctctagagtttcgtggtggaggaacttttccacacaggaagct

SEQ ID NO: 643315 - DNA, 402 bp, Homo sapiens
gtctactactactaaattaacacccgctcgacatagagtttagctcttactgcacagctgggagtgccgcctcccaggttcaagcgattctcctgcctcagcctcccgagtagctgggattacaggcacccgccaccacacccagctaattttgtacctttagtagagacggggtttcttcatgttggtcaggcttgtctcgaactcccaacctcaggtggtccaccaccttggcctcccaaagtgctgggattacaggcgtgcgctcacacctggccacactggtttaaaacttaacacagtctgggagcagtggtcacgtctgtaatcctaatactttcagaggctgaagtgagtgaatcacctgcggtcgggagttggagaccagcctgaccaacatgg

SEQ ID NO: 643316 - DNA, 422 bp, Homo sapiens
tttttaaaattcttggcttggcatggtggctcacgcctgtaatcccagcactttggaaggccaagctggaaggattgcttgaggccaggagtttgagaccagcctggacaacatgagacccccatctctacaaacaaaagaaaagaaaacaaaacaaaaatacaccccctctccaagtactccctctccacatttgtacatctggagaaggaaaaatcagatatttctgatatacgtttattttaattttgaattatttgtgtcaccaagctcagcttttgggaagacaaactcaaacacctataatttcatttatatttctcattcacttggaacctttctgcttaatgtaacctagaaaatgatcatttgtgtaacccaaaacttctaaaataaatggcttaatccttgcaatatgttat

SEQ ID NO: 643317 - DNA, 152 bp, Homo sapiens
gaagatggcgaaactgggtcgcagcggtttggattctcggcgtgtcgtgaagatcggcgacattggtttggggcttcggcgtgtgcagtctggacgttcggcgtgaagatcggcgacattggcatgctcagtctggagcctcggcgtgtgca

SEQ ID NO: 643318 - DNA, 409 bp, Homo sapiens
ggcttttaaaaagtaaatttattaccccacataataagtccaaaaagttgagaaattccattatgttatcaaaacccatgataaatctttaaatattttgatttttttgaactttacactttgttactctcaatatatggggctaatactttggccggttcctttgcaaggccttaaactttgtcccctgagcaaaaagccggggctgtatttacccaaggggctttgcgctgcacttttcataattggctcacatttaggacaaagctgccggtagaaacagggagaaaaaagccgttggatatgtcccttggtttcacagctccttaaaaaacgcgagaattaattacctgggggatctacactattctgaatgccaagagggagccatcaccagccctttattatt

SEQ ID NO: 643319 - DNA, 1747 bp, Homo sapiens
  misc_feature (242)..(242): n is a, c, g, or t
  misc_feature (1563)..(1563): n is a, c, g, or t
tacgaggatgtcccgcgtgactgacaactgagctggatcacgcctgtgggtggtggtacaacctccatcgcacacgtttggctgctgcagatagaacaggcccggcgcggtctcatcgacagaagagagatccaaacagcaaggggggggaagatgagcacccgtcgcccctcgtgccccgacgatggggaggcacggcggggtctgtcacaacacaaccagcccgcgcctgagtggggggntgacccacctcgtggtccgccacgacgatcgacagcggtttcttacgccgcggggggagtgtaaataaattgctcgcgctggagaatgccgccccccaccggagaaccttcttggggggggagaagacccttcttcttccgcttgggggcggaaacaaaatatgggggccctaccaaaagtgtgcaccagaggaaagggtgttctcttgacaaagaggagaggttctctctcccgcggggggcaaaagccactgctgcttcggggtgagacccaccccccgcgacaaatgtgtggggctccccccccccctctgtgggggggaagcccagcaacctttggggttgttatacaacaccgtgcgtctactagcgagggtgagtataaatttctccgcggtcgagacccacttcctcaccggcggccccccaaatttattgggtcgccctcccggtgcggttaaatttgctccccccgctgtgtatatatttgggggagtgtgttccaccacccccccacgggcgggattcatcacaacttagggtgcaaatagacgagcagcaggatgtttgtgtgccggctaggagagtccttgtatgacggcgggatatacaacggaaggtttgtagttctcccccgcccttcttctctgggggtgtaaacagaaaagaccgtgtggagacagaatttggggcccccccctcataaatttctctgtgaaaagcttctctgggagagattcctgccccccactgtggcgttgagaaaaatggggttctccccctgggcacaacaggcgccacatgtggggtgtgtgtttgagagagagacccttttctctcacaggagacgtatagtccccaccccctctgtggggggtctccctcttatttgtccgctgtgtctccgtgggagagataaggagagacacacagacacacagctgttccccgctgtgtgggggcgtgcacacccacacaagcacacgctggggagcacacaaagagacagggcctcgcctcgggagacgcctcgcgctcacacgagtgccaccgcacacagtgtctcgcgcctcaccagagacaggctctcacagagagagggctcatatatggagagtaatttatatcctctctattatacctcggccacccccccacactctctctatgatcacacagtggggtgtggagaagacacacggtgtctccacagagacactcgtgtttgtgtattcacaattggccacatcttataagtgttaagtatggtgtaataagagctcggtgtatatcgagtaaccacacagcacttcgttaaacnctctcacgaaaggaaaaggagagaaagttttgtgggccacctcttggtgttttctctttttgcgtcgtggcaccttttaaagtatctaagtgttttaaacaatcacggacttttttatgggaaccaccttggccccaaatttgtccccaggattttggggccccctttaaaaagtttaaagaga

SEQ ID NO: 643320 - DNA, 1402 bp, Homo sapiens
  misc_feature (360)..(360): n is a, c, g, or t
cgggcccgggtaggacggtcccggactggccgtgatctcagcggtgtccaggtccggcgtgactcgaaaccgccggataggcccgcactggtggagtcggcaagagctgacttacggcgcggcaagtgccggccagtgccagcgagcgcgacgtcgctcgccaagcccccgtctctatggcaaccgagtgcgtctctaggaccgccacggcgcaggcgcccggaggctaagccgctcggaacctagctgcgccacgcagggtaggcgacgcagacgctcccgcgtgacgcacttccggtgcttgccctgcccatccccgtgcggtgggcgtggccatggcgggggcgctccggccggcgncggcccctgggctcccgcccttcgggtcccacagtttccagccgccgctctcctcagtgcccggtggcccaggagggcctgggagcccgaagccgtccccgagtcgctcctaggtcactggcgcgatgcgggccgtcctctcggctgatgggttggaagcccagcgaggctagaggccagtcccaaagtttccaggcatcagggctgcagcccaggagcctcaaggcggcccggcgggcgactggacggccggacaggtgagctcttgatcgtccgcggcctgatagtttgcacttggctctcccactttggggctccgtggaagccacgtcagagaggctgtgtttgtgtctgagcatgcatgcgagtggaggggagtggtgagtaatcccgcgtctcctctctgagttcggaacccatggaggaagaaagcagaggtgccagacaggcctctgataggcacctgcaggattggggcagagcggccgcagcgcaggagcgccggcaagcctggcccttcccgggaggccccctttgtccggttccaccctggcctgttgcctcacatgcaacaagtgtctgaatgtggcgctctcctggccgagggcagccctgggcggtgagtgggatgacaccccagcctgcagggtgcctgtaggtctccacccagatgggcaggattggaggtggccgcagcgctcgtgggctttccctcagcaggtgtctccatgctggcctccccgcctcagggcttcatcccactccgtgggcctgatctccctggggcacctgggatgtccatctgcgttagctggagctactccatggcctgtggcgtgccacacacagcggcatttcggtgtcattaggcacagctggaggtgcaaggaggagggcagcctcatgtccagttccatgtaacttgcttcttctgaataaaggcaatttgctaactttctcgctaaaaggatttggtttctatggcttttaaagcttctccgataaaatacttgcaacaagggaactctctcctcctacactc

SEQ ID NO: 643321 - DNA, 1053 bp, Homo sapiens
ggagagagagagagagaactagtctcgagttatttttttattttttggggtgttaagcttaaaggtctataaaataggtgggaaaaacaggccaagtgtagggacctgattcctgcaaggggcctacgggaagccctcgtgcactcaagcagaagccccatccaaaccaggagtgtggtgttctgattctccgtggcaggcagggctgaatagggtgtaggagtggcgtcgtgttctccttggcagtgtgggctggctcagaggagaaacagcaagcttccgtgctccgttctcacgtggtgttcgtggggctcaccattagaaccagcgttccgtgacaattcccgtcgtgaattctcttcagtggggaaaagcccgtggaaccttcgtggtgtggttgttcccagcgtgggttgggttctcaaggtgtgcatacccacgtttggggaccagctaggccttgcagggaacagggccagaagggacacctctcagtgggagactggaatcttaccttccttcaggaggtctgcctccagggaaaaacctggggtcctatcctgcgctcagggctggctggactgtacctgtaacatgcagtggaagacattccagaagaattcatacggagaggaacatgaagcctgtgcacgagggcagcttcacaagctgggggacaggcccttgaagaagcccagggcgcctacctttggtagcacctgcttgggcacagtacattgaggcccttagtaatctccgataccttgggcaaaagggcacgctctgagcattgctcaaacccctcaaactctgtaagcccggttctcagcaacacgtgccccacggagataatgctaccggggactctgcagaagtgaaccacacgctccccagtggccccaaaaacgacaggattctgggagcgaccccacataaacctaccccaatacggggtggacatggggcccaatgtgtcacagaggcctccaacgcacacctgtacacagaaagaactgcacaccgcgcagcacggcgacaacatgccgaccacaa

SEQ ID NO: 643322 - DNA, 297 bp, Homo sapiens
ggcagggcacgcactggccccggcgcccacccgcacccctccccagagcactgacacggctcccgggacctcggcaggatggaagagaagctgaagaaaccaagatcatctttgtggtgggtggcctggctcaggaagggcacccagtgtcgagaagatcgtccagaagtatggctacaccacctttcaccgggacctcctgcggtccgaggtcagctcaggctcgccagggcaaagagcttgcggaatcatgaagaagggcagcttgttccattgagacagttttgacatcgtccg

SEQ ID NO: 643323 - DNA, 1071 bp, Homo sapiens
  misc_feature (360)..(360): n is a, c, g, or t
cgggcccgggtaggacggtcccggactggccgtgatctcagcggtgtccaggtccggcgtgactcgaaaccgccggataggcccgcactggtggagtcggcaagagctgacttacggcgcggcaagtgccggccagtgccagcgagcgcgacgtcgctcgccaagcccccgtctctatggcaaccgagtgcgtctctaggaccgccacggcgcaggcgcccggaggctaagccgctcggaacctagctgcgccacgcagggtaggcgacgcagacgctcccgcgtgacgcacttccggtgcttgccctgcccatccccgtgcggtgggcgtggccatggcgggggcgctccggccggcgncggcccctgggctcccgcccttcgggtcccacagtttccagccgccgctctcctcagtgcccggtggcccaggagggcctgggagcccgaagccgtccccgagtcgctcctaggtcactggcgcgatgcgggccgtcctctcggctgatgggttggaagcccagcgaggctagaggccagtcccaaagtttccaggcatcagggctgcagcccaggagcctcaaggcggcccggcgggcgactggacggccggacaggtcccgagcagccccgcccaacatggacccagacccccaggcgggcgtgcaggtgggcatgcgggtggtgcgcggcgtggactggaagtggggccagcaggacggcggcgagggcggcgtgggcacggtggtggagcttggccgccacggcagcccctcgacacccgaccgcacagtggtcgtgcagtgggaccagggcacgcgcaccaactaccgcgccggctaccagggcgcgcacgacctgctgctgtacgacaacgcccagatcggcgtccggcaccccaacatcatctgtgactgcctcagcgcctgccccatctgccgccagcccatccgcgaccgcatccagatcttcgtgtgagccgcgccgtccgccgcgcccgagctgccttcgcgtgcccccgccctgtgttttataaaaagaaagattctcggaaaactacagacaacaacg

SEQ ID NO: 643324 - DNA, 481 bp, Homo sapiens
  misc_feature (481)..(481): n is a, c, g, or t
atttgaacgtagacggtgtatatttccttcacaacacaccgctgataagacgtggtggtgggaagtacttttgtacccatacctcatgaggtgatagaggaaaccggccgggatcttctaatgacctggggttggttaaagcggtcttagatttggcgccaaatgcacagcggacaaaagaagcaaaagctgttgggcgcgacatgaaacgggaaatctgttgtgcagcaagggacacaatgattaggagcgaagggcgcgatacatgttgggcaacacgcctttacgaggaaactccttaggcattcttcccacaggatagcaagacctcgccacctgtccgcacggagaagggattgtaacagctagactgaaaagtgggtaaaagatctgaagctttctttctcgagggaatgatcccattcggctcagaacctttgaaaagggcgcccagcccttcaactccccaaggagaaccccn

SEQ ID NO: 643325 - DNA, 197 bp, Homo sapiens
tgtcgtggctgctgaaatggtggtggagtcggagatgctcatgccgacggtgttcaccaggtatttctgcatataggtggtgtaggtgtagaacgccagggtaccgcccatggtcaggccgacgactgtcatcagttccttggggtggcgcatcaaggtgcgcatcgcgctttccttggctttttctttcttggtga

SEQ ID NO: 643326 - DNA, 205 bp, Homo sapiens
tgtcgtggctgctgaaatggtggtggagtcggagatgctcatgccgacggtgttcaccaggtatttctgcatatagccaaggcaatcagctgaatatgccggttcttcaggccacgcttgaggcccaccgggttaaccatgtcatccgccattaacattcccttctacttgtttttttcagggttgatcgcacaccgaaccagcc

SEQ ID NO: 643327 - DNA, 1594 bp, Homo sapiens
  misc_feature (145)..(145): n is a, c, g, or t
  misc_feature (219)..(219): n is a, c, g, or t
  misc_feature (432)..(432): n is a, c, g, or t
  misc_feature (450)..(450): n is a, c, g, or t
  misc_feature (571)..(571): n is a, c, g, or t
  misc_feature (648)..(648): n is a, c, g, or t
agggcgttcgtactcctacattgttcccatactaattcggcggtggagtgcctaatggttactgaaaaccgagcatacacttctgtatgcttagtatactcatcgtactgaagatatcgagcccgcaaacctcgtatgtctatgngctcgccatagcgcggtcatacgtacgatatccctattcggcatgatctgccgactataaacctcgtatcaagncgcacacagaagcacactttgaaacagcactggactagaatcgtactactccacccgtcgtatacttgaccgtgctgccgaacccttgaggcgtcttcaccagtctgcatcatgtatacgtagtgcaatgctgcctgttcctattgaccgataactcactggcgtctaaacacctagaatcctctcaagaatccctaattgtattcgggtgancacaagcccgcgtggccntgtggaagccgctttatgtgcgaccactgtacatgccgtgcgggggcatcaagcgatgcgagacgcgtgcgaacctgacgctgcacgtgcagtcgtgcgtacagcgtaaacgcactgctancgagcacgcaaatccagacatatgtagctcgcattctcaacgcattcacgtgaatgcgatttgcactaggtgatatngaccatttgacccaactaacccgttgcgttccaactctcaggcatcggcgcgaagggctttggctccctagacaagctgaggcgggcgcctgggagttgaaatggacctgtgtgcgatacgctgggccgcttgtgttgtcatttccttcaatcagagtactaaatctttgccccttcttaactaaacttttaagaagtaaacaacccgaacgcgcaccaatattgggaagccccccggaacgggaaattcatgacctcccccttaggactgaaatttcttggaagggccattcccggaagaaatgcggtgggtaaccggaaccccgcccccgtggaaacactctggaaacttgtcttttgtatacctttttaccattcactctcaaacaaaacaatgtgggtgcatgcttccatccaaaaagtccttggcaaaaaactgaaggctggacagggcgcggaactgtggtgagacgcggaaatccccacccatgtgtgtgtttacccggactcactcgggtgatccccgaatcccaagggaagggagcacaaggaccagagatgtggacccagggttccatcccaaggggcggcagttgagattgatgtaaccccccattctatttaggaaatctctgtgccgttcaacgaaaacaaagacgggggagaatttagtctctaccagaaaaaaaagccccgtgaagggagcctgtaaatacacatgtatgcctccccaaacacactattaatttatgacgggcgggcccccgcccttggtgttgcggcaaccccgaacgatgagggcgactgactgctacccgtgtgaagaaataaaacccctcgatgatcggagtcggataacagacgggtcgtaatgacatgctgaacaaacaaaagagcgggctcggagtttacagcctgatgctacgataacacaagcgatatgagt

SEQ ID NO: 643328 - DNA, 163 bp, Homo sapiens
gccgggttaggaaattattttttaatttacaagacaggttttaactccgccggggtgggaaatggtgtccctttcccccccaaagcacagggcccagaaatgaggccgtttacatggcgggtctccgtgctggtgtttaagtcattaaaaagatacccaaaga

SEQ ID NO: 643329 - DNA, 142 bp, Homo sapiens
gggaaaaaaggcttccccccccggggggggaatttttgaaggggtttttccgggggggggaagggtttttttaaaaataaccccaaaaacttacccgaaaattggcgggttttttgccaaaaaaaacccttttgggggccca

SEQ ID NO: 643330 - DNA, 546 bp, Homo sapiens
  misc_feature (239)..(239): n is a, c, g, or t
ctctagtcagaagcaacagagttgagtgggtatataagatatagtgtctatttttaatgctatttttaatgagaaattcaaagttgcttgctaaaatggttaatgtgatagaaattagttggaccagttaggtgaataaatatcattctaactcattaggagaaaaaggtcaaattataaaagactaggaccattctgttttagaagatattgcttttgatctgaagaaataatttggnttttacattttcatgccacctaaagtatgctgaattatttcttcgatacacagattacttgtgggtgaaatatcctccagaaatattacaattacatgagttgtttgctggtagaaattgtagcctttttctgattaatgccttcatttctttgattttatttataagtatactttgtttccatttatggccttgattcatctgcaggttttcttgtgcccaagtcctctctggtgattctgatagtacatttgtttttcccctctgatgattctgatagtacatttgtttttccccttagtggtca

SEQ ID NO: 643331 - DNA, 306 bp, Homo sapiens
tgggaggctagcagtgcaggagctatgatgcaggctctcaggagctacctaccctgcccccgccaggcacccaaggctgcactgcaaacaggcactgccaggctggggccctgggagaggccagcagactgaagcgtgctcaggatctgactgaccctatctcatgcgcaagattactttgcagggttcagctctgatatttcccctaaagacaaagtctcctatgggagcaagttgaccctagggaaatgggtgtccctggccatacaccactaaagatgctcccgcacaaaaccctctgagctc

SEQ ID NO: 643332 - DNA, 796 bp, Homo sapiens
  misc_feature (1)..(1): n is a, c, g, or t
  misc_feature (67)..(67): n is a, c, g, or t
  misc_feature (69)..(69): n is a, c, g, or t
  misc_feature (99)..(99): n is a, c, g, or t
  misc_feature (168)..(168): n is a, c, g, or t
  misc_feature (173)..(173): n is a, c, g, or t
  misc_feature (182)..(183): n is a, c, g, or t
  misc_feature (200)..(200): n is a, c, g, or t
  misc_feature (212)..(213): n is a, c, g, or t
  misc_feature (216)..(216): n is a, c, g, or t
  misc_feature (224)..(224): n is a, c, g, or t
  misc_feature (227)..(227): n is a, c, g, or t
  misc_feature (229)..(229): n is a, c, g, or t
  misc_feature (233)..(233): n is a, c, g, or t
  misc_feature (235)..(236): n is a, c, g, or t
  misc_feature (238)..(240): n is a, c, g, or t
  misc_feature (255)..(255): n is a, c, g, or t
  misc_feature (260)..(260): n is a, c, g, or t
  misc_feature (284)..(284): n is a, c, g, or t
  misc_feature (297)..(298): n is a, c, g, or t
  misc_feature (303)..(303): n is a, c, g, or t
  misc_feature (306)..(306): n is a, c, g, or t
  misc_feature (312)..(312): n is a, c, g, or t
  misc_feature (314)..(314): n is a, c, g, or t
  misc_feature (325)..(325): n is a, c, g, or t
  misc_feature (349)..(350): n is a, c, g, or t
  misc_feature (355)..(355): n is a, c, g, or t
  misc_feature (362)..(362): n is a, c, g, or t
  misc_feature (367)..(367): n is a, c, g, or t
  misc_feature (382)..(382): n is a, c, g, or t
  misc_feature (393)..(394): n is a, c, g, or t
  misc_feature (400)..(401): n is a, c, g, or t
  misc_feature (403)..(403): n is a, c, g, or t
  misc_feature (405)..(405): n is a, c, g, or t
  misc_feature (414)..(414): n is a, c, g, or t
  misc_feature (417)..(417): n is a, c, g, or t
  misc_feature (420)..(420): n is a, c, g, or t
  misc_feature (424)..(425): n is a, c, g, or t
  misc_feature (428)..(428): n is a, c, g, or t
  misc_feature (436)..(436): n is a, c, g, or t
  misc_feature (439)..(439): n is a, c, g, or t
  misc_feature (451)..(451): n is a, c, g, or t
  misc_feature (454)..(454): n is a, c, g, or t
  misc_feature (459)..(459): n is a, c, g, or t
  misc_feature (476)..(476): n is a, c, g, or t
  misc_feature (634)..(634): n is a, c, g, or t
  misc_feature (637)..(637): n is a, c, g, or t
  misc_feature (642)..(642): n is a, c, g, or t
  misc_feature (644)..(644): n is a, c, g, or t
  misc_feature (649)..(649): n is a, c, g, or t
  misc_feature (654)..(654): n is a, c, g, or t
  misc_feature (658)..(661): n is a, c, g, or t
  misc_feature (678)..(678): n is a, c, g, or t
  misc_feature (774)..(774): n is a, c, g, or t
nccccacatcaaccccttcagcccccttcaggcccccagcgcaggcccagggcctggagcttctgcntnaggtagctcttgagctggggcaggcctctntgggactccagttcctcgaagggtagcggcaggagctggtagcccatcaggcctaggtgccgctccctnagggncctcgagcnnagcagcacccgggggtnccggagaaatgnnagngttcccgnaanancagnannannntggagggggagggangtggnttagggcatggggggcaaggtggnagggctcccccannctgcntcntttacntntggggagggtntggagtagtgggggtagagggagnntgggntgtgggnaggangttggtgggtatggnaggaaggggtnntgggtnntnangggaagganagnaanaganntgntggcgcanagnaggaagtctggnggngagcngggcgggccgcttagcnagggctctgttttttcgggcttgctgcttgttccttggttatttgtggagtagcttggaggcacagtcaggtcctggcggtatttctcctcccccagcagctggcgcaacccctcacctactatgtccttgtgactgaggagaaaggacaccagtagnagnaaaanancggcnccccncccnnnnttgttccagtttagtgncaccaccctggggaaagcctctgctgcttcagggcccagttttatggtggccgagagctccttagctttggcgcttcatggtccctctggcttttncactctgctggtcccaggctgg

SEQ ID NO: 643333 - DNA, 445 bp, Homo sapiens
  misc_feature (21)..(21): n is a, c, g, or t
  misc_feature (27)..(27): n is a, c, g, or t
  misc_feature (46)..(46): n is a, c, g, or t
  misc_feature (63)..(63): n is a, c, g, or t
  misc_feature (75)..(75): n is a, c, g, or t
  misc_feature (138)..(138): n is a, c, g, or t
  misc_feature (333)..(333): n is a, c, g, or t
  misc_feature (434)..(434): n is a, c, g, or t
  misc_feature (437)..(437): n is a, c, g, or t
  misc_feature (439)..(439): n is a, c, g, or t
cgtaccaaaatttgaccaggnaaaccnaccgtgccgtcccaggaancctcttgccaatggcgncgctccgttctncctgggtccgtcgtccggcacgatgaatcgcgggtagcaggccgtgctgggcttccagcggtncgtgtcattctccgacctcgtccttgatttcttcgcgggcctgttgatactccgatatcaaggtgccgaagtaggtgagtatttccgggtcccccaccggctgccagtccggcgcaagcagtttggtgtaccgctcgacatagagcagctgcttgcccaccaggatgaattccttggggaggatagcgtccattntcgcgccccaacgcggtgagctgccggccgatcgtgccgtaagagatcttgcccaatgaggtacccatgggacgggtgaccttccggagcgactcggcganccntntgcggg

SEQ ID NO: 643334 - DNA, 1228 bp, Homo sapiens
  misc_feature (337)..(337): n is a, c, g, or t
tctttttccggcccgttcttctttcttccttctcttcgtgtttttctcctcttttgtttttcttttcttctcctactgccgccttgcttttctatctcttgctcgcttctgttggcacctctccttggttcttctctctctttttctgtcccattttctgtgtggtctttctggtccgtctttcttggtcgtgttgttgccgctatttatctcttttttgttttgcttttttttctttgttttgttttttttttttattgtgatttttttttttattttttgttttttgttttgtttcgttcttgtctgttttgctttttttcttttttatgaggangagagatttagaaacaaaagaagagaagcgaatacaaggagtccagtgtcgctgaggcttcttctgcacaaattctgtcagcgcctgcccgagccaacaacgggtggggttttactcccggtctctcctgggttgtttccgcaagttcgcctctcggccacacacctcctgttgctctgcatggtttttccccgccagctatgaactccggtgtttccgacggccagatagaaaactggggtgggtccacaggcctgattcagatgggactggaccgtccagacctggtgaagctggaaaccagggtcctcggatggagaagtttacacctggcccagtggggcaccccagtgtgatgagccctctgcaccagatggaaatggagagccccgtctgaatctggcaccgagccagatttctgagtggatcgcggggctttgtgctgggcctgctcttccttggggcccggttgttcatcgtaacttcacggagatcacgaaaaggacacactctggaacttcacgcccaccacggagtttctgagctgaaagtgaagatgagccaaccactttccaagggaaaacctttctgccccagctttgcaggatgaaacactttccccgcttggctctcatttgttccaaccagagagaccttttctccggacctgggtgctactggttgcagccactctgcaggaaaagtgcctcccctcgtgggctgcctcagctcaagcctttggcctgaagtcccagccttgatggcagcccctcattttcccagattttgttgcgtcccctttacactaacagctttctgcctcccaagcatctgttactcctcctgtgcccaccaacaccattaccattattaaattgtttttccaaacca

SEQ ID NO: 643335 - DNA, 170 bp, Homo sapiens
ggtttaagcagcttcgtagatttattgatctacatggcattgattgatttgaccattatacctgacataattcttcagtgtttgcctttgagcagtgataggttgtgtatttttggattgcctagagagcatatataccacacactacacacacttcatatctacagcgc

SEQ ID NO: 643336 - DNA, 186 bp, Homo sapiens
tggagcatgaagaaatttcgggggtgattatcctatcttatttggggtgatatttacatagatgcatatatttgtcaaaactcattgaactgtacattcataaacataaaatacataaaactggtatattttattttatgtaagttatacttcaagttgattttttaaaacatgcccggttacatg

SEQ ID NO: 643337 - DNA, 165 bp, Homo sapiens
  misc_feature (3)..(3): n is a, c, g, or t
ggnttcagcatgtctgaaagctggttgtccccggtcctctaggtgtgaggacactctgagtgttatcccaggggcccggtccattcttcccatactgaactgtcgtgcattatacaaggtaccctggctgcttacccacttcaactactctgcaaggaacccacg

SEQ ID NO: 643338 - DNA, 112 bp, Homo sapiens
gaaactgggtctgtctgagtcacccaaattagtaatgtctgtgagttaatttactcatctgaaatgaagggtaataaaacctacctatttcacaatcggggtaccgagctcg

SEQ ID NO: 643339 - DNA, 891 bp, Homo sapiens
cggcatccatatgagacgacaataatggggaggtgaaccggctcctggagcggaaccctcaaggtgaatagtcaagaacaggggccctgctacgctggagagccctaccccgcaggaatgtacaacctcttcgggagggcaccttccgccactacagagaaaggtccacgctgaacatgctgactcccggagggcgcgacatgcaagccggcttctgctgtacggcgccttccggtgccattcacccgctacatgacctgactcctgagcaggacctgggcccggtgtcagctccccacaaggacttctctgtatggagacagccccagacccttttgtgtcccaatgcccaccctcccccagcgctgcagtgggcttgtgtgtgactgtgcagtcctcgtcagccacaccctccctgtttccactcactggaactggacagttcatgtgcacgcgactcgtgggatctcagccctgctcctgggagctggaagaacgcacttggagataccataagggaccacaccacttccgtcacttaccccctgcccacagaggcagagggcacagggaagaagccgggccaagcgtcggaattaatgtgccacaagtgttgtggccattcctgaactgggaagtccctggctggcccccgggggagaggggcaaatgcctcacgggagctgacactccaggcagactttgccttctctcgcctgtcatttccagatttcattacctcctgacttgccatgtcacccatcaatgtgaaagtcagggtcacagctggtctgtgtgtcgcagttccgctacaagcctgttcgttgttgggcagcctgaggctgttgcccgaatcatagttcagtttttgacttaactgccgttttccct

SEQ ID NO: 643340 - DNA, 311 bp, Homo sapiens
tctgttcggtaagtcgttgcgttcttccgcatcgcccagctctgatttgagatggagaggggcgctatgcggaatgtgccatccgatggcaggaagtgtgcggtagagtacgtttgggcaggagggccgatagcacatggcctgccagcccatcacagcaagggtgatgccagccctgtgatcatttaggacaacaggtctaaggtccttggtgaaccagagaacacagggacacagtacagaaccgatcgcttgtagctctcctggtattctgcttgttagtttccacccaaattattgctaatcctatc

SEQ ID NO: 643341 - DNA, 741 bp, Homo sapiens
  misc_feature (80)..(80): n is a, c, g, or t
aaagcacataccaaggccaccacacaccacctgtcaaaagggcttcgatacgggataatcctatttattacctcagaagnttttttcttcgcaggatttttctgagccttttacactccagcctagcccctaccccccaattaggagggcactgggcccccaacaggcatcaccccgctaaatcccctagaagtcccacgtcctaacatgacagtccgtattagctcgcagtcaggaggtatcaactcacctgagctcaccataggtctaataggaaaacaaccgaaaccaaataatgtcaacgcactgcttattacaattttcactgggtctctattttaccctcctacaagcctcaagagtacttcgagtctcccttcaccatttccgacgggatctacggctcaacatttccggtagcccacaggcttccacggacttcacgtccttcattggctcagactttcctcactcatctggctttcatccgccaactaatatttcactttagcatccaaagcatcactttggcttcgaagccgtcgcctgatactggcattccgtcgatgtggttagactatttctgtatgtctccatcctcttgatgagggtcttctatctccgttatcaactctcgggctcccctttcgggggcgggaggaggttgtgcttgccggcccttttgtgttccgccccgttttgtccctgggaatcgcggcccccttggggcaaaactggagc

SEQ ID NO: 643342 - DNA, 373 bp, Homo sapiens
atattggatgttagcttttaattaagatgacttttaaccatttgagtttctttttaaaaaatttttaagatctcgtcaacatatttcagctaggacaaatatctgctatttcagaagtaccaagtatcaaaccagaaaggtcttgatttaggaaccaaacccaggctgtcatggaaaaaagaagacagaaccttagctatggaactgcagttggggtgacaatcctttctctttcagtttggcctggctagcaaaaaggtggccttgttatgtaaataaatccccttaagtagtcaaaatcaatgaaactctcacccacccctttaacctcttgtctccagaccttctgggtatgtaaaaacacaacacaaca

SEQ ID NO: 643343 - DNA, 296 bp, Homo sapiens
  misc_feature (66)..(66): n is a, c, g, or t
cgcgcagagggtatagcctcggttgtctaggatagcctcagacgagtgtacagaacgtgtagtgtntgattcgtacttcatatgtgctccacgtggcaatcatcagcatgtgaatctcgtgctgcacgtctacgcgtcgtgctgccgattccacatctgcacctgcaacagagcgcctgatgtatcttgttgtgtgttgtttgtcttgtcatctgcttgtgtattcttgatgtctatagttatatatattcttcaattgtgtgtctctcgcgagagcacagcgcagaatatagttg

SEQ ID NO: 643344 - DNA, 129 bp, Homo sapiens
  misc_feature (23)..(23): n is a, c, g, or t
ggggggggccccccccccccccnccccgttttttgggttcggggggggggggccccaaaacccccccaaagggggggggggggggaaggacggtttcttttcgtttaaaaaggggctttccctttttta

SEQ ID NO: 643345 - DNA, 673 bp, Homo sapiens
cccggtttgaatgagcggggctgggagtgagcgggcggagcgcgagctcgaggaagagacaggcagcgcgcgtgagcgcgccttgtgtgcgcgcgcggcctgtggaggtcggacctccgcctggcgcggccgggggagggggaggggcaggttgttgatccccaccatggccatcacccagtttcgggttatctaaatttggtacctgcctagcaaccagttattctcattcctaagcgagatttattattgcagatctggcagaggacggaaatcatgtggagaccaaattaattggccaactacagttgattattcatcagttcctaagcagacagatgttgaagatgtggacctttccttgggatgaagatgcacccaaccagtgtaaagagatcgaaggagggactgggaattgttggcaacacaacaaaaatttcttgtggaacaacctggaaaccgtgacgtaattaagaggactttgacacccaacttattaggaaaacctcagaacactgtggtcattacaggacacgacgagaacccattgaaatttgtggcatcccagattgggacgcacaagggtttctctagctagattagcagcctacacaagattctgccttttattccatcagtcttctgaattaggggactttaggatcccttggag

SEQ ID NO: 643346 - DNA, 262 bp, Homo sapiens
atcttcgatctgtgttaatctgtaatttatagaccagctaactccctaacttggatctaggaatgcattagtatatagacctatgtacccatgcccagactttcatggcgcatacgtgggtatacgtctagtagatatgaaaacacacagaacagaagagatccatgctgacaaaagacgtgatacctcaatatacctagactaaactggtcctcgaactacaagcaagagtattctatacactactaggcactagtgctca

SEQ ID NO: 643347 - DNA, 425 bp, Homo sapiens
ataattaataccttaggttcccatacacttgtatactagggtaaatgctggacacttcctactgctcatttaaacagatccttgtgggttgaagggtcagctgattttcttgctgcaatatttacaaagaggcctggggctgggatgggtggctttattggtactctgccagcaaacgtatccaaaagaactttgggcctggcacggtggctcaccctgtaatcccagcactttggcaggctgaggcgggcggatcacttgagcccaagagtttgagacaagcctggacaacatggtgaaaacctgtctttactaacaaacaaaaaattacaaagattagccgagtgtgtaggcaggcccctgtaatcccagctcactgggacggctgcggcaggagaatcacttgaactcggaatgcgcaggtt

SEQ ID NO: 643348 - DNA, 100 bp, Homo sapiens
  misc_feature (1)..(1): n is a, c, g, or t
ngttcaaaacagagcaaaaacaaaaatctgaaaagtctaacccccatgttatggaccaacactggaattacattttaggggattcctcctctcaagaaaa

SEQ ID NO: 643349 - DNA, 324 bp, Homo sapiens
  misc_feature (145)..(145): n is a, c, g, or t
  misc_feature (212)..(212): n is a, c, g, or t
  misc_feature (237)..(237): n is a, c, g, or t
gagacagagtctcactctgccgcccaggctggagtgcagtggcacaatctcatcgctgcaacctccgcctccccaggttcaagcgattctcctgtctcagcctcctgagtagctgggattacaggtgtgtgccaccataccaggntaatttttctgtttttagtagagatggggtttcaccatgttggtcaggctggtcttgaactcctggnctcaagtaatcctcgtgccgaattnggcagggctctcagccctaataaataatatttttacctaatgtcaaatctttttccagctaactaaaaactgtgtacaaaagggttg

SEQ ID NO: 643350 - DNA, 1422 bp, Homo sapiens
gggcgcgccctgttggactacaacatccagaaagagtctacccatggagctggtgctccgtatacaaaggtggggtatgcagatcttgcgtgaagacctctgactaggtaaagacgcagtcatgcttctcgaaggtggagccgagtgacaccagtatgacgaagtgctcaagggcaaagagaatccaaggacaatggaacggcagtcccgaccattgaccgagcagaggtagagtcctagggccgagaagaataagccaggaagactggacgggacccgtgatcatgacgatacgagacaatcacaagacaagaggtccaacatgtgcacccatgggcatgcgtcacgcacgtgcaagcacgcgtggggcatgcacgaatacgtatgcagaggaagagaacgcacatagagcgtaggagaaagaggaacccagtcaccttcctgcgacgcgtagggacgcccagagttgaccaagcgcgaacaagacgaaaatgtaccacagggcgggagaagagtacacaagggcacgaagggggaacgagcgagtcgcgcgtctctgggtaataggcaggcaaacgaaagcgttgggattacatatggctgcgttagtgtgcatacaccaacgcaatgggcacaagtcattgtgggacagcaaccgcgatggtgacgttagaacctaaaggaaccatacgccaaggaaagagcaaggttccggaccgcgttggcgagcgcatagggataggcttaccgggtcgctataaggaacggtatggggaatagcaaagaaaatacgtagtcggcagagagggaaacccggaaccatagggcgtaaagggacagcagcgtgccaacagtatcaatgcgaccgagatagcgacaggcgcggaaggtgaaacaagccaagtagtgaacgagccgggtacagaggggaccaaaggaattcgcaagagcaacgagcgggaaagggcaagtacagcggacgcgtgaaacgcgaggcacagagaggggtcggaacacaatcggaggcagtaggcggggaacacaccacggctgaggggaaacgcgaaatagggcagcgcgacacccaccatggataccggggaacgtaacgaagagcaggtcgcaggaaacagaggcaggtcccgacaccgccgtggagaacacacatagagagtggcacggccgggcaactattaaacgaaaggggtaggggcgaaatgaccagggcatacagatcgcggggagggaagaggaagcaccccgagtgaaaacatggggtgcagacaggcacacgcggatcgcaagcataccaatcgggacacagaggggaagggccggaagcgtggtgaggacacccagtcggagagcacaagtggcaacgaaggacacgagagagaacgcccagtgggcaagcaggcggca

SEQ ID NO: 643351 - DNA, 127 bp, Homo sapiens
tgtcttcaagctccaagattcggtcctggactcggactagttctgtagttaatgcttcaaaatgtattaggtaattgtggtagtagttttgacaattccagaagttccatttggttctttcttaaag

SEQ ID NO: 643352 - DNA, 213 bp, Homo sapiens
tcaatttctacacctcgtaggcagcatatgattaggtcttattttttatccattcagctactcttttttatattggagtatttagtccagttacatttaatgttattagtaataggaaaggactcactactgccattttgttactttttttctggggttgtattgttggtcctctcttccttcctttctgtcttcctttgtgtagaaattgaa

SEQ ID NO: 643353 - DNA, 163 bp, Homo sapiens
ttagaccaggccgggcttggaaaaccctgtggcgggtgacgctcgcctctgcctccccatgtgctgacatgagccatgggtccctgcctcactatgcaagtttttaaaactttttttgtaaagacaaggtctcaatatgttgcccaggctggtctcaaactcc

SEQ ID NO: 643354 - DNA, 928 bp, Homo sapiens
  misc_feature (437)..(437): n is a, c, g, or t
ataaggataagtatggagacgaccccaacgatacttgtccgatcgttttaggagccgtccgtacgtcctgccatttcgcgggacgtgtgcggtaacaccaaggacggttcgcccccccgggttagacctcgggcctccccatgtacttttttgggcccgcgcccggtgactcttgtggtacccgagtgcgtttccaaggggtgccctcaggaactgcccaagcagcagggtgtctttctgtgtgccaccagccctggcaatctgctcccccgggctttaacccgggtgtactacgccccaagccccgtcgcgggggtatcctgaattcctcccttccacaaagccatttgtcgcccaccagacaccggttggccccccccggggaaatttcggtgaccatctcatggcccccgaccttttcaagcaagtggtcttcntcagaggccacccccctgcctgtgcgagccgccgcgtaagagaacaagttttcttcttaggtagttcgggcgaacgcccccgcaactatccaacagtggagacaacaacgcttttgctctcccaagaattcgtcgcaaataaatccgctgtaaatatagcccaagtggtatgaacgcctggtcctctctttctttcatgattcgtggagcaatagcaaccccccccgctgtcgaaattacctgccgatataatatgtgatttcatcgatgaatagtaatctggtaaagatcattaatctatccggccggacgaaactatccgcccgtcaataattaaatacaaggcgacaataaagaaaacgcggatatcccccctgggtgtaaatcctggtaagaagaaccttttgtcccgagcaccctgttgtgtataaaaaccccccttccaattttccaaaaaacccttaaaaaaaatttcccacgccccacaaaac

SEQ ID NO: 643355 - DNA, 492 bp, Homo sapiens
gcacgaggttagacttggtcgagtggatgatcaggattgccgctaatgatgcacctgattttgattctacaaaagtagaagtcaatggggtttcaatggaggcacgtttatatgctgaaaatccattgaaaaatttcagaccttctccaggtttacttgtcgatgtgaaatttcctgattgggcaagagtcgatacttgggttaagaaaggtactaatatttctcccgaatatgatccaacattggccaaaattatcgttcatgggaaagaccgtgatgatgcaatatccaagttaaatcaagcgttagaagaaacaaaagtttacggatgtattactaacattgactacctgaagcctatcattaccagtgatttctttgctaaagcaaaagtttctacaaacattttgaactcttatcaatatgagcctaccgccatcgaaattactttgcccggtgcacacactagtattcaggattaccccggtagag

SEQ ID NO: 643356 - DNA, 165 bp, Homo sapiens
gtcatcagccagcggctcccatttctcctcacctctctgggccagctgaggacagtagctttgactcggaaggctgaaggatgagaagtcagtcctgattggcagctttcagagtgggggtaaggaggccaacttacttcttcctaaacttgggcaggtccttct

SEQ ID NO: 643357 - DNA, 737 bp, Homo sapiens
ctgaaaggaagttgttcatggatcagaaatgtgggaggcccttccttgcccaaggcaagtcgctgtagatggttaaactgataccaaaaataggtaagggaaattccaaattccattggaagatggccttttactgacactgcagacatgtagatacaatagtttaatgtcctctgaaaaggtaaaaattccataaatccttgcaaacaatttttagcaatattgtttattgctaccacagccaagaatgggtatttcaaagccaggttttttttatttggttggttgtttttttttttttttttgggctacactttttggggggggaccttttaattggggaaaaaaatgctgagtatacttttctttcacaaccattgcaaacccaggtagccctggagtttcctttttcctcatcatcatggtgtggtgttttgtagggtccaagactttggcaatacttgatttaaaaataagcagttctttaaagcatagcgctctaaaaactattcttagtttataccctcaaaagtggggtctttcatgaaacacaggggtttgattttgaaccccagtagcattctcgtcgttgtagggtaccgagagtttggtaagaatgatctccaaaagaagcagtcctcaaagggcttttaccagtgatatctttaatatccatgtctattcaatgatgtcagatacgaattataacctactaggaacttacacacaaaaaaagg

SEQ ID NO: 643358 - DNA, 898 bp, Homo sapiens
tatgctgtctcggcctgcctatgtcgttcggcgcggtgcaaatgttttggtgttggtgctccacatatggcgcggggatgacctcctcacgtggggccgtcatatgcgcccctatgttgaatgctgcgtgcctctatcaaggtgggggtggccccctccagtttgtgtccagcgggtcctggggtccccttaataaataacggacctcggttgtatgcaggaccaaatttgtcccccgttcgaacttgataccgctatgggttgtcccgtctgaacgggggacgcgttcatccagtgtgggcaaatggtggccctatctacaggcggcccttcctgtaagcgtgggtttttcccctaaaccccgggtccccgcattggtggcgaatggatcccgattggacccgcacgctgaggagtgagtgtcaataccccgtttgttgccgcggagaaacaccctggataaataaacacccgttgtttgaggtggcgacacgattttattcattcttgcagaatgatatgcccgcgcccgtcatcgtcagcagccgcacagctttttgggcccccgccctcccggccttctagttagtgtttggcgccctcagtcaccaggctgtacactggcgtttacaccacctggtggggtccgcccccgccccgctctttctcgccttgggggtcgcttgcccccccgcgttccccggtgctctgttgccccaaaatagggcgcgctatgtatgctgagctaattccccggatccaagtaacggcgttttctttcgccccgcctgtttatgcgccgcacggcgccagcctctgtgcctcgagtttttcaccacgccgctttagttcccccccccagcccccatctcccccaattgtcccacgcaacataaca

SEQ ID NO: 643359 - DNA, 242 bp, Homo sapiens
ctggtacgatgcctaaggaactcagaggaagaggctgaatgttccaggctctagtgatctgtgtgacttttctcattctaagtaagtggggttatccaggtaactttgtattcttaaagtaggcctcccagtttgcatgagtttctaggacccacaactctgataagttaagagataaaagcaaggtatctacctccatatacccccagggttgggggaaccatatcctccctaagacccta

SEQ ID NO: 643360 - DNA, 362 bp, Homo sapiens
gtgctttgggacggcggatcgagcaatggtctgcatagagcacggaggtctacgctcgggcggggcagctctcggggctgctggtattactgcgctacttcttctcttcgtctcctcatccaattcctcatcatcctggggctcgtgctcttcatggtctattgcaacgtgcacgttagcacagagtccaacctgcaggccaccgagcgccgagccgagggcctatacagtcagctcctagggctcacggcctcccagtccaacttgaccaaggagctcaacttcaccacccgcgccaaggatgccatcatgcagatatggctgaatgctcgccgtcccaccagcgccgtcccaaagcacag

SEQ ID NO: 643361 - DNA, 504 bp, Homo sapiens
ccctttctgtacatgtttctcctgcttagagtggggtgggcatcctctatacagcaaatgctgacttggcggtatgagatcttggatacagtgtgacctctgagctctgaaccaggctgcccctgacaaaaaaatgtgtcccctcccacaggtaaacaaggaagaaggcactgcaaggagctcggggccgggctcaggggaggctctgccacctttccaggatcaaaggccaagggaggtgacttggcaaggaaaagatctaggggggtcagacaaggaatattagacccacagtggtcaaaaaaaccatggggctctcaggagtcacagattataacaaactggcagcatttgagaccaaaacatctcatgacttagagcaccttaagcctcagggggtgggcagacattacatgggacgggaagagtcaaaggtgtgcttctccactgataattctgatgggttcggggcccggggcatcttcggtgagggagagagccggg

SEQ ID NO: 643362 - DNA, 151 bp, Homo sapiens
tgctgggatggtaggcgtgagccaccgcgcccagccacctcagtgttaaacggtttagatgcagctgtcacagaagctttaggagaacctcatcggttttcatattagaagcggttttctggttctcgacactcggtatcccaatagctca

SEQ ID NO: 643363 - DNA, 147 bp, Homo sapiens
atcccgggcgtgcggggttacaggcgtgagcatctagccagccccctacatatctgtttgtgatttaaataatttgaatagtctcccttttttctgtcagtgtagctaaagattcttcatattttcgttgactcttttcaatagaac

SEQ ID NO: 643364 - DNA, 405 bp, Homo sapiens
cgcacaaaacatatagcctgtaccaggggatacaaccaggccgagcccatttccagtgatatagctgtcaggtggcgctaagccaaacaaatctgggtttccctgagactagacctctctttctgggagagatggaatcacagggacaaggttggccaccttggggtagtgagaattcatcctgcctaaacagggagaattcaaacaagtttctagaaagccaaactactttctagaaagtcaaagataattatattttttgccatgactgtaagaatgcccatttcattgcacactttctaacatttttaccaatctgataaataaaagctggtactgaggtgaaaaaaaggctgggcacagtggctcacacctgtatttccaacattttgggaggctgaagtg

SEQ ID NO: 643365 - DNA, 1178 bp, Homo sapiens
tcaatccccatttattttgggccctgggggcgatgtcatcttttcaatatgaaaaaaagcagcaagttcaacataaaataaaatctctctcaaagtgttgaggataaacacaaaaccaagtgtggtgttgaggggggaagcaacagcaaagaggaaaaatgtgagatgtgtgcaaaaaagagtgggaggagggttccccttctcctcgggggactgacttcaaaccacgtcattggtggccagttttaccaccactctccagaagctcagggggtggtccattctttttgtggggagttaagaaaagagggtggggaatttagaaagagcgtttccgtggagaggctatagggcaccaaagggcgggctcttcttttccccccttccaaaaccccctttgaatcccttttctcgtgaatcgagggggacaaggaagcttgaagttgaagggaaggttaaagtttgggaaggggagaggtattccatgtgtagacagacgtggggagacaagatctccctttccaagaagttaagacgctgtggcagggacgcatttgacaccgggggaagaataaatacctggcgttgacacctctccctttagaaaggcttgacaatgttgcggaaacatcgtgggaccatatacttttaagaacatctttcacgaggagacctttaaaattcagcgcccgtgggatgtttccgcccttcctcccaaaaaaaacttgttctagcgacacgttgcgaacaattcccccaatttccgcccgtttccccttttattattacgggagacgtttctatacccccaatataaccttttcttaaccacattttcctacaactttgagggggccttacaggattacgatgggagccattaatcctaaccgtcgtggctcttccacaagcaccccgtgggtgtgggctcctaaaaacgggggaccctgtgggaaagacccccacggctttcttggggagacgaatctactcaacaacagagagaccattataagctcggggaccacaactgcgggagattgggcgccccaagcaagaacaaacaccggggtgcccccaaaaatggggcggaaacaccattaatgggccccccaacgtgatgcaccaacaaagacaaggggaagccactcccccacacccccagctttattttttgg

SEQ ID NO: 643366 - DNA, 1031 bp, Homo sapiens
  misc_feature (107)..(107): n is a, c, g, or t
  misc_feature (109)..(110): n is a, c, g, or t
  misc_feature (112)..(113): n is a, c, g, or t
attaagcaaagatgatatgaaaatatggttaaaaatgcagagaaatatgctgaagaagaccggcgaaagaaggaacgagttgaagcagttaatatggctgaaggaancnntnncgacacagaaaccaagatggaagaattcaaggactaattacctgctgatgagtgcaacaagctgaaagaacgagatttccaaaatgagggagctcctggctagcaacaagacagcgaaacaggagaaaatattagacaggcagcatcctctcttcagccaggcactcattgaagctgttcgaaatggcatacaacaaagatggcatctgagcgagaaggctctggaagctcctggcactggggaacaaaaggaagatcaaaacggaggacaaaacagtaataactagcagaacactccgaagccacgaaggacaacatatgaagcttacggagtgaagagacttcctgagcagataatgggcgaacttcagctcttttctacctgtgtcccgcagctacttctatatatacatatccttaagttcgtaacactctagtgaccattacgctagtgatcacttctaactggacagctgattctaacagctataaagcttcacaatattctatgtccctagcctgtcattccccagcctgcactgtaacacaggaggctaggattgcacactcgactcatcataacagattctcaactatcccactgctgaacagtgaccactatcccccacggggtgcacagccatctcgcacacagcaacgaacggtacgccactccacagcactccgacaccgacgaccacactatgggccactgacaatccttcataccccacccgtcacccaccgcctgcacacgcccctgccatgcaccagcacggccccccaacgcaggcccctgcccaccccaccctgcccgcgccccgcccgccagcacggcaacacgccaccctacacccacgcccaaactacaccagccgcgccacgccacgcccctcacaccagccccgaccgccccag

SEQ ID NO: 643367 - DNA, 733 bp, Homo sapiens
  misc_feature (308)..(308): n is a, c, g, or t
  misc_feature (376)..(376): n is a, c, g, or t
tcctggaaattcatgaacggagtattatgaggtgaaatccacaaatggggataccttcttaggtggggaagactttgaccaggccttgctacggtcacactgtgagaggagttcatagagtagagacaggggttgatttgagcctaaagacaacatggcacttcagagggtacgggaagctgtctgaaccacggctaaatgtgaactctcctcatctgtgcagactgacatcaatttgccctatcttacaatggattcttctggacccaagcatttgaatatgaagttgacccgtgctcaatttgaanggattgtcactgatctaatcagaaggactatcgctccatgccaaaaagctatgcaagatgcagaagtnagcaagagtgacataggagaagtgattcttgtgggtggcatgactaggatgcccaaggttcagcagactgtacaggatctttttggcagagccccaagtaaagctgtcaatcctgatgaggctgtggccattggagctgccattcagggaggtgtgttggccggcgatgtcacggatgtgctgctccttgatgtcactcccctgtccgggtattgaaactctaggaggtgtcttaaccaaacttattaataggaataccatattccaacaagaagagcaggtattctctagtgcgctgatggtcaaacgcaagttggacatcaacgtgtgtcacggtgaagacaatggtttggggca

SEQ ID NO: 643368 - DNA, 1052 bp, Homo sapiens
caagtgacccgctatgaggaattggccatgtcaaaagatcgacgcctggataatgcaacgtggctctcggagtggcccttcaacaggctaaatcagagtgagactattccaatgaggcattggcacggacaggaccaccttgcgggactaaaagctaagaacggggaccctatcatgttccgggacgcaagtagcgttggccctccagacaccgtttccgtgaaaacccggaggggtgagattccagtccccctgccattgaaggaagactttcggttgatcctcgtcaagcccatccctttctgcctctaacgtccttcacgaggctatctggcctcttactttcctttctggggggctgacacatggaccagaaggcctgggtaggccaggtgtcttggtacccacctgataaagcagctaacattctgaagtgactctactggagatccttgatagaaagactcttttgaggctatctgacacctaggtcgctcaggtgaaatagtaccaccgcacagcgaaatagattacaagccttatgaggtcaagaaatgtgacctccagccgggcgcggtggctcacgcccgtaatcaccagcaactgttgggaggccaaggcgggcggatcaaccgaggtcgggagttttgagaaccagcccgacccaaacaatggagaaaccctgtctgcgtacgtagaaaactacaacactagccacggtgtgagagggacaagcctgtaaatcccagcataactagggaggctgaggacaggagaatcactcgaacccgggaggcagaggttgcagatgaaatcaagatcacgccatatgcatctccagcctgggcaacaagagcgaaactccatttcctaaaaaaaaaaagtgtcttgttcactgcagcatgcccagtgcacacgcacaggtgctgacctatagtaagtgcttaacatttgtttgaataggggaaagaaatttccggaagtaaatacagcaattaataatgtttataaggctgggcatggtcgctcaggccagtaatcccagtgactta

SEQ ID NO: 643369 - DNA, 395 bp, Homo sapiens
  misc_feature (107)..(107): n is a, c, g, or t
  misc_feature (109)..(110): n is a, c, g, or t
  misc_feature (112)..(113): n is a, c, g, or t
attaagcaaagatgatatgaaaatatggttaaaaatgcagagaaatatgctgaagaagaccggcgaaagaaggaacgagttgaagcagttaatatggctgaaggaancnntnncgacacagaaaccaagatggaagaattcaaggactaattacctgctgatgagtgcaacaagctgccattcagggaggtgtgttggccggcgatgtcacggatgtgctgctccttgatgtcactcccctgtccgggtattgaaactctaggaggtgtcttaaccaaacttattaataggaataccatattccaacaagaagagcaggtattctctagtgcgctgatggtcaaacgcaagttggacatcaacgtgtgtcacggtgaagacaatggtttggggca

SEQ ID NO: 643370 - DNA, 605 bp, Homo sapiens
gagcacagtagcagtctgcttagatgttaaaaaaaaaatcataaaaagccatggtgctgtaacgacaataatcggtactgaagtcataagcatctatcctcttcaaggattttatccaagataaaagaccttgtagacggtacacctgctgtagtctcctcaaacagggcctccccgtgtctcttctgcagcaaacatgcctgagctgtttccatcaccttctccatcaacagttccctggtcactgtcttggtcatcctccctctcctcctgcttcctttcttcccgtttgggcacttctgcatgtatgtcctttccttctataatcccatttgtcagaccgggagacggaaaaaggatgctatgggccaaatgagggcccttgatggctcttatgctctgtgcatggttctttcccagttcttccagattgaagccgctttccatgtctaccacaatactctcattaaaatatggaggaggagtccaaaatgtagggggatggcaatagtcaagctaatgaggcccctgtccactccaaccacagaagtttggcagccccttcaaaatgtgggatccacctttgtggtgcatcctctactcta

SEQ ID NO: 643371 - DNA, 106 bp, Homo sapiens
ggacttcgaatcatcatcctgctcgcacaaatgtgcgatattctgctgggcagaatctgtgactaatcttcctcaagtcataaaacaaaagctgacacctttatat

SEQ ID NO: 643372 - DNA, 170 bp, Homo sapiens
gtgatgtcagctgttcattttgtgcagagtgtaaacattactgtgcagccgtgactatctgtctggtcgattttaacacgatgattgtaggctagaataccttttatagcctgtcagaacttggaatctctaagttcttgacggtggtaccggagtctcgatattcggta

SEQ ID NO: 643373 - DNA, 431 bp, Homo sapiens
atcatcgggaaacgctattacactctggacacatgcatatacacagggaaacaatttcaacagatatatgacttagatcctagtgaaggagaaaaagtcgatatatgttaaatactaaaaacagaatggctatcatgacctttttacacactcagagatatttaaaagacttgaagagacaatactatggttgacgacactggcttcctattccagccctacttaagagaaaaaatagctagtatgtttctaattgaaactagagtgaactgggcatcttcacagttatcattttcttggatatcaaaaaacaaaagacctgggaaagacaaacaagtgtttcacagaaatgaagcaaacacattttcacatgacataatcattgacttggtggtacacagctcaagtccagctttcactgatatttcctc

SEQ ID NO: 643374 - DNA, 703 bp, Homo sapiens
  misc_feature (1)..(1): n is a, c, g, or t
  misc_feature (65)..(66): n is a, c, g, or t
  misc_feature (68)..(68): n is a, c, g, or t
  misc_feature (70)..(70): n is a, c, g, or t
  misc_feature (72)..(72): n is a, c, g, or t
  misc_feature (74)..(74): n is a, c, g, or t
  misc_feature (151)..(151): n is a, c, g, or t
  misc_feature (153)..(153): n is a, c, g, or t
  misc_feature (163)..(163): n is a, c, g, or t
  misc_feature (166)..(166): n is a, c, g, or t
  misc_feature (171)..(171): n is a, c, g, or t
  misc_feature (178)..(178): n is a, c, g, or t
  misc_feature (180)..(181): n is a, c, g, or t
  misc_feature (187)..(187): n is a, c, g, or t
  misc_feature (193)..(195): n is a, c, g, or t
  misc_feature (201)..(201): n is a, c, g, or t
  misc_feature (210)..(210): n is a, c, g, or t
  misc_feature (213)..(213): n is a, c, g, or t
  misc_feature (216)..(216): n is a, c, g, or t
  misc_feature (271)..(272): n is a, c, g, or t
  misc_feature (274)..(274): n is a, c, g, or t
  misc_feature (276)..(277): n is a, c, g, or t
  misc_feature (283)..(283): n is a, c, g, or t
  misc_feature (307)..(307): n is a, c, g, or t
  misc_feature (345)..(345): n is a, c, g, or t
  misc_feature (411)..(411): n is a, c, g, or t
  misc_feature (425)..(425): n is a, c, g, or t
  misc_feature (436)..(437): n is a, c, g, or t
  misc_feature (457)..(457): n is a, c, g, or t
  misc_feature (473)..(473): n is a, c, g, or t
  misc_feature (482)..(482): n is a, c, g, or t
  misc_feature (587)..(587): n is a, c, g, or t
  misc_feature (680)..(680): n is a, c, g, or t
ntaagaggtggaaaagaggtgagtaaataaaatagattgtaaagaatatgtgggtatggacagcnntngntngngaaaaataagggtgggggtagggattggggttgggggttggggtggtggggtgtatttaaaaaaatgttttgggagntnagtgtttatnatntgggnatggganannatgtgnatgtgnnnatattngtagggtanagnagnagtagatgggtggaagaaggttggtggtaggggaggggagaaaatatttgtgggnnangnnaggatnggggaggaaaataaagaggaaggngggggggttgagtgaggtggtgggtaggggtgagtggnagattagtgtggtttgagaaagaggaaggggatttgtttgggagtttaaaaatagaggagtgaggnggagtggagagggnagagaagatannaaaattgggagggagagagnatttggggggagtggngtaggagangggaggagggagataggtatgagggtagggggtaagaagagtaggaggggtggagtggaagtgggagggtggtgaaatggggtaggaggaagaggagagtgagtntaggtttatgaggtgtggataggggttggagaggaggtgggtagggacgctggagggtgggatgtgagcgtgtggttatgtatagtgtggaangtgtgattgtaggagtgaagtgt

SEQ ID NO: 643375 - DNA, 588 bp, Homo sapiens
attcttagagaaaggggggagaaatggtggttatagattcttccttggggtagtactttactagtttattaatgttatttattttattctcaactcaaacatgtgagagtaaaattattttcttcaggtctacaaatgatgagggttagggttggggaaattaaataatttggttaagaacaatcagttaatagggagtaaagcctaaagccttcaatctggctgggtttaaacactgggtaaatataccttctagctaggatatgtgggaaagggatcaacttggattctcctatatagctttcctgaaaggagagaaaactcctcccttttttctttctcccattcttcttcctttttcttcctttctttggggctctccttacttgctctttctctccttcctttccctctccttcttcctttctttcattcactccaaaacattcatcaagcacattctatgtaccaagaaatgtgctagggatataacgataaataagacaacttcttggcctggtgctcacattccgaggtgggatcccgtggcccaagttaggagcagaggttctcggatcttatgacatc

SEQ ID NO: 643376 - DNA, 201 bp, Homo sapiens
agcggatctgcccctgaaaaccgacaaaaatacatgctgctgattcatgagggggactgagagtgtcagaaccttccagatcgagcagagctggacccagagcccttctttgagtgtcagcgctgctccactggttcctggcagaagatcccgcatcccctctggagataaagatcagagagggacgagcagatgtgactg

SEQ ID NO: 643377 - DNA, 322 bp, Homo sapiens
  misc_feature (101)..(101): n is a, c, g, or t
tcacggtgggctgggagcccagtgtccccccactcccttcatcatgcagcttttcccagccgcccaccagcgccagcagacaggtgtccagcctcctagtncaggccatttcactcttgtcgcccagatggagtgcagtggctcgatcgtggttcactgcagcctccacctcccgggttcgggtgatactcgggaggctgaggcaggacaatcgcttgaaccttggactgggaaggtggaggttgtggtgagccaggatcgcaccattgcactctagcctgggcaacaagagcaaaactccatctaaaaaaaaagtcgacgc

SEQ ID NO: 643378 - DNA, 341 bp, Homo sapiens
tgtctagcaggatcttggcagctgcaggatcatagatactatagctcaactcctgtgctcaatgatcctcctgctttggctctcaagtagctggtgacacaggcatgtcgcatcatacctggctaatttgttgtattttttgtaagagacgggatctcactatgttgctcagactggtttcgaacttgtgggctcaagcgatcccctcacttggtctccctaagtgctaagattacaggcatgaaccatcatgccggtgtgatgaccctgttaaatttttttttttttggagatggagtttggttctgtccactcaggctggagtgcaggggcatgatctt

SEQ ID NO: 643379 - DNA, 310 bp, Homo sapiens
aaaaggcccgggcaaaaccccccaacggtgttttggatggagttcccccttaccccggagggcccgctcagccctggccttttggagccttcaaaccccaagggggggttttgttggaaccccccctgcaagcaggccgtttttttttttagccctgccccagatcccaaagccctgttgggtggcccccgggctgtcagctatgcagtggggtttcccccccccccaggggacatcttcatggggttcaggcatgcaaatacccccgactgccccctttttagcaataaagtggcctgaggggtgggga

SEQ ID NO: 643380 - DNA, 258 bp, Homo sapiens
  misc_feature (52)..(52): n is a, c, g, or t
gaggatccgagttagggctaccaaatgcggctctgcctgctgctctgacatntctctactacttggtgtgctgtcatcctgctactgggaggctgaggtgggtggatcacctgaggtcaggagcgcgagaccagcacagccaacatggtgaaactcccgtctcctaaaaatgcaaaaaattagctgggcatggtggcgcacgcctatattcccaactattcaggaggcagaggcaggagaattgcttgaacccaggag

SEQ ID NO: 643381 - DNA, 1830 bp, Homo sapiens
  misc_feature (29)..(29): n is a, c, g, or t
accgcgctgtgtgtttgtgatgtctgtangtgccgatcatctggtatttatgtgtttgtatgctcttgttgcttctggtgctgccgtgtgttggtttgacgctcgctctggcgtcgttttgtctatctccctcatgcttctggtctgctctcgctgcgtggtggtgttgtttcttactcggggggtggcttcgcatgccccaccactcatcctgcgcaccgggtgttgtttgcgagtgtgcttccttctctttaccgggtgatcataaaagttgtggggtcccctccctcctggtggttctcgctatgtgatcggctggtctctctccggggctactatacaagggggttcccttcctctcctccccgcggaggggacacaccccctctcttggaaggcttttgtggtgtggttttgtctcacgaacacaccacgtgcgggtccccgacgacatgtgttgttgtcccccgccccagttgtggtggaatgggccccctcccccccccttgtgttgctctctcacgagggggccccgttgtgtgatggggagcaatccatacttcttctggtgggggaatttttggtgtgcgccgcacacacaaaaggcggccaagatggtgcacccaacgagccgttattggcgggcgccctctttgtttggtcgaccggccccccttctcttttcagtggcgtgtctcccaagacgacacccaaagggggggcgatttcggtcgtgcttgagccacaccggcccacttgtggtgtgtgtggtgtgcccccatattgggggagccccacaagggcccaacgggcggggatgtgctccccccccgctgtgtgttctccacccacgtttggccgcccccccgggggtgttttatgatcccgctgctcttttggggttgtttcttcttggtgttgttttctgtgttgccccaccccgacggggggcacacattttggtggtggttctcctacaaaggggaggagatcttctcaggttctgctctcggccccacaagaggggcgccccctcttgtgtgtcacctgttgcggcccttctgtgggggtcgcacacacggtgtgttttttttggcgagaagcacctctgagccacacagtagtgtcactgctcgccccccttctgctgcttcacagagagagagagttgtgtggggcgacacactctgggccgcacacgccccactggtttgttctcccctgagagagtcccacttcacaccactctcacacccccacctgctctgtggtgtgcgccacacttttcacttgtccacaccacagtctgtgcacacacaccacaggggtgtcacagagcgctcaccactctccacagtgtgtctcttggggaccacatgtgtggcacagaggtggagaaagagtccacacaagaaatgttttgctgggtttcctaacactcccacgccttcactcttaagggcgcacaccctccccttcaattccaagcccttctccccgcgagaccctcccacactctccctcgtctctgtggagagtgtgcccctctcacccacgccagaccccttatagagacacactattccacatttttgaggagcccccaattataatataagggcccctgtcctccgtatactgagaagaaaaaggggagagcacaccaaggccctttaatggagcacattgagaccttgttggaaaaccgcccacacacatgaaatatggttggagggaccctggatttagaggagggtggacctggggaagagccgaggctggccccctggtgactgcccacacatataattaaaatggtgatttgggaaa

SEQ ID NO: 643382 - DNA, 281 bp, Homo sapiens
ttcctctgtcagatgcatgggagaacagaaacaaggcccgtataatgtctaaactgagctgggcagagggcatggaaactatgacgcaacatatctgtaaatgtgctcacctcagctggacacagggggggtgaaaatacgccaggcctcacggagctcgtcgctgcgcacgaagtgcatctggctcccgcagaagacgtccaggatgaggcgctcgtaggcgtcagggagcttcacgttcttgtatctgttgccgtaggtgctggactacttcgactcct

SEQ ID NO: 643383 - DNA, 179 bp, Homo sapiens
  misc_feature (33)..(33): n is a, c, g, or t
gctcgacggtggccttctcaggaggaggcctgngggagtctgctgggagaggcacaccccaccagtgctgtttccttccctgctgtgcctctaccagcagactcccacaggcctcctctgtggcctcttggcagagccccatgccccgtgatttgctggtacgctttttcttgctccac

SEQ ID NO: 643384 - DNA, 174 bp, Homo sapiens
aataaaacaagcaggtacttacaaataattactcggcagtaggttataattggtggtttaaaataaccattggatacaggactgttgccaattgggtaatttcaatagttgtttgttgtttgatttgaactggaatcagtaaattgactgttaaatgtggccaaaatcagatta

SEQ ID NO: 643385 - DNA, 377 bp, Homo sapiens
tgacttttggcaccaatagtcctagaaatagcattcccaaggtaatataaaaggtcatggataatagcatccaaggatttctgagaaagattagaatagctagtccactaataaaacacatttccttctttcccaaaatctttttcaatccatttacataccttctgaattggtagaaaactaacaaatcaataccaaataagaaaaaagaaactcggaagaaaggcttccacagatccttctacggatgtatttcctacaaggatatgttctatgacaattaaagctaaacccaaaatgtttactaagagtaacaaagtatacaagagttgtttcttatctgctctaaaaactgaataagattgatttcgctggct

SEQ ID NO: 643386 - DNA, 159 bp, Homo sapiens
acagatatactcgtttgttttttttacttttaatttttctatctaaccatatttatacatgtactttataaaatattaaaattatctatcaagcttgtcttattcatatcattatattatcatatttacggacaactcattgaaacttcttgaataatg

SEQ ID NO: 643387 - DNA, 434 bp, Homo sapiens
gaatacataccggttataaagcctacagtagtatacagtaatgccctaggctttcacattcattcaccactcactgactcatgtggagcaactctcagccctgcaagctccattcgtagtaagtgccctgtacaggagagccaattcttatcttttatgccatatttttactttcctttttctctgtttacatatgtttagatacacaaatatttcccattgtgctgcaattgcctatagtattcagtagtcacatgctgtacaggtgcgtagcctgggagcaataggctctcccatatagcctaggtatgcagtaggctatgccatctaagttttgtataagtacaatctgtgataatcacactacaatgcaattgcctaatgacacatttatcagaatgcgtccctgtcaccaagagatacatgactgtatt

SEQ ID NO: 643388 - DNA, 703 bp, Homo sapiens
gcatttaagaatttgctggctgggcgcggtggctcacacttgtaatcccaacactttgggaggccgaggtgggagaatcacgaggtcaggagatcgagaccatcctggctaacacggtgaaaccccgtctctactaaaaatacaaaaaattagctgggcatggtggcaggcacctgtagtcccagctactagggaggctgaggcaggagaatggcatgaacccgggaggcagagcttgcagcgagtggagatcgtgccactgcactccagcctgggcaacagagacagacttcgtcccccaaaaaagaaagaaaaagatttggggctccccagtctactacggtgaggccattataggcaaaaccctggaccgaccatggggcaatacctaaagaaccacagaaggttctgtgcatggaccccttccagagtaatatggccaattccttggtcaggacagagagtcccaccagatctagtaacatagtgacacactataggcctatgaccttctgttagcataaaagcgcctctaaagatgaacaacggaaccatggaaccttcaggctgtgtgtgttactttcccccagtggaaagcgaaacgggccccataggacgctgaaatctgaccttgggggaccctcagggggtgaagggtggtgagcccgcagttgaccgtatgccaatgccctgtcaaacacgg

SEQ ID NO: 643389 - DNA, 529 bp, Homo sapiens
gagccgggagctgagtcggaacagtggaggtggtatgggtgctctctgcaaagctcttgctcctgggttcacgccattctcctggctcggcctcccgagtagctgggacttacaggttgccaccaccacgcctgggtaatttttggtatatttagtagagacggggttcaccgtattaggctggtctcgaactcctgatctcaagtgatttgcccggctcagcctcccaaagtgctgggattccaggcatgagccaccacatccagctgaaggaggtcacttttgcactgagacttgaaagaagtgagagagcaagccattgggttatatccgggaacagcattctaggcagtaggaacagcccacgagaagtgcctgaggcaggatagtgactggctggtttcaaggaacagcgaagggtctgtttaagtggagcggagtgagcatggggacaggtccacacagggcgtttgtagccaccaaggagtctggtttttattctaactggaacaggaaggatttcagtcca

SEQ ID NO: 643390 - DNA, 1279 bp, Homo sapiens
  misc_feature (369)..(369): n is a, c, g, or t
  misc_feature (405)..(405): n is a, c, g, or t
  misc_feature (526)..(526): n is a, c, g, or t
tggggagggggagtttccgctttggggtcacacccagaggctgggagtgtgcaaggggtgcgaactcctcagagctctcaacgtgggaaccttccaacctctccggggttccaagagcaaattctcgcgtgccttcaagcctctcccgaagttagcgtgggaatatacgaggcgccacaccaaccagcgccccagctataattttgtgggtattcttggggataaagaagtggggtttccaccagcgttgcggcccagggcgtgcttctcaaaagatctcgcgtggaacctcgagggacaattccacgcgtggcctgcggaccctcccaagaggtggcgtggtgaataaccgggctgtagagcgcccanttgtgttcgccccgggccttggtgggaatctcccantttttatattagaaggggtttaactatatcaaagtggtccctcgtggtgtagagaccatataggtgtctcatataaaaagaaagaagcgctcctatattcacagggtgggcgcatacgttnttaaaaacaccagttgtgcggggagaagaacacactttggtgtgagaacccggattgtgttgcggggggtgatacgcataaaaaagggggagcacgtgggtacttcctgtgtggaggacccctggggtgtgtgtgtaagaccgcggtgttatttggcgggcccccagagtcttcttgcgagatgttcaaccagggggggggagatacccctccccttagtggggtgggggggtgggctacaccacaactcgccggccggggcgctgtgggcgaacggccaacaatttgttgccacaagaagaaaacgtcttcctattaaacgaaacggggggcatcgtgacgttggcggtacccccccacttgtgtgttgtttgttctgtggcaccaagcttctacacctctcctgttggtttacccaacatatttcaccaagaagaggacacccgggggggggaaccattataaaggaggaacatgtgtgtgtttgtatcgtggggggccccactttttaagaaagcgcgagggtggtgtgttgggggcaaaaagggtggtttatacaattaagaggccagttgtgatgaaaatggtgtggccacgtggggggacaaatttttgtttaacacaaattgtgcgcgaggaatttttcgtaggaagttgcaagggcaatatattgtgggggaaaaatgggggggtatcccctgaggagagaattttcgaggagaagaggtttctgaaagaaaaagcgagccgccc

SEQ ID NO: 643391 - DNA, 887 bp, Homo sapiens
  misc_feature (887)..(887): n is a, c, g, or t
tttttttttttaactgtgtggtttttcttttcaaaagtatttaggcaatatggcccgtgatttccagttcttttttcccttttttggaaatggagtctcactctgtcacccaggctggagtgcagtagtgcgatctcagcctcactgggaacctcgtgcctccgggatttcaagcgattctccttgtcccagcctcccaggtagctgggactataggcacgtgccaccacaccgggtaatttttggtattttagtagagcacagcgtttcaccatgttagctaggatggtctagatctcctgaccttgtgatctgcctgcctcggcctcccaaagtgctgggattacaggcgtgagtacactgcgcccggccaagtttcagttctatatgaaagtattggatgtttggttggaacacaatacaggcattagagaacccaatgtttttcaactatatcatccatcttcagttgggatgatcggttggctgcatctaggtcgggtggactcatctgaaaaaacttttccagtgggaagaaatgcataaatgcctatagaagtagcaaaagttcctggaactggcgtgtttgttgcaactacagagggatgtaagaacatagtttttgcaacttgtcttaatgcacaagttgtgtggtaataaattccttatgatttccacataccagatcaaaggcaggttcctggccgaaacctggatttattccgaatacagcgaaatttgagggacctacaccccaattaatgcaccgggaatgggctaaacagaacaatatacaaaactgaaaaggacaagaataggacagatagtcacaaaagagagtgagaacagaacacagagaaaacaatatttacggtcttacacattcn

SEQ ID NO: 643392 - DNA, 106 bp, Homo sapiens
agcgggggaggggcgtggcctcggtccggggtggcggccgttgccgccaccaggcctcttcctgcgggcggtgctgccgaggccggactgcgcggcggcagctcat

SEQ ID NO: 643393 - DNA, 662 bp, Homo sapiens
aagaggttgccagctgtataacaaaactagagttagtaaactaatatattttgtacattttgttttacaagtcctaggaaagactgtcttctgaaaatttgagcattcttgcccactgggttgatggagatgggaagggttctaggccagaatgttcacatttggaagactctttcaaattataactgttgttacatgtttgcagtttattcgagactgctgtgtacatacatagtggacaaattaactccttacttgaaacatttagactatctagatgtttagaagtgcccgatgtatattaaatgtagaggtagtaaaataccaatttgtaaatatctttttgctaaaattcataggaaatacttttggaagttgaattgtgaagccacctttgtgagcagtatattactgtctatacttgctcaatggtttagaggaggtgggagggaagaaattgcaaaagataatatgctagtgtgttcatacttggacattttcagacaccatttttctgtatgtttgtgcatttgtttgctctgtatatagtgtatataatggacaaatagtcttaattttttaaacatctagaggttgccagtgtatgacaaaagtagtaaaattagcatattttgtatgcttgtgttgaaattcataggaaa

SEQ ID NO: 643394 - DNA, 115 bp, Homo sapiens
tcaagcttctaacgatgtacggggacatgctacttcatttgtatcaacccattgagtcctggcaattactgctggacaaggcagacagaattattatactgtctttctacaaaaa

SEQ ID NO: 643395 - DNA, 421 bp, Homo sapiens
  misc_feature (224)..(224): n is a, c, g, or t
  misc_feature (360)..(360): n is a, c, g, or t
  misc_feature (379)..(379): n is a, c, g, or t
  misc_feature (386)..(386): n is a, c, g, or t
gatctcagctcaccgcaacctccacctcctgggttcaagtgattttcctgcctcagcctcccaagtagctgggaatacaggcacgccaccatgcccagctaatttttgtattttcagtagaaacgggatttcaccacgttggccaggctggtctcgaactcctgaccgcaagtgatccacccgcctccgcctcccaaagtgctgggattacagggcgtgacatncgtgcccggcccaaagggggaaactcttgtggggaggagcagaggggctcacattttcccctctgatttcccccatggcacatttgcctttatcttttcccccattttaggccaggggatctatttgtgttttttntttcttgggcaattttaantatgganttgttgttatggtggcccgtttaaccaccaccccc

SEQ ID NO: 643396 - DNA, 82 bp, Homo sapiens
catctattttattttattgaatactgtctgtaactttggttcatcctgtttgaagaaaaaggacaaataaaacatggccagc

SEQ ID NO: 643397 - DNA, 135 bp, Homo sapiens
gtagtgtgttcatgcattgcaaactgtaattgccttcgggttgtgctttagtctgtacaaattctcacaggcagcagctgctcaccattgttttctatcaatccacaccatttttactccattgtgtccaccaca

SEQ ID NO: 643398 - DNA, 109 bp, Homo sapiens
tcctggcttactcaggcatgcatgcccccctcatcattcaaaccccaccctagtttccctgaaggaacattccttagtctcaagggctagcagacctgagcaagccagg

SEQ ID NO: 643399 - DNA, 367 bp, Homo sapiens
ggggaccaggacgacgggacgactggtgtctctggtaaacatgtggatcctctgaaaattttctgactgattgttgcaaacttggggtctgggtgtggaactgtcgagaagctgagtgaccctagatctgatgtagatcatacctaggtccttgtttaacaggcttatggtggacgggttgcatgagatgtgctgagtcatcaaaattacttgacctgggtccactggaatcccaatactttctgataggaccattctgaaggtcttcaatgtcgtttggtcttcctaagcaatgtccccggcacctattgaatccttcaattgcatcatctggcctcaggccttctacatcaatcaaatatctgca

SEQ ID NO: 643400 - DNA, 447 bp, Homo sapiens
  misc_feature (14)..(14): n is a, c, g, or t
  misc_feature (20)..(20): n is a, c, g, or t
  misc_feature (175)..(175): n is a, c, g, or t
ggacaatgtcctgnaggctnacggttttaatagacctaaggggtcccccaaccccctgggctacagaccggtacccagaaccgggccacacagcaggaggtgagcagcaggcgagcaagggaagcttcatctgtatttacagccacccccccattgatcccacagcagccttgantccgcctcctgtcagatcagtggcggctggagattgtcataggagctggaaccctatggtgaactgcgcatgtgaggaggttgcgcgcttcttttgaaaacctaatgcctgatctgtcgttgttgcccatcacctccagataggactgtctagttgcaggaaaacaagctcagggctcccacgggatcctacattactgtgagttgtatatttcactatatgttacaatgtaataataatagaaataaaatgtacataaatgtaaaaaaaaa

SEQ ID NO: 643401 - DNA, 1413 bp, Homo sapiens
  misc_feature (292)..(292): n is a, c, g, or t
  misc_feature (1291)..(1291): n is a, c, g, or t
ggccggttgggctgcgcgcgactgctggcgatggctcgctgggaccttacgctggttccccttcgctctcctctccctggcccgtggccactatgagagtccgctgacgccgctgttaactgagcctgccgagccaacgattgccggtcgctattctacacgagagctccgcgaaaatgcgcctcagatactgccgccccacgatatttcattgatggttcggcgcaatcagctatgtctgcgtcgtggattgttctattatgactgacattgtaaaacgttacaagaacantagtacatcaatgagacgacaatagcataactacggatacccacatttgaatggtatgataaatgatcttttgcgaaacattttagcagattgtggatcctttcagctataggagctcaatatctgtgcctacaagtgcaggggcgcatcttagtaccccagtttataaacgcaaacaatttttgttcaaaacagagagtgtgagagcaatattgataacctccgtcctagaggcaggtggagattgcttcgcgcattaaatgggagaaccaataaacttatttgacacatactacatgtggggtcctaagaaaagcggaaatagtaagccactaaccttgtacccaaccccttggactttacaccaaagaaaacattgcaaaaactttcctttaccaagaaccatatcggaaaaattggtgtgttcctaattaaaaagacgcactatttattattaggacacaggttggaacttcccttaatggtaaaattaaaaatttaggttaatccgaccaagaagcttttcaaccggatgggaacgaaaaccacacattggttattatccgttgtccgccgatcatcaatgtgacattgtgtcatattggttctaaaaaaagagcataggggctgttgggcaaaacgcgcacaccacactccacgtttcaacaactgtgggcgaataccttcaggtaaatatactgtttgacacatcaccacagggcaaagtatttataagccgtggttatttatatataaacacgtttcaccccaaattattgaggcgggttggttcataacacaaactttttccccccattggaatatgggacgggcaagcgctattccggtttttgaaaccagtgagcgtgccaaaggttcggattacaatagcgggaaaacgcccgcttatctccctttgtaagaggaagacaaaagcccacaacgattgttccgttaaaggaaaagggctcacaggaaatgacccggcccccgtgtggnattatacccccaaggttgggaacaactcacttattgtgcccccccgaaggtcccacacgggtcctttttgtccaagaacaaacttttccgttggactccattatcccaaagagttaacacag

SEQ ID NO: 643402 - DNA, 257 bp, Homo sapiens
attcctttccattccattagagtccataccatttatattccaaggcagtaagttccactgtattcaattcgagtccatgccatataattcgattctattggagttcattcctttcgtttcgaatctaaccttcattgttccattccgtgccaatccacaccatggttacctattctagtccattgccagaccactaagattctattcggtgccattcatcactatcgcatgccagtgtaactacagacccttcacag

SEQ ID NO: 643403 - DNA, 907 bp, Homo sapiens
  misc_feature (376)..(376): n is a, c, g, or t
ttcggcacgaggaaatctttattgctaacgaaggtgtccacactggtcaattcatttacgccggtaagaaggcttctttgaacgtcggtaacgtcttgccattgggttctgtcccagaaggtaccattgtctccaacgttgaagaaaagccaggtgacagaggtgccctagccagagcttccggtaactacgttattatcatcggtcacaacccagacgaaaacaagactagagtcagattaccatccggtgccaagaaggttatctcttctgatgccagaggtgtcatcggtgtcattgccggtggtggtagagttgacaaaccattgttgaaggctggtcatgctttccacaagtacagattgaagagaaactnttggccaaagacccgtggtgttgccatgaatccagttgatcaccctcacggtggtggtaaccatcaacatattggtaaggcttctaccatctctagaggtgctgtttctggtcaaaaggccggtttgattgccgccagaagaactggtttgttacgtggttctcaaaagacccaagattagattatgtaaaatagtcattctttaagcaagatctaaaaaaaaaaaagataactcaaaaaattcctcaaagcaaacaatacaatataacataacacttatttttaaagaaaaatttctaaattagattctgttctgtagtaatagaatatttcttcaaagtaaactttaatatactctcataagctccccccttctcccctgtgaagcattgcttcatggagggggttgacttcttgaataaaatggctttctgccttacgcgtttatagtgattaccgtgttgcgtggctctgatgatgggcatttctaattttaagatcaacaacaataaacacacggtgcagtcaaga

SEQ ID NO: 643404 - DNA, 128 bp, Homo sapiens
ttttaatttaaaaaggggcccccgggggaaccaacgccttttggtttggccggggcataggcccaacctggggggggggcctaaggtggtttgggggtaaataaaaccagcccggttttggttttcca

SEQ ID NO: 643405 - DNA, 409 bp, Homo sapiens
catgctcgagttccagctctagttatcagccttgggaggttttattcatgacttcctctgagttttggcatgtgagagacactcctataagagagagtcaagcctgtgggagtagaatcatctcattcccagagtcagaggagaagagacatgtacctgtgagcatcgtaccttcctctacaagctagaccagagaggtgagagccataaggtaagcgtgggagtagcagattggagctaatggctcacgcaggatccatgacccgactcccataaagctctagacgttgccagagctaccctattctctctcttccgccagtgtcacttcctctaaggatctggattagttgcaccagtctgcattggttaggcatggacgcgtgacatggggtaccagagctcgata

SEQ ID NO: 643406 - DNA, 659 bp, Homo sapiens
ggagattggactgggggccttcgacgcggggctgttgtgggccctggccttttcagctgcggatcagtggtgccttctctttgtggtggtggatgacttccaatgtagcacatgctgtcggtgtgggactgcagccggaggaacatgaacctggctgagatcagagagctacaaatgactcagtcctgggccgttggcttcaaccctcgatgacaggcaggctgcatcgctcaccgagtggtgaaactctcacgtccacgttcttggaattggagtggtggagtaggggttcctgggcaagtgggacccttacccggaaacagggtgtctttgggaaatacaagaaaccgcaggtctatcccttgctttagtgttccttccggatggagacattctcactggagactcagtaggggaacattctcacctgggggcggagcccttcagattccaagacccccaggctaggggtggcgccgattgagacctatggtgattgtggcccaggctcacggctcatgaagggttctatcgttctgccttgtgtctcccggaagggacgggacatgtgctgagtggtggcgggcgggaccgccggttgctacagtgggggcccgggttggtggccctccaggaggctgacatcccgacacttcggg

SEQ ID NO: 643407 - DNA, 99 bp, Homo sapiens
gcggccgcctactactactactgctcgaattcaagcttctaacgatgtacggggacatgttgaaactagtacttttccctttaaaaacaaaccaaaaaa

SEQ ID NO: 643408 - DNA, 146 bp, Homo sapiens
cgctcgtgtcccacatgagtctcgctccgtacttgtctgtacctggggtcgacgacactactgggacatgtggacttttaacaaccggggactcctctacgacgtcgaccctgccggcctgactgcttgagacctggccgtcgttt

SEQ ID NO: 643409 - DNA, 282 bp, Homo sapiens
gtgagaaactaaaggttacaatcctgactgggggagctgcaagacacgtgaggcacactgcccagcaccgtgtactctggagcccccgaaccccatactccctcacctccctcagggcttgtgggaaggccttccgtgtggaccaggatgcacacacatcacctggccacctgcctgcaggaaattctgagcctccctgtctttcaagacctggacacttgagacgcactggccaggactgtggtgagcatccctcagtatgggtgcagcattttctcatga

SEQ ID NO: 643410 - DNA, 261 bp, Homo sapiens
tttgaaaccatccccaaccccacccgcaaccaatgtccatggaaaaattgtcttccacaaaacttgtccctggtgccaaaaaggttgggaactgctgccctaggactcaaagtcagagacctaatgcctgggggaagggagtttgctttccatcctgagaaatcacccttagccatattttgctaatttgacccataatcacccctatgtgttttttttatctttattcagctaacaaagaacttgcttactttgctccta

SEQ ID NO: 643411 - DNA, 192 bp, Homo sapiens
ctagaggatcccctcgctattactcggcacctgcattcggtaccactgcgttcttcatagccccagtcatgcttcgagtgggaccatcaacagaccctgggccctctgcctcttcgtccatctggtccgtcgcttctcgcaagatcgatcacgtagaaggacacaagagctctccatacacgagcatttcct

SEQ ID NO: 643412 - DNA, 246 bp, Homo sapiens
atagtaagagtaatatgtaagtctgagttataaacctgtcatagtatgattaactgctaatgttctgtttctgtatccttgctttcacatcactacactttgtgccactgtaggcttgtttcaagttagcccaccctctttagaagtgtatgtaaaagttaaatgctgtctttgtccttggcccagtctctggatgttaatccactgggtctgagtgcactcaataaaatcctccttttctaccta

SEQ ID NO: 643413 - DNA, 714 bp, Homo sapiens
gtggcacctcttggtttcccctgggatttatttaaacccctttaggggacgccacttgtcccacccctcgagagtttctacccccggaatatggttgaaatgtaaaaagggaaattattgggagtataaaggggagattcccgcgttctttgaaagcccgtttcccctcgtttcccgggttccgggcctccccaagagtgggcccacagggaaaagagaagggggccacatgggttgtggcgccaaaaaaggggcgccccggccacccgtgtcacgccttattttcgctggcacactaaactggtgccccgaattgggtggcccacaaggccacaaggccactctataagaaaattttcgtcacattctgaaaaaataagtgagaggccccaccccgctcacgggaaccattttctgaaagcgaggccgttttctgaaagccataatgggcttctcccacagctgtaatgtgagaagggaacacaataactgtggtgaagattgggcacaatcaccacgccacaagtagtcacggagatcgattctcgtgagagcccgccagggccggacaccccccacccccggtgttagagacccggcgggggctgccccacacgtgtcccccaccccacaggcccactgtaaggggctgagtttttaaagactgaaaaccggctattttttggggaaaaattaaatgggaattgtacttta

SEQ ID NO: 643414 - DNA, 432 bp, Homo sapiens
  misc_feature (26)..(26): n is a, c, g, or t
  misc_feature (32)..(32): n is a, c, g, or t
  misc_feature (42)..(42): n is a, c, g, or t
  misc_feature (62)..(62): n is a, c, g, or t
  misc_feature (64)..(65): n is a, c, g, or t
  misc_feature (70)..(70): n is a, c, g, or t
  misc_feature (83)..(83): n is a, c, g, or t
  misc_feature (93)..(93): n is a, c, g, or t
  misc_feature (119)..(119): n is a, c, g, or t
acatagtgactctccatactagtttngtggcngcccttgctnaattaaaagatcctgtaaangnnttcancattgatctgaanccaataattngagaatcgtctgctgagaaactcagnattaatatttttttgtctttcttccaatgctcatttagctgaataaataaagcacttttacctgtccctcgtctaccaacaacaatggtcctgtcatcagtttcaattagagtcctaaagtcagcagtttcaatgaaagcattactcaacatctttttatcattttctgctgcgtatcaccaaacggattagactttgaagtaatattcaattccatattcaaccttttatgttagctgctttcatttattactttatatactggcgaacgagcaatattcattggttttgatatatgtgaggcacctaaccc

SEQ ID NO: 643415 - DNA, 319 bp, Homo sapiens
caggccgatgaaggcgatgcgagtcatctgcgcgtttcccctatggattttggccgagggttagcgccgcccgtcccgccttcgccagtcaccaatttgagacgagacgcctcagttcggtttgcggaagcggtagacgaactgatccgtcttgccccggatcgcctcgtcgaagacgttcaggctgtgatcgtcggccgggttggcgacggctgtgctctctccgtcgaagacgaaaccggcggcctcgacctccttgcggagctgggcgccctcgatgcggctcaggctttcgaccactgtgttggcggcgcccgcc

SEQ ID NO: 643416 - DNA, 186 bp, Homo sapiens
  misc_feature (62)..(62): n is a, c, g, or t
  misc_feature (105)..(105): n is a, c, g, or t
  misc_feature (118)..(118): n is a, c, g, or t
  misc_feature (149)..(149): n is a, c, g, or t
cgcacgccgcgccgcacagagctctcagcgccgttccagccacagcctccgcgccttggttnagcttcaacatggcaaaaatcttcagccctacagagactgaancggggcatcgagnccctggatgctgctttcaaaagtatgctggnaaaggatgggtttaactcacttttttcaagaaagagt

SEQ ID NO: 643417 - DNA, 154 bp, Homo sapiens
tcagctgtcgagcatggtctggaatggccatccactggctatcgctgacagcgcatgctctgcacctgctctccggcaccacctggtccactatgcccacctgcaggcctccgccggcgggaagagcagccccagctgcagggcacgccgccgc

SEQ ID NO: 643418 - DNA, 777 bp, Homo sapiens
gtctcagcaaggttataatagagccctgtcaggtccacttgcaacatggccttgctacttggattagctccttaagcctggaaataacgttagcctgggtcatggaagaagtggacgcatcttttaacttagtgaaatagaagttgaacttgaaaactacttgtagaaagaagtccgtggtttagcagtgacgagctacataagtgaagtgtctatatataagagtagtagtctgacattggcaatcttgagaatcagattgccaacttcttgactttcaagtgttagacattgtatccttaagtggtgagcgatatatgtagcatgctgtgaaatgtctgttatagctctttaattgatcaggattaatacagaattatcatttgcgtttcttggtactttttatatcaagtgtaatcagaagctgtgatgtttggcttggtagtcctgtgcttagttactgtaattattatagggtttttaagaagagaggtgactggccataatgttaaggacaagatgacaggtgatacttatgagaagcggatagtcatatatacagcgttagaagtctatagggttaaagaattgagaacatccagtccccttgaatcgcaatgtagatacttgggacgcaatttataggagattatacgcagaagttgatggtggtcaaatggggggccatcatatgtggcgcattgttgcaagtgggactctttattaaccatggccttgaagattgtcttgggcagacgcgaacctgctggaagattc

SEQ ID NO: 643419 - DNA, 381 bp, Homo sapiens
cttcaaggcattctttggctggtcctggcggcttctagctttgaagtgtaggtgggcctgctgttctctgggcgttccctgcatcaccagccatcacactcattgcctcttaggctgctctttgggagtcagaggggcccatgagcgggggcagctgaattctcatctagcagggcatctatccactcggctgttgctaaggatgaagacaggaaggttcccaggcaccccttgccttgggacctttagccaccgcatctctgcagggtcagggaggcatctctagctgcctagtaccaaggcttctctgcaagagcaaaggtactatatagataatgctgaggtcagaagctacccatgtataatacagtcacgtgctcc

SEQ ID NO: 643420 - DNA, 113 bp, Homo sapiens
ctgaagggacgtgtacagttacaccacctagacccaccagggccccactggggcaggagcacttgttttgaagagatccagatgatgggggttactcctggacaaagatgctg

SEQ ID NO: 643421 - DNA, 679 bp, Homo sapiens
gtgcagtggtccgatcctcacggaccggcccggtgttcgattcgatatctcgatcatgaatctacctatactatggttacactgacagcagtatgcccgcgtaatcgagtctaagaagttactaagcaaaccgcctgtgaggaatgcagagcagtggagagactagatctttgtgcgattacagtaccgagtggtctctcgtgcaacatacctgtaggtgaccgtattccgtgagtggcgagtgtcactgcattcagttgcatagttagcgcccttcgtaatatcgtagtccgtccagcgtgcgcatggtaaatcttcaatacccaagtgatacgcgacacggggacactcgaagcgagcccgacagcgacatgcacctcaaatgccacacattgtgagagcgctgtcgagagagacaagaagatgacataagtggcccagtgactagttaacgatgtgacagaggagcttgaaccgccatgagatcgtacttatgagttaccttcactgatagtacccttgtaaggtccaatctatttctaactttatgacccatggaaaagacttaagggacatatcctgatacggagaatctttccttttggtgcattgcgactgaacacatataaagagcaaacaaaaagaaagaccacaaagcatatactcattctaaatgagg

SEQ ID NO: 643422 - DNA, 297 bp, Homo sapiens
  misc_feature (167)..(167): n is a, c, g, or t
cccaagcaatgaaagccgctgacactagcgctgtctttcggcaacattttggaagtccttacttttagacacattgtggcgactttttttaaacacaaaagctcctgagggtgaagtgatgtgatagattgtgcagctggaattgctgaacttcaggtgcccctggnttggaggacccccccgtatgacttggtgtgtgcgggattggcatcggtgtgacgttggggtgtgtgctcttggaatggtgcgagatttctcttgcagcccgggcgcggtgacgtaatacgccctatagtg

SEQ ID NO: 643423 - DNA, 337 bp, Homo sapiens
atttaagggatcgggtatgcagtgtattgggcagctggactgttgaacctgggaaaggtgttataggggtgaatgtctgagcctacaggaagttggggatcatagtgatggtgttgggggtcatgagtgggatgtcatcctggggagtgccgcagtgtcagggtgtagtcgggcaatgcatgtgaggcgcagtgttgtcatgtggggggacctggcctcacactctgtggtgggtggggcccacgttgtaattgctgccagttcctcactctggagcagctcccaactccggggccccggttccccgatgagggctaggcttgcgcagtggctccat

SEQ ID NO: 643424 - DNA, 139 bp, Homo sapiens
gaccatgtggtggaacaggtccttgaaacctggagcactaagcaactcagaaagtatacccacaatacgatggattgcgccatagtggtggtgcctggagcggctgtgcccacaagtttctccagattagccaagtagc

SEQ ID NO: 643425 - DNA, 286 bp, Homo sapiens
atgtgagggcgatctggctgctacatctgtcaccccattgatcgccagggttgattcggctgatctggctggctaggcgggtgtccccttcctccctcaccgctccatgtgcgtccctcccgaagctgcgcgctcggtcgaagaggacgaccatccccgatagaggaggaccggtcttcggtcaagagtatacgagtagctgcgctcccctgctagaacctcccatgctctcacggtccatttgtcggagaacgtaaggtcgtcaagcttccaagactccatccca

SEQ ID NO: 643426 - DNA, 385 bp, Homo sapiens
  misc_feature (20)..(20): n is a, c, g, or t
  misc_feature (50)..(50): n is a, c, g, or t
  misc_feature (82)..(82): n is a, c, g, or t
  misc_feature (96)..(96): n is a, c, g, or t
attggaataacaagttgggnaaaaaaaggcccccggccccccaagtcctnaggttgaacctgtaaatcctgcaaatgttggnagggtggggccccnggtgggaggtggttgggatccatggggggcagatttcccatgaaatggtttaacacccatcctccccggtttgtccctcatgacagtgagtgagttccttgagagaactcatcatttaaaaatgtgtggcacttcctctctttctctctctcctgctctgggtatgtgacatgcctgctccccctttgcctactgccataattcagagtttcctgaggcctcccaagaagataagccgatgccagcaccatgcttcctgtaagctggcagaaccatgagtaaattaaac

SEQ ID NO: 643427 - DNA, 184 bp, Homo sapiens
  misc_feature (32)..(32): n is a, c, g, or t
  misc_feature (56)..(56): n is a, c, g, or t
acgactatcccattacagatcatgcaacaggngctctgacagcagtaacctccatntttactagtaagagacccatgagaaatagggtatttattttgatgctctagttattcttagcaggacttcatgatactgtacatggtatgtgtgcagctacgtgggtctctatcatgatttttccttc

SEQ ID NO: 643428 - DNA, 489 bp, Homo sapiens
atttgggctgtgtgtgcgacgcgggtcggaggggcatgtcggtgggaaccgcgtaagaatgccgagtgagcccggagccccgcgtgacgctcctctctcaggtccaaaagacggcttttggttcgcgcgcagagagacccgggggtctagcttttcctcgaatagatgcgccgccctgcccttggccccgataacagacaaagagcaccgcagggcctgatcactgctgtggggctggctgatggctcgagccatggctcactggaaggtggtgcaccgctgtgatcgctggtagtgccgtgctgggcgctgctgtggggagcgagcggcgcaatgcctgctgctggactgccgctccttcttcgctttcacagcgccggcctacatcgccggctcttgtcaatcgtgcgcttcatgcaccactcgtgcggcggccgggcgaaggtgcgccatgggcctggagcacatcgtgcccaacgccgagctcct

SEQ ID NO: 643429 - DNA, 409 bp, Homo sapiens
gtagagatggggtttcaccatgttgtccaggctggtctcaaagtcctgacctcaagcgatccacccaccttagactgcactacgaggagctcccggcacaggaagagcctccagagccccccttgcagatcggcatctgcttaaggtacatggagctgatggtgaaattgaagcaaaatgaggccttccctggccccaaggggggtcccccagccccctgggtggggggggatggcaatttattccctatccttaggggttaggggtttccccccctgggttagatttacccgtgaagattcattaaaagaaatttcgcccccctgggtaatcttttactttgccactttagggggaatgacccggaaaatattttttttccttttgggaaaacacatattccccgcgg

SEQ ID NO: 643430 - DNA, 131 bp, Homo sapiens
atactctactcctgtgcccattttagcaccacaagcgacagtactctgaatttactgatgagtccagcatttctcatgcttcagtccgagatggatctgggagttatttcccaggaactagagctttgcca

SEQ ID NO: 643431 - DNA, 493 bp, Homo sapiens
  misc_feature (493)..(493): n is a, c, g, or t
cgtgggcagcagtcattatatggcaatggttcagcaccatgcagtattgcgatagaaaggtacaaattaaatagaactttattgaatttaacaaaagactcaatgtgaatgctagcactttcagaacacatgactgggtatttttctacatatacatatgctccatcagtcctgcttttaattttttactttcttttttctttttgttttttgagacggactctcactttgtcgccaggctggagtgcagtggtgcgatcttggctcactgtaaactccacctcctgggttcaagcgattctcctggctcagcctcccgagtagcttgaattagagagtgggttcggggtggtgagagtgagagagaaggaggaagaggctgaggggtgtcacattattataacttactttggtggtttcaggtccctgtgaattagcgctttgggttgcatgctgtgaagataagccactccttgggaacactgtaaacacn

SEQ ID NO: 643432 - DNA, 164 bp, Homo sapiens
  misc_feature (139)..(140): n is a, c, g, or t
atagtggtcatgcacgccggtatgtagggttgtacggtagaactgtattattcatcctatgtgggtaattgaggagtatgctaagatttgcgtagctgggttaggtttaatccacctcaactgcctgctatgatggatnngatgagagagtgaggagaaggctt

SEQ ID NO: 643433 - DNA, 119 bp, Homo sapiens
atcccctcccaggatgagaaattgctctaaggatagaaactctcccattaacaacttgagcttcctgacaatttctaggttggttttaatgggaaaatccataccagaaagatttgtca

SEQ ID NO: 643434 - DNA, 335 bp, Homo sapiens
tttaaaataaaaggcctttttcccctttttggggaagccccttttgtttttgggcatttttaacaaatttttccccttggggtttttggggggggtagggcccgtttttgggggcccccccccccttttttttttccgggggggggcctttttgggggggggatttaaaaaaaaacccagggttttttttttttgttccctaaaggggggagcccccctctcttcccgggcccccccttttgggggggggcccttccccttttttttcccccccccgggggggtttttttgggggggtttcccccgggatttaaaaaggcccctttctgggggga

SEQ ID NO: 643435 - DNA, 744 bp, Homo sapiens
ggcttccataccccgtttgcggggtccaagggtctcctggaggaggagatgacttctggtgcacagtcaaaccaagatgtgtgctccccagtagctgacttgtgatgctgtccggcccctctgctattcacccctagtctgcccatgtacaccatgcagcatgaggcgacagccactgcaggctgtcagccttgtccttttgctgtctgatgtctgtgtcaagagtgaatgagattgataaaaccacggagagcagtgatgcctggtgaaacacaagttcaggcctgacccatgctcacactagaggaagctaggatgcctagcctgaacaactgaagggtgcagacacccacgaaggcgtggattatcgtaaatcaactcagtgcaccttggcgctggtgcacgtaattggacaaaagaattgaaggaaattgcagaagcctaaccttgaggaaagaactgttaccaatgctagatggtcacagtgccatgtcttacttgaggtgactctcagcgtcaaggctaccaaaggatgctggaactattgctggtctcaatgtacttagaattattaatgagccaagctgctgctgctattgcttaccggcttagcaccaaaaaggtcggagcagaaagaaacgtgctcaatcctgatggaactgggagggtggcacttttgatgtgtcaaatcctcactattgaggatggaatcttcgcaggtcaaggtctacagctggagaaccc

SEQ ID NO: 643436 - DNA, 478 bp, Homo sapiens
tcggatgcaaaggtcagggtaaaactctaaaaggttaatttctggtcaaatgcaggtagatgatgagagaaaggtgggtattatcaggaaatgttttctgtaagctattcctttctcttagagcctgccatgcctcaccaaatggggcatttaattcatctttaaactggtcgttctgttagatcgctaacttagtaagtgcttttcttatagaaccccttctgactgagcaatatgcctccttgtattataaaatctttctgataatgcattagaaggttttttggtcgattagtaaaagtgctttccatgttactttattcagagctaataagtgctttccttagttttctagtaactaggtgtaaaaatcatgtgttgcagctttatagtttttaaaatattttagataattcttaaactatgaaccttcttaacatcactgtcttgccagattaccgacacttggcatccagag

SEQ ID NO: 643437 - DNA, 309 bp, Homo sapiens
  misc_feature (203)..(204): n is a, c, g, or t
  misc_feature (234)..(234): n is a, c, g, or t
ctttttgggggaatgggccccttttttctccacacccgggcccctaagcagcagtgtacgccacgacccctcggtgggaggtcggcctgcgctggtgccgcagatgcctaaggctggcggcctttgattggcccacgctttgcccttgccacgcccctctgcgctgggattggcttagtgctggattcccacccacccacagnnccccatggcgtctcagctccagaaccgacncctccgcactggccttggtcacaggttgagggggttctttccccgggcggtttggggtattggagtgaggtacag

SEQ ID NO: 643438 - DNA, 925 bp, Homo sapiens
tattcctccatttaaccttcattatttaacctatcaagatttttaataaactcatatgttactccaatttattcatcaatcaaatttatagggtgctactgtatgtatgaaatacaagtgattataacgcacagaatactctactaatcctttattgccgtctatagtctacatcaccgtctatgacagttctttccattcacatggactatgctatgtgtgcttaagtgtgtataatgttcacgttgtctagtgtgaagtatgccttcagtgtatggggctaactggtgtgtgtgtgtgtgtgtgtgtgtgtgttacgtgtgaacaaatctctctatggctgaatcgcggtatttatcacatcgtaggatatagggtcgtgctgatggcttatataaaatcatcaattagagccttcctaatttataccacatcattatatccattatcatgcattatttgtagacaattggtgactcaatccccagatccttgttctgactgcaagaagctagtgcacgcgagaacatactctacatctcgccattttcaagaaataccatttatttttacaacgactgacgcagattatttcctattctttaagacacttgacttatgctcaattttacaaatcacctggtatcagaaggttataccggagggccttcacttgcgagccactcaatgcctagtttggcatcagggcaatagttcatacgcaagggctgcaggaggcatacaagaggtactctatcaaggcacccaagttacaggttgtgaatcacaacgacacagtgtacaacacgctacccaagagacatgccacacacacaccccaccacagtgctaagcgaagatggccacagcaggacaaaacacttatcttcgttctgtctctccttagtatattagggaccagagg

SEQ ID NO: 643439 - DNA, 114 bp, Homo sapiens
gtgaaaaggatgtgatgtttctgattgagggctccgagggtgtgcggagtggcttccccctgctaaaggagtttgtgcagagggtagtggagacgctggacgtaggtctaacgg

SEQ ID NO: 643440 - DNA, 93 bp, Homo sapiens
gccagcaccaaccagacatctatgtacctctgtgccagctgctacgtgtggggttatgagcagttcttcgggccagggacacggctcaccgtg

SEQ ID NO: 643441 - DNA, 1601 bp, Homo sapiens
ccgctcttctgctgctgttatgtctacttcctcctgcttccccgaccgccgcacgcacgacatcatgaggtgaaatctgtgcacttgcatggcctgggcatgtgctggcaaccaaactcggcagccaatgtttttggtgactggtgatcagctgatgagcactggcatctgaccccacagggcacctaccactgtgggcacagcagaccatgcaagcatggcaactgcatcgaacgatgtactcacaatgtcatgtgccacctgtgctggcaaagtactgtagccccagctgcctgttgctctgtgtgatcttgtgagccccggacacccaatgggaacatccacagaggcagcactcagagggggcaccctactcgcggggccgaccaatcacttcacccggagagacaggaacaacacaataacaaacgacacaagaagccaacacacagagcgctgactagacagagcacaaacactgggagtgcaaacggagaacataccgaataacatacaccacgacgcaaacgaggaagcccgaagcgaaggaagtgaggaacagcgcaacgaccgggaatcggcaatgtgacagtgcgtccggactgcaccgcacacaaagggaaagaagacaatgcagacaacggccgcaggccggacaccagtagggccgctgaacaaaaggggccatctcaacccaaccagactctgcaccctcccgacaaattaccctacattgtaggacgacttcgtataaacagtgatcgacaagctaggtctagctttctatcttgcagacaaatggcgggtgttaccacccacttctccatacctaattccacgagacaacacgcaactaccccatgagggccaacaacggccgagtatagcgccccaaagcaacaagaggtggcactcccacaatgtaacaaccccaccacgtcttctataaacagagattgaatgcgcacgtgacccccttatcacagcacaccccaaacagatagactggtcgcacacagcacgccacacgcacgagcatggacgattgatagaatcgccccaccaataacccaaccagacatggccccaaacacccgcccttaccattacacaacgcacacacactacccacaagagcatccagcagcaacaccacaacaacccaacacgacccacgaacacaagcgacacgacgcacccattcaccaacgagggcgcaagtcacgcgcgaagcacaatccgagcaacacaccatacaacgccttaaccacaaaacagactcagcagagacagtatccacaagacgacaaccaccgctaaacgcaagcactagtgataaccaccaacgagcccaccgcaacacccgactaacatgtgcgactgacgacaacacatacgatcacaacaccacacacactggagatcgcaggcgaaggaaacgaacaaccaccagttacagaatgggtaggagctaacaaccaacaaccgagctacccaccaggcacacatcgagtacacagagcgggcgacaagaaccaccaaacgcggatggaccacgagcgacgagacaagaccaggcgccgcagcgaacaacgctaggg

SEQ ID NO: 643442 - DNA, 433 bp, Homo sapiens
tgtcacaacgttctagggcaaaaaaggtttcgtagacaaagtcataccttttaataaataaatgtctaagctaagatagtcatatcacgtttacaactagtgcttagtcacacataacttttaacacacacatcacagttttgcacaaaatcacatttacattcacacagtagttgttttcgacataattttttaaaattacaaaacaaaaaaatcaaacccattcctaaaatcgattaaaccacaaacatactagcacgcatccccacaaataacctgtcccagtccagttcaaaatatttcattcatgtgcagaatgccacacattttagagtgttcagcagtatctctttcaaagtgctttctattatgttggtgggtaaatcgattttaggcactgggttgattttttggttggtaattttccaaaatt

SEQ ID NO: 643443 - DNA, 815 bp, Homo sapiens
gctgacgaggaggagccatgtactgaggaggactgggagcgcctgcgtcagtgccctgcagggttatgcgcactttacagactatggctgtgatggcgatgagtgacgacgggtagtgaagtgtgtcctccagtgtacgtgatgtcctggcagggctgcctcgcgcgagtctccgtcagcactcaggacgggcttccagggaccgctaacacgtgcagtgccccatgcgccagagactccgtggtagacagggtggcaccttgtcctacagccctcgtcccatgtggaagttaccacttggtcattgtgttgctattcagcacatgggaaatctggaccaagcgtctgcatgtgtgtgatcagatgtgggccgggtgttgttgcagggctgggtcccgctgcctgccgtcgactcatccaaggaccctccaaggctggcagtgtggtgttgctactattaaggaaacaggcttggggcagccccactgctggtccaagtgtgtggagggctgagtgtgctggccctgtgactcaggaccagctctggagtctccagcccaccctccgcaccgtcccctcctgagcatgcactcggcgccagcagcctctgccagagtggaagccagagccctgcaggtgtccggcgcagccgtgggagctgaggatctggcacttgagaggcagcagcatcctttgaaggtcctctgcctccagcttgtggccctgcatccagataccttgcctcgtccgaggcagaacaccccctatcccttgaatctccaaaaacccactacacaggtgattgcaacggattg

SEQ ID NO: 643444 - DNA, 514 bp, Homo sapiens
  misc_feature (13)..(13): n is a, c, g, or t
  misc_feature (22)..(22): n is a, c, g, or t
  misc_feature (60)..(60): n is a, c, g, or t
  misc_feature (258)..(258): n is a, c, g, or t
  misc_feature (260)..(260): n is a, c, g, or t
  misc_feature (262)..(263): n is a, c, g, or t
  misc_feature (283)..(283): n is a, c, g, or t
  misc_feature (285)..(285): n is a, c, g, or t
  misc_feature (287)..(287): n is a, c, g, or t
  misc_feature (297)..(297): n is a, c, g, or t
  misc_feature (304)..(304): n is a, c, g, or t
  misc_feature (313)..(313): n is a, c, g, or t
  misc_feature (385)..(385): n is a, c, g, or t
tgggggaggagcnaagcccttnaacccaaaaggggcaggtgggggcttggttgctgaccnggccccaagtcccccacagagcaccttctgtagctccagcttgtctcccctggcttctctttgaaggagaaaaatgtaaaatatgcactgagaaagccagccccgcctgcttagtcagccccggcagcagggcagccatgggaactcaggaaaagcaggaaccctttccaaaaagcccagagatccccggggctaaanantnnaaatccccccggaatttgtnananagggggccanaaaaagnccctaggcntccctgttgcctcccccagatgcatgtgatggcatcaccattccccaaattgaatatcagcatgcggcctgnccagggactctttagatgcatgaatttatttatatgaaggctctcacagagacacacacagcacttcagtagcatttgcattcctggttaaagaatcaccaatatttaaaataaaaactttcctgaaaa

SEQ ID NO: 643445 - DNA, 1532 bp, Homo sapiens
  misc_feature (320)..(320): n is a, c, g, or t
  misc_feature (601)..(601): n is a, c, g, or t
gttcactcattccttgcgtaccctcgtaacaggtagctattccaggctacatatacttagcaacgaattacgactctgaggtaaccttccatacatacatgtcatatctagcagtttccaaacacatgtccccatagactgaacctcctcacttgcgtgaacagtaatctcactaaatctctttgaactgattctatctgtatatgctacacgatcactacatcattcctcatctccccacgtgcctcaacttatggtctcttcctcaccaggcctatccagtgtgtcactctattgagtcaatctactaaggtcaacantacgcagatgtctggggccttttgagataggttgatcattactatctcattctcacgcgtactgaataggaaatgtacgtaatgacatcacctcgtgcatttttggaatgtgagaactcggttcgactcgatccagaagagaagtacttactcataaggttgaactgttgacctatgaatcggtgtagacaactcctaacttatgcctcatatgcatacacaggggctagcgaggagtgtgtgggttagtaccaatatgaaagctgctagccctctcccangatgacaaacagcgttggactttgcattctaaaaagcctagttgcgagcccgttgaaaccatcgtcatcgtagagcacactagtcgtcttactaatctcctaagtggggactctagagtgggttgcccttatgactatcgatcttgtgggggaaatctagattgttgggaagtccgtgactcccattccccctgtatttccaaggacgtacacacgattcaacttctaggggccagacacttcaatgataaagggccccacctaatatggctgcctagtacactcttgaaacagatccgaggggtatctaaccggatccttgtccggcaaagctataactaatagttttaagcgaatagtttttagataaaatcaaccataaaacatttgggaacgtggggtggaaatttaacaattgggcgcgctcttaaggaaaggccgggacaaattttgttaaccttagtgtccctggcatttccatgggcgaaaggagtaatgatttccaaattaagaagcgatgtgcgggacaataacaaatgtgttttgcgccaagagggcaaagcgggtccaatcggacaggcgattggacaatcccccgtatatcaagcacaacgtctgggggagcgcctcgggggaaaagaacaccgaatcgcagagggcagcgcggggaccacttgcgggaaaagttccctttcagagattcttgtgggcgaagaggcccagaaaacgaacatttacccgccggggagagatggcacaacggggaactgcggtgcccccggagatgaaccaactctgcttgaccgcggtctcatcccaacgagagagagacacactcgtcagcacacacgatgtcgttgtcaaccagcagccgggatgctatcctcctttctaggacgcaccacagcggtcgtcgaccacacgggcgcac

SEQ ID NO: 643446 - DNA, 489 bp, Homo sapiens
  misc_feature (67)..(67): n is a, c, g, or t
  misc_feature (70)..(70): n is a, c, g, or t
  misc_feature (72)..(72): n is a, c, g, or t
  misc_feature (141)..(141): n is a, c, g, or t
  misc_feature (143)..(143): n is a, c, g, or t
  misc_feature (146)..(146): n is a, c, g, or t
  misc_feature (266)..(266): n is a, c, g, or t
  misc_feature (291)..(291): n is a, c, g, or t
  misc_feature (392)..(392): n is a, c, g, or t
gttaacctggggtcaaatgcacggattctcacctcgtacagttacgctctcccgcggcacgtccganggntntggaaggtcctgagcgctcaagtttgtccgtagtcgagagaaggccatggaggtgccgccaccggcgcngngantttctctgtagagcattgtgcctatttccccgagtctttgctgccgaagctgtgactgccgattcggaagtccttgaggagcgtcagaagcggcttccctacgtcccagagccctattanccggaatctggatggggaccgcctncgggagcttgtttggcaaagatgaacagcagagaatttcaaaggacctttgctaattatcttgtaaagacgggcagcttacagcagggcattcatttgggntggggtgtattggggggaataaccagctttttatttcatgttaaaacaacaatacattgagcagagccagggcagaatttatcattaaccgttttat

SEQ ID NO: 643447 - DNA, 254 bp, Homo sapiens
gctgtgtcttgaggatccccgagatgggtccctgccgattacgaagataataaaaacgaacaggatttgagtgtggctgccaattaagaaggccgaaaaccagacaactctggctcttacaagacagtttttggccagtgtgtagaaggctgatgtccttgctccttttaaaagtagcagctttgttgagatgcagtttgacacaccagtggggttcgcccgtttgaattgtgcagtgcagggcccactcgggt

SEQ ID NO: 643448 - DNA, 291 bp, Homo sapiens
ttggggggggggtggggtcccgtttgaagacccaactggttttgcttttaaaacagggctgtccctgttgggggcccggcccccggggggggggttttttttgggtttttccttccaaggggggggggttccgggtttttggtgatccgggaaaaaaaaaacgggcccggcggggggcccccctaaggttggggtctccggggggggtttccctccccccccccccgggggggcctttttttcgttgggggttgggaatggttcttttattaacccccctgttttgtttca

SEQ ID NO: 643449 - DNA, 2406 bp, Homo sapiens
  misc_feature (83)..(83): n is a, c, g, or t
ctttggggtcttttgctcatgttggagatcttgagcctcaaggtgcttgcttcagaattttgctgattctccctctccagacntattctgttcttgggacccaagcttcttggctccagcccactcccccactagaggagctggaaagtttggtgctgtggtcataccaaagatgggcaacacccagactcctcacccttttccccagcacattgtgagcgccatattcagagcctgcagacccgagtgttagagctacagcaacaattagccgtggctgtggctgccgaccgcaagaaagataccatgattgaacaactggacaagaccctggcccgtgtggtggagggctggaaccggcatgaggctgagcggacagaggttctcaggggacttcaagaggaacaccaggcagcagagctcaccagaagcaagcagcaggagacagtaacccgcctggaacaaagcctttctgaggccatggaggccctgaatcgtgagcaggaaagtgccagactgcagcaacgggaaagagagacactggaggaggaaaggcaagctctgactctgaggttggaggcagaacagcagcggtgctgtgtcctgcaggaagagcgggatgcagctcgggctgggcaactgagtgagcatcgagagttggagactcttcgggctgccctagaagaagaacggcagacctgggcccagcaagagcaccagcttaaggaacactaccaggcgctgcaggaggagagccaggctcagctggaaagggagaaggagaagagccagagggaagcccaggccgcctgggagacccagcaccagttggcattggtgcagtctgaggtgcggcggctggaaggagagctggatacagctcggagagagagagatgccctgcagctggaaatgagcttggtgcaggcccggtatgaaagccagcggatccagctggagtcggagctggctgtgcagctggagcagcgggtgacagagcggctggcgcaggctcaggagagcagcctacggcaagcagcctccctcagggaacatcacaggaagcagctgcaggacctgagtggacagcaccagcaggagctggccagtcagctagctcagttcaaggtggaaatggcagaacgagaggaacggcaacagcaggtggctgaggactacgagctcagactggcccgggagcaagcgcgagtgtgcgaactgcagagtgggaaccagcagctggaggagcagcgggtggagctggtggaaagactgcaggccatgctgcaggcccactgggatgaggccaaccagctgctcagcaccactctcccgccgcccaaccctcaagctcctcctgctggaccctccagccccgggcctcaggagcccgagaaggaggagaggagggtctggactatgcctcccatggccgtggccctgaagcctgtattgcagcagagccgggaagcaagggacgagctacctggagcgcctcctgttctttgcagttcctcctcagatcttagcctcctgttgggcccctcttttcagagccagcattctttccagcccctggagcccaaaccagacctcacttcatccacagctggggccttctctgcacttggggccttccatcccgatcatagggcagaaaggccattccctgaggaagatcctggacctgacggggagggcctcctaaagcaagggctgccgcctgctcagctggagggcctcaagaattttttgcaccagttgctggagacagtgccccagaacaatgagaacccttctgtcgacctgttgccccctaagtctggtcctctgactgtcccatcttgggaggaagcccctcaagtgccacgtattccaccgcctgtccacaaaaccaaagttcccttagccatggcatccagtcttttccgggtccctgagcctccctcctcccattcacaaggcagtggtcccagcagtggttccccagagagaggtggagatgggcttacattcccaaggcagctgatggaggtgtctcaactgttgcgactctaccaggctcggggctggggggctctgcctgctgaggatctcctgctctacctgaagaggctggaacacagcgggactgatggccgaggggataatgtccccagaaggaacacagactcccgcttgggtgagatcccccggaaagagattccctcccaggctgtccctcgccgccttgctacagcccccaagactgaaaaacctcccgcacggaagaaaagtgggcaccctgccccgagtagcatgaggagccgggggggagtctggagatgagcccccctaccctctctcctctttgttctctcattgttgttattttaataaatgctcattagtctgtaaaaaaaaaaa

SEQ ID NO: 643450 - DNA, 205 bp, Homo sapiens
gtgcttctccagttctcttgctgtaacagggatgcccgttactcagtgcaggcggacacggcattggtcaagacaccctgcttcatggggacacttgtttgtcgttcccaccactgattcggaccacagtacccttccattcttcacccagtgcgtcagcggccacttctgtggccatacgcttctcagagaaagtacggttgca

SEQ ID NO: 643451 - DNA, 243 bp, Homo sapiens
cgactgagttaatatttccgctagtaacttgatctatacataagtatacatgtatatatacacataaacacatatcaaattacctttagaagttcaaagtaagctgccctggatcatacacttttgttggagtagcactttatagtgagtaaagtgacatctatgcaaaggcattcacatctcacctatgaacttaatcttgctaattaaccctactttatttagcctgataaactgggtgat

SEQ ID NO: 643452 - DNA, 1476 bp, Homo sapiens
ggcgggaggctgccaacggttttgagcgtagggggaggcgtgagagggggatctcaggggaggaggtcaatcgcttgccccccactttggcaaattggggactgaggactggaagggtggagagtaggcggaaccaggtggtcgtcggggcagaggatctcgggctaggcttgagggcggcgtgcttcttagggacgacttagggcgtgactgagggttcacaaggtttcttttggggtggtcgggagggagagattctagggaacaaggaagctcgctatggctttcttgccaggaggggtcgaagggaaagtacaagggagctgaccctgggtagaacgggtgaagggatgggggagcgtgaggttccgccctctcttgagactggaaccaattgagggactagtagggcagggggacagaaattgggctcctagtggatttgggtccgtttccgttgggacgttttgggtgtgagaacttaagagctcagttgaccggggatagcctgtgccggagttgatctgcagcttccagcactcgtagtcgggaagaggagcttcagcagcgctgttgtcccacagtaggtcttctgtccgcacccgctctgcgctgcaccctcttaacgctgttcccaggagctggggaaagggatgcttttgcccactcccatggcccctggaactggtggaaacctttcctctaaccagaaagcctcgatatccttaattcaccaaggatccttggcgtggagtcttcctcccttctcccaagtctttctccgtgaacttttcctcctggactttgctaaagcagaacctcccagctctttgctgtctccggttgtctcttccctgtattcatggcaacatcagctgacagccccagttcacccctcggggcggaggatctcctgagtgattcatcagaaccccctgggctcaaccaagtgtcgtctgaagtgacctcccagctctatgcttctttgcgcctcagccggcaggcggaggccacggcccgagcccagctgtatttaccctccacctccccgcctcatgaagggttagacggcttcgcccaagaattgagtcgaagcttgtcagtcggattggaaaagaacttgaagaaaaaggatggttctaagcatatctttgagatggaaagtgttcggggtcagctccagaccatgctccaaacctcacgtgatacagcctatcgggatcctctcattcctggcgctggctcagagagacgggaagaggactcctttgacagtgatagcacagccaccttgctcaacacccggcccctgcaagacttgtctccatctagctcagcccaagccctggaggagctgtttccccgctacaccagccttcggccagggcctccactcaatcccccctaccctctctcctctttgttctctcattgttgttattttaataaatgctcattagtctgtaaaaaaaaaaa

SEQ ID NO: 643453 - DNA, 440 bp, Homo sapiens
tctgggtactctagaggatctcaaattgaggtctgggtgggcgctgtaatccagctacttggaaggctgatctcgaactcttgactacagtgatccaccttccttgtgctacccaagtgctggaattacaggcatgagccaccgcacccagcctcctttttctttagtttcttgcttgcttctgcactcttcttttttgtgtgtgtaaatactgaatcatgcatattcttttctttttttattttcccgttggctaggtctatgctgttggcatccagggcattgttttgtcctccctgataatgctcgggatccagggtctcctaatttgtggggaggcaggctgcccattggaacggtttatagtgtgtttcccatccctggctcttaaatctttgtaggcatacttctccgctttcccacaacccggacctcatttt

SEQ ID NO: 643454 - DNA, 1359 bp, Homo sapiens
  misc_feature (608)..(608): n is a, c, g, or t
ttctaccgctttcgccgcacatgggtaacaacgctgtttccccagaattgctaagttggcgataggtaagggggccccttggacctactctagcaggacgctctcgtcatatgccaagatagtcttacagcggctctcggtataggtagaccactccttgagtctgcgtgctgaacagggtgcctgccaagttgggagcactatttgtgcgtaaacgcgtcctctgggggcagaaaaaaatagggactagtagtgggctcttaagtctggtcagtttcctcagaagttaatccataccacattcaacttggtaacccgctcacttaaagtgacctgctcctaagggagtcccccctcgagataaggcctaaatgccagtgtggatcactcctggagaattcttgggccttgtacttaaattcttggcctggggtattgcgtcggaaatatgtggcggcgattcgacccaagatttggggacttgatgaaccttgcccgttgccttgggaagctcataccttacactattacagcgcagggggcatcaccccgtaacattatgccttctgtatttctcatagaacggcacacttgcatcaactcgtagnttatgcaacgccactgcatcatggagtgcactgttgtgaattcgtcgggcattgcgctctttcagtcccaagatattgggtggggcacaaaaagggtgaattggcatggctcccttattgtttgagacatacgggttttgtcgctcggagaatctttattcgaggattggcaaactcgcgcactggtgagaagttggtgagccaccttgtggttccattcgggtccattatgatgcctctcgtctaattggaggaatcctcaatgctcttcatgtacctagcctttacgcgaactcgctgagacatcggttgacctacttacgtggtaacgtccagttggccaatagataacggatggacttagctctctttcgtacagacaatggttccttcatgtatcgactacgccagaacagtacatgcaatgcgttgcaggaacgatatcagcgcaagtgtaatggagattcaaaaaagtatgatctccaattaatcttcgatgactcgagtatactatcagtggatacgaggtataactatatatgtagtgcgagtatgcaatctactgcgtgggcaagctcggatggcaatcacgaaacgataagtgaacgtgagctcagcttctggcttctctgctagcatcaaatatcttgtttaatggggcagatatgcattgaatagttagtacaagcagctttcgttgaagtatgtagaagataagaaacatgtcatcatattaatatcgttccggtaa

SEQ ID NO: 643455 - DNA, 1285 bp, Homo sapiens
tataaaacgccaggcgtttttaaacactcgacgtgccagctaacctactacactggctccataccgcgctacgctgatgtgccctgcgtcgctgtgctgacactttctgtgccaccgcatgtgcacgcagcgggtggagctggtggaaagactgcaggccatgctgcaggcccactgggatgaggccaaccagctgctcagcaccactctcccgccgcccaaccctcaagctcctcctgctggaccctccagccccgggcctcaggagcccgagaaggaggagaggagggtctggactatgcctcccatggccgtggccctgaagcctgtattgcagcagagccgggaagcaagggacgagctacctggagcgcctcctgttctttgcagttcctcctcagatcttagcctcctgttgggcccctcttttcagagccagcattctttccagcccctggagcccaaaccagacctcacttcatccacagctggggccttctctgcacttggggccttccatcccgatcatagggcagaaaggccattccctgaggaagatcctggacctgacggggagggcctcctaaagcaagggctgccgcctgctcagctggagggcctcaagaattttttgcaccagttgctggagacagtgccccagaacaatgagaacccttctgtcgacctgttgccccctaagtctggtcctctgactgtcccatcttgggaggaagcccctcaagtgccacgtattccaccgcctgtccacaaaaccaaagttcccttagccatggcatccagtcttttccgggtccctgagcctccctcctcccattcacaaggcagtggtcccagcagtggttccccagagagaggtggagatgggcttacattcccaaggcagctgatggaggtgtctcaactgttgcgactctaccaggctcggggctggggggctctgcctgctgaggatctcctgctctacctgaagaggctggaacacagcgggactgatggccgaggggataatgtccccagaaggaacacagactcccgcttgggtgagatcccccggaaagagattccctcccaggctgtccctcgccgccttgctacagcccccaagactgaaaaacctcccgcacggaagaaaagtgggcaccctgccccgagtagcatgaggagccgggggggagtctggagatgagcccccctaccctctctcctctttgttctctcattgttgttattttaataaatgctcattagtctgtaaaaaaaaaaa

SEQ ID NO: 643456 - DNA, 1453 bp, Homo sapiens
ctcatctcaaaaaaagaaaaagaagaaaaaattaggatattttaattttaattttatttatttatatacttatcatttatttatttgagacaaggtctcactctgttgcccagagcgctcaagcaatcttccttcctcagcttcctgagtagctgggactacacacacgtgccattgcccccagctaatttttaaattttttgtagagatggcatctctctatgttgccaagcctggttcaaactgccagcctcaaacggtcctcccaaagtgttgggattacaggtgtgagccactgcatccggaaatttataatcttattaaagtgtttgtaccatgtcttatctctttaaacctactgtgctttgacccttctttctgcctctctcctggtcaggctcctcctgctggaccctccagccccgggcctcaggagcccgagaaggaggagaggagggtctggactatgcctcccatggccgtggccctgaagcctgtattgcagcagagccgggaagcaagggacgagctacctggagcgcctcctgttctttgcagttcctcctcagatcttagcctcctgttgggcccctcttttcagagccagcattctttccagcccctggagcccaaaccagacctcacttcatccacagctggggccttctctgcacttggggccttccatcccgatcatagggcagaaaggccattccctgaggaagatcctggacctgacggggagggcctcctaaagcaagggctgccgcctgctcagctggagggcctcaagaattttttgcaccagttgctggagacagtgccccagaacaatgagaacccttctgtcgacctgttgccccctaagtctggtcctctgactgtcccatcttgggaggaagcccctcaagtgccacgtattccaccgcctgtccacaaaaccaaagttcccttagccatggcatccagtcttttccgggtccctgagcctccctcctcccattcacaaggcagtggtcccagcagtggttccccagagagaggtggagatgggcttacattcccaaggcagctgatggaggtgtctcaactgttgcgactctaccaggctcggggctggggggctctgcctgctgaggatctcctgctctacctgaagaggctggaacacagcgggactgatggccgaggggataatgtccccagaaggaacacagactcccgcttgggtgagatcccccggaaagagattccctcccaggctgtccctcgccgccttgctacagcccccaagactgaaaaacctcccgcacggaagaaaagtgggcaccctgccccgagtagcatgaggagccgggggggagtctggagatgagcccccctaccctctctcctctttgttctctcattgttgttattttaataaatgctcattagtctgtaaaaaaaaaaa

SEQ ID NO: 643457 - DNA, 294 bp, Homo sapiens
agtattacatataaatatccaaaaagtatctcttacgtatcaacacaaaacgtataagtcattcctaactaatagagctttatagcattttcctagacaggaaggggaaaaagagttagcatttaaaagtccggaacgcttattcgtgggttaattacattagacggtttgacttagtccaactaccttcttaataaaacatggataaaagtattacatgggtccactgttataccagacaacatgtggcaaattaaattctggtatcatgttatccaacacagctcagaaaac

SEQ ID NO: 643458 - DNA, 254 bp, Homo sapiens
aaacaccgcatctccttcaatgcctagtttatagagggtgtttttttttaacatgaagagaagtcaattttattggaagccttttctgtgtctgtaagatgatcttgtggttttgtttttaattctgcttatgtgatgaatcacatttattgatttgcatatgttgacccaactttgcatcccagaaataaagcctacttggtcatagtggattagctttttgacatacggctagattcagattgcggtgtttg

SEQ ID NO: 643459 - DNA, 778 bp, Homo sapiens
  misc_feature (603)..(603): n is a, c, g, or t
agcggagcctgtcccgggccgcgagcgcttccagtcgggttacttctggtgggacatagaaagggcgaaccggtctgaacggtcgagacgctttttccctgctacggtctttgccccggagtctgagcaggaggcagtcaaggtcgtgagcttgagtctcgagtggtcccttgaccgtgtggtccacggggggcgagcggtcaagacctccacgcccggcagctcgcgtgggagcaggcaagcacggtctggggctctcctgggtacgcgcgagacgacgccgatgacgactcggctggccatcactcctcacgcagggctggtgcagtctgactgagccccatggtcgcactcaggttaaaggccggcaagcattccagcgcgccggagtcagcaccctggtcctggtcaatgtccgggtgccttccatgacgccgtcccacaaaggcagcactgggtgtcccctcggcacgtacaccttcagcgcgggcgaacgtcgctttcgtacagtaggcccgatcaggaagtgctcgtggacagtagggacagcggcagccaccgggactccggcacgaggcctagcggacattggcggtggtcacnagggtacagaccgagcggatcgacacactggaaggatatcagccggcacgtgccgcgtggcaggaatgcccggacgcgccgcaaatgggcacgagggtgctggggaggcttaggacaggatgacgaaaagggctgaggaagaacgcaagggacatgccgggccggcagacggggc

SEQ ID NO: 643460 - DNA, 105 bp, Homo sapiens
attgcatccaaagggagaagacaaagcgggcgccggcatacgccatggagagggtggcagagcctgctccggctttagccttgtaccacctccgtaccttggtac

SEQ ID NO: 643461 - DNA, 1159 bp, Homo sapiens
  misc_feature (836)..(836): n is a, c, g, or t
cgagacaccggtggcggacatagagacccggcggttttatactcccgagtttttattattgtccgcgggggtgatacatttgtaacgagggagacctttgtcccctttggccttttgggagcgcccctgttagaaaccgggggcgacacgagaacgcgcctggtgtatccgtttcgggtttttcccgggattttgcggaaccacccggctttccgaggggtttttgtacttttttgggagagtaggcccccccctttttaaaacaatgaggtgcccagagaaaaaaacaaccttttggggggggacacccccacaaggggggctccccaaacttttttttaagggtttttcggaagggttaagaatacagtgtttacccggttttatggggtgccacaccacgcgagtttttatagggcggaggaggttgcgcacacacttgttcccccttcttattgtgtgagaattgtgcggatgttaaccacacccctaatatatttttaagaagggggctcggggggaaacaactctccacctctcctcgagaagattaagaaaataaagaagagggggtgttttttaaatatcccccccgctataattctcctagtatttgtggagaggggttatatatatatttgtgcgggagtgattctcaacccgggtgtaaaggtgtagaaaataatatttgtcgcgcccctctctctgaagcgccacccctcgccacacatagcgttgtgagagaggttatgcgcactcttttgtccccctgcgaggccacgcgcgcggagagagtttattctccgtgtgggtataaaaatacattctcttgtggntccctctctctttgagagaacaaggccgcattgtctcacacacaatttttttttctcccgcggaggcgacacacacactctctgggagagtactcacgcgggggtaaaacccacaatatgcaagtgttttgtgcaaaaatttttcccacagaggtgtttttttttgtgagaacaaaatatacacagcgtgtggggtaccattataccacacatatataataggttaaaagagatattaacaaacacccacccaaggccccccctttcccaggggtttaccccctttatatcccccccaataacccttgtgtatcacggtgtta

SEQ ID NO: 643462 - DNA, 184 bp, Homo sapiens
atcttttaaggggccatcttgttggtgctaagagaatgttgctctttatggttgagcgggtggtttctgctgagggggagattggattgatgcataatgtggatacacaaggcacagtgaatgagggagaggaagccaaagggaagagaaaagtttatgtttaaatttttctcgtcttgccatc

SEQ ID NO: 643463 - DNA, 131 bp, Homo sapiens
aaagctccttccctgaagatggagcggtatgaagcgagaggccactgcagacgacctcatcaatgttgtggaggagctaactcggatccattagccaatggcagtggtgtgccccatttgctgaccattcc

SEQ ID NO: 643464 - DNA, 794 bp, Homo sapiens
  misc_feature (378)..(378): n is a, c, g, or t
gtatgaacctaatcctcattaccatgaaaatgctgtcatacagaaatgttcaactgtagaggacagttgtatttcttcttcagcctagtgaaatggagagtggtgcacaagaactcttctggccaaggcccgttgtaaattaaagaagatggctaaacaaaagaactatttgggccattaaggcttgggcttaaaacattgtggggaacttttttccccccaaagaaaatggttttccccccccctttttggggggggccgggaccccaaaagggggggacacgacaaaggtggaccctcgtttaatacatgacgaaaccaatattgcagttgtacaaatacaggtgtggaacacaacaaattaacatcattacctgncgaagctggacacacacttgggacccgggaaaacaacaacaccgtttttttctcttcccccccaagacaccaaacaccgtgtttttttataactaaaccacacccaaaaacggcgtgcgggcggcgcgacaacaaactgcggggccaaacaaaaaaacgttttccccctctttaaaaagacaccccgacaaaaatgtttcttattccctcccaggccccccctagccaccccctgtaaaaaacacatcgcgtggggtggcacacacaaacacggcgtttttcggggggccttggggaaatttaaggcggacccttaaaaaacagttggaagaaatggggctcttaacaaaggaatggaaacgttctaacgttccagcaacatcaataccagatggcttaatgcaagaaatcaggat

SEQ ID NO: 643465 - DNA, 862 bp, Homo sapiens
gagggctgaaccatcctgtcgtgtcttgtcggctcggcggaaatgcccagccggagggacgcgacacagaggacatctctgtgctgatccccaccgataattctatcccacatcaaggcaggtattctataggacagtcaagagttacatggaaataatagaactttggtggatggattgaacatgttctagatcctgtatggaaggtaattaggaatgggtattataggggccattaatcagaatcaggagatatatttccttttcttgtctatgaatacagaacaagataggtgccgtgctcttgaatagactaggcaagtagtagtcgggatgatgctgacacaaagaaagtgaactacgcgaaatgccaaaataggaccccacttacgatcataggcatgcgattcacatttgcacagacagatgatgtgcgaatcgctgattatgtcatcggactaccaaaatggatgatggctattgtgtgtatagctttctgataagatctttgttctggtcttgagtcagttttcatgatcaaacgggactcttttataacaaggggacggggaaccttgacgtacatataattccttaatacagactcgggggatccgaattaagtaggtaatacatagtttgttgatatgtcatgggactagtgttaactaccaagtgtgatatttcccctgcgtcacggtccctactactttgtagggggttgtgctgtacttaactccgagtccatgatggaaagtatgaaatgatggcttatggttgttttgccggttaattgggggggaaaaattttggggggggggcaaacaaatttttttttaaggttggtgaaatcaaatggttg

SEQ ID NO: 643466 - DNA, 415 bp, Homo sapiens
tgttggggtacaggtcgaggatgcaggagagtgtgggtcaaccccaagaacacaaacccggagggaggggcaggccagagagctgtgaaagcagcaaggccctccaggaacactgccggcgaggacacctccagcagaaccacactcaaacacgactgccgcagccaggaaacggtaacgctgtagctggttccacatctgagaggtggtcctgccagaaattcatttctttttccctaaaggaccaactgcagaattaagcccaaagaacagaaagttgacacctgaacaaaagatcaccgaaaggttttcccgtttaaccaacctgctgcaaacccacacgacggccagcaggcgcctctcttaagacgccctgggtcagcttccccagggtttttcaattaaagctgccatt

SEQ ID NO: 643467 - DNA, 567 bp, Homo sapiens
ggaaacaaccatttctatatagagtattgtaagacccacaggattttaaaatttgatacaatttaaatttgttcattgacactgtattttgtgctgttgtgaggaggaaggattccctaaaagtaaggaggaaatgtttaaagaaatggaaagttttaaaggtttagaagttgaagggtgattaacttttttttttttttttggtcttttctaagagttgcattaaaatgggactatttaaaatgtaacaagttatttaaattgtaattcagttgttagaaaactgccaggcctggaataaaaaaaaaaaaatgtttacaggaatctgtgtacttttccttaatctgttataaagaccttagagaaagaaaaagattcactaataaaattctaaattcctattctgttttgaaacagtaatttaaccggaagagtgaccaaaaaaaaaaaaaaaaagaaattgcttagtttttcattgtctagtttagattctggtttgtagtaaggtagtattaaaacctcagaaagtaacttttattcattacgaagtatttaagagcatttctt

SEQ ID NO: 643468 - DNA, 311 bp, Homo sapiens
ctgagacatagtctcgttctgtcgcccactgcactccagcctgggcaacagagtaagactccatctcaaaacaaacaaacaaacaaaaaaacaaaaaaaacctaaggaaaaaaatagcaaaaagtagccaggcgtggtggcacatgcctgtagtcacagctactcagaaggctgaggtgggaggttcacttgaggccaggtgatgatgctgcagacggctatgattatgccactgccctcaagcctggggaacagagtgagactgtttcaagaaaaaaaaaatggaaataaagttttttgtgattggtaaa

SEQ ID NO: 643469 - DNA, 1975 bp, Homo sapiens
  misc_feature (921)..(921): n is a, c, g, or t
ttttgctgttcgatctggtggagctactggcgtggtagttaaaggcccagatgataggaatcccatctcatttagaatggatgacaaaggagaagtgaagtgcattaagttttccttagaaaataagatattggctgttcagaggacctcaaagactgtggatttttgtaattttatccctgataattcccagctggaatacacacaggagtgcaagactaagaatgccaacattctaggattctgctggactagttcaactgaaattgtcttcataacagatcaaggaatcgaattttaccaggtattaccagagaaacggagtctgaaactcttgaagagccacaatctcaatgtgaattggtacatgtactgccccgagagcgccgtgatcttgctgtctaccacggtcctggagaatgtcctgctgccttttcactttagggctggcactatgtcgaagctgcccaaatttgagattgaattaccagctgcgcctaagtcaactaaacccagcctttccgaacgagacatcgcaatggctaccatatacgggcagctgtatgttctcttcttgaggcatcattctcggacctccaacagcacaggagcggaggtggtcctctatcatctaccacgagaaggtgcctgtaaaaagatgcacatattgaagttaaataggacgggaaagtttgccctgaacgtggtggacaacctggtagtcgtgcatcatcaggatacagagacatcggtaatattcgatatcaagttacggggagagtttgacggctccgttaccttccaccaccccgtgcttcctgctcgatcgatccagccctatcagatccccatcacaggtcctgctgccgtgaccagccagtctcctgttccatgtaaactctattcttcatcttggattgnctttcaacctgacatcattatcagcgcaagccaaggttacctctggaacctccaagtgaaacttgagcccatagtaaatctcttaccagacaaaggaagactcatggactttctcctccagagaaaggaatgcaagatggtcatcctgtctgtctgttcacagatgttaagtgagtcagacagagcatcgctgcccgtgatagccactgtttttgataaactcaaccatgagtataaaaagtacctggatgccgagcagagttatgcgatggcggtggaagcagggcagagccgaagcagcccgctcctcaagaggccggtgcggacccaggcggtgctggaccagtcagatgtgtacacccatgtcctgtcagccttcgtggatttcttcctctacggagtatttaaacactatcggcaaaagaaggagatgcctcataaatttgtgatagccgtgctgatggaatacattcgttctcttaaccagtttcagattgcagtacagcattacctacatgaacttgttatcaaaacccttgtccagcacaaccttttttatatgctgcatcagttcctgcagtaccacgtcctcagcgactccaaacctttggcttgtctgctgttatccctagagagtttctatcctcctgctcatcagctatctctggacatgctgaagcgactttcaacagcaaatgatgaaatagtagaagttctcctttccaaacaccaagtgttagctgccttaaggtttatccggggcattggtggccatgacaacatttctgcacgaaaatttttagatgctgcaaagcagactgaagacaacatgcttttctatacaatattccgcttttttgaacagcgaaaccagcgtttgcgagggagccccaatttcacaccaggggaacactgtgaagaacatgttgcttttttcaaacagatttttggagaccaagctctaatgaggcctacaacattctgaaatcacttgctgtttttttatataaaaatgtgtacaaagttaatttattgcattaataaagctctttaa

SEQ ID NO: 643470 - DNA, 390 bp, Homo sapiens
gggaagctcatctgcatccggagcctccagcccgaacttccgccatccgtgcccgtcaggctagtcggtctctgggtgaacttgaggttcccgcaatggccagggctgtgacaatctctggggacgtgacaaaggcatgggtctcggggtttgcgtcgttgcggcccgtgaagttcctgttgtaggaggtgacgaccgcgcccccccccccctccttgatgtccttcctgtcccactgccaactgcaggggccacacgcatcggccaggacaatgccacccagatccctcaagatctgtgcatagccgtcccgctcaatggtggcccgcatctcctcggaacctggagtgatggtgaactgggacttgcacttgcagcatgggccagtgc

SEQ ID NO: 643471 - DNA, 284 bp, Homo sapiens
  misc_feature (198)..(198): n is a, c, g, or t
  misc_feature (205)..(205): n is a, c, g, or t
  misc_feature (228)..(228): n is a, c, g, or t
  misc_feature (231)..(231): n is a, c, g, or t
  misc_feature (235)..(236): n is a, c, g, or t
  misc_feature (242)..(242): n is a, c, g, or t
  misc_feature (244)..(245): n is a, c, g, or t
  misc_feature (257)..(257): n is a, c, g, or t
  misc_feature (260)..(261): n is a, c, g, or t
  misc_feature (264)..(264): n is a, c, g, or t
  misc_feature (268)..(268): n is a, c, g, or t
  misc_feature (272)..(272): n is a, c, g, or t
  misc_feature (274)..(274): n is a, c, g, or t
  misc_feature (281)..(281): n is a, c, g, or t
cgagaaacccaaagtttacccctgggaagtcccccctcagggcctgagttcccccgtctcaaagagtttcccccggggagagggtttaaggggaaagggcccccccctgctccccagttccagcctggcccccccccctcctttggcctttggcccttttttcccagggggcccccccccattgggggcccccgggtnttttttnccccccccccccccccccccctnggntttnnttttgntnntgttgggggggnatnnatnaatnaagngnttttttncca

SEQ ID NO: 643472 - DNA, 1996 bp, Homo sapiens
  misc_feature (921)..(921): n is a, c, g, or t
ttttgctgttcgatctggtggagctactggcgtggtagttaaaggcccagatgataggaatcccatctcatttagaatggatgacaaaggagaagtgaagtgcattaagttttccttagaaaataagatattggctgttcagaggacctcaaagactgtggatttttgtaattttatccctgataattcccagctggaatacacacaggagtgcaagactaagaatgccaacattctaggattctgctggactagttcaactgaaattgtcttcataacagatcaaggaatcgaattttaccaggtattaccagagaaacggagtctgaaactcttgaagagccacaatctcaatgtgaattggtacatgtactgccccgagagcgccgtgatcttgctgtctaccacggtcctggagaatgtcctgctgccttttcactttagggctggcactatgtcgaagctgcccaaatttgagattgaattaccagctgcgcctaagtcaactaaacccagcctttccgaacgagacatcgcaatggctaccatatacgggcagctgtatgttctcttcttgaggcatcattctcggacctccaacagcacaggagcggaggtggtcctctatcatctaccacgagaaggtgcctgtaaaaagatgcacatattgaagttaaataggacgggaaagtttgccctgaacgtggtggacaacctggtagtcgtgcatcatcaggatacagagacatcggtaatattcgatatcaagttacggggagagtttgacggctccgttaccttccaccaccccgtgcttcctgctcgatcgatccagccctatcagatccccatcacaggtcctgctgccgtgaccagccagtctcctgttccatgtaaactctattcttcatcttggattgnctttcaacctgacatcattatcagcgcaagccaaggttacctctggaacctccaagtgaaacttgagcccatagtaaatctcttaccagacaaaggaagactcatggactttctcctccagagaaaggaatgcaagatggtcatcctgtctgtctgttcacagatgttaagtgagtcagacagagcatcgctgcccgtgatagccactgtttttgataaactcaaccatgagtataaaaagtacctggatgccgagcagagttatgcgatggcggtggaagcagggcagagccgaagcagcccgctcctcaagaggccggtgcggacccaggcggtgctggaccagtcagatgtgtacacccatgtcctgtcagccttcgtggatttcttcctctacggagtatttaaacactatcggcaaaagaaggagatgcctcataaatttgtgatagccgtgctgatggaatacattcgttctcttaaccagtttcagattgcagtacagcattacctacatgaacttgttatcaaaacccttgtccagcacaaccttttttatatgctgcatcagttcctgcagtaccacgtcctcagcgactccaaacctttggcttgtctgctgttatccctagagagtttctatcctcctgctcatcagctatctctggacatgctgaagcgactttcaacagcaaatgatgaaatagtagaagttctcctttccaaacaccaagtgttagctgccttaaggtttatccggggcattggtgccactgcaccacttgtgcaagataatccctatataacacccatcaggcttagcactacagattcttctaactcaagttcagatatgtacactatcataaccaccattgggcagggagccgccatttctcatttccggatcggccttggccagaagggccctatgtccgccataagtttgatgaaccatctctaagtgggcggatcactgtgttcggtcgacatgtgtgggttgatatagagttccgccggcactgtgtctggcgtaatcatcgcgctgggcaccctatggaaagacgaaaagatg

SEQ ID NO: 643473 - DNA, 659 bp, Homo sapiens
tgttttccctataccgggccaagtaaagttttttagtttattttcccccttccaagtaatgctgttaagttttgtatataagacttttcctgtattttaaattattttgttatggtagagttccataaatggaataaatgggtcaaatatttttgaagctgatacccaaagtacaaattactttccaaatgggtgaatcgatacttgcagtgtatgagaggatccttttcagcacattggttgtacattcctttacaaatatctaatatggtaagcaaaaatggatacttaatctttttaaaaaactttgtatgaaatttctaatgagtgtgaactttttcatatctgtatttgctgcttttaggatttctttaagttgttgccagcctcagttaatttaataccatacttttcttactgttattatcaaagatatcatttatataacaagaaggttaaccttttgtcatctaattgcaaatatttttccagtttgagcatgccagtttttttcttgcttttatttggaggggagtcattttgcaaaattttttatttttacgtatttgttatctttttccttttgtctttgaaagctcagttttaataatcaggtttctaaaattttgttttgcagtaaccagtgaaagaaaaaaaaa

SEQ ID NO: 643474 - DNA, 289 bp, Homo sapiens
catcacccactaggaccataggatcttccacaccgtgtcctgagcacagaaacaatcaccagtggttatcacaagacaccacccccctatccaccttggtgaccagactccccactaccatcagcaggtctacacctacatctgagagcacctacactacttctcccagcagcagtgtcacagactccactagcaaaatcgcctactccacaagtatgacaggtacattgtccacagagacttctctcccacccacctcttcctctctcccaaccgacgaggaccattg

SEQ ID NO: 643475 - DNA, 947 bp, Homo sapiens
tcccatcttatggctttcctttgtggaatgactcagaagaactaatattattgcatcactggtatcccacacgcgtctgtgccatctctccccatgctcatcatcggaatcccccagtcctcttcctgccgtacttgccttctctggaagtggctctgactgagtagacaggggctagctgagaagcgttccccagatctgagctcctagacacgtgcccctgcccaggacatcgtcctagcccacaggatcctgttgctccttctgcagagtcctttgatatcttccagacgccagtcgtcagtcagtggtcctgagcagaggtccatgcggatggtggctctgcgggaagtgactcatgacaccttccctagaatggtgggaaacacgcccaatctaaacatcatcaggacactctctcctccatcgtcatctggactctcacgtaagcctacaatactgcagtccgagattctcaagagttattctgcgcttctggattcctgccgtaccgcgagattacaccagccttgattgagattctctattgcctccatgagatacaagattaacactcatcctggttttaaggagaaaaatgattatccttcctcttgtgtttatacgtatgatataactttggatattttttccctactaatgtcaatgtcgaaagtttcgagtcccactgatgtatggaggatcggggatcatgtgtgcggagcgtgatttggtgtcatcggggagtggacttcatcatgatatgacttggtgttatcttggtctattagcacccacaagatctgattgtttaaaagtgcctagcagcatccctcttctctttttctcttcctctctccccatgttatgccaactccacttcactgtccactgtgagcagaagcactctgaggccctcagcatacgtccaagtcatgctttccttt

SEQ ID NO: 643476 - DNA, 135 bp, Homo sapiens
ccacctgagcctaccaagtaactgagactgcaggcatgagctaccacacctggctaatcttttattttcttgagagatgcggccttgctatgctcccgaggctagtctcaaactcctgtgtatacacgatcctgc

SEQ ID NO: 643477 - DNA, 137 bp, Homo sapiens
  misc_feature (62)..(62): n is a, c, g, or t
gagaagtaggaacgtgggggggtatgacgttctatgaggctaagatatatttcgactggcgngtggtaggctggagctaggtggctgagcagagtagttaaatgtagaagacttctgtgagccagttattagaacta

SEQ ID NO: 643478 - DNA, 882 bp, Homo sapiens
  misc_feature (231)..(231): n is a, c, g, or t
cttacctctcaccgtttctgcaacaatagaggtttaatgtactaccattacctgcataacgtcccacaccacccctgggggaaccccccttcagtgtaacagcaccctttctaaaacatttcccccctctttaggatccccgtggccccaaaagtcacaaaatctgaaggcaaaaaggcccattgtcccccgtgataacaacctgtgtccccctatttggtacacgacgcncttcttatgaaagctcccccaccatcccccctggcaaaataaactgatgacgaggtcctccccaatgtcaccaataataatccaacgccgtctgtacccccctaccccaggcctttcaccaaataggccccccctaaatgatttgtacatcaaatctccccgcccgcttcacaccggagcgatgacccaaacagcttcttcttcattcttttggcgatagccccaacaacaagatttccccgcctagcaaaatataattaggaaaaatatgtcttacagtccttccttcccaacaagcaaaaattttgtgtcttaccccccccacccagggtctagatgacaccggccttttaaaaagtagggtcgccccgcctaattcttgcccatagagatgcgattgaagcacatccggacgcggcgacccaaaatcaccgccataatagcgagactgggttcgaagagctgataggcgcccagctgggtctggcgcgcaagacccggataccccgcatcttcttcataaaaaacgacagaggcgtacacccaccctcgtgtaaattaattcatgtgtttgacatggagaatctgccctccgagcgtagttaaaaacgggaacaatctggcttttttaagtacggccccccacaatca

SEQ ID NO: 643479 - DNA, 123 bp, Homo sapiens
ggtttctgatgaagagctacctgcaggctcaagtgtccccaggatccataccacagaagcctctccctcagtccgtcatgtatctcgccacaccaaagaccagccaggtgcccagcccagaca

SEQ ID NO: 643480 - DNA, 208 bp, Homo sapiens
attgattgagttggagggtggcttgctggactttgttcttttcttctcccgagggatgcaggagcctgtcaggttatggggaatctgcgcctttatttaacagtagcgttggtgcctggcagccagggtttttcccctacagaaagagctggatttctcctgcacactcttgagtcctcttccatggggtctgagcaccatctttgat

SEQ ID NO: 643481 - DNA, 162 bp, Homo sapiens
  misc_feature (18)..(18): n is a, c, g, or t
  misc_feature (43)..(44): n is a, c, g, or t
gccagggcactgcaggtngggtccgtggcctgagccccagctnnatgcaccccccacctgggtctggcttctccatctccacacccccttgagggcttctgtctccccctgccccttcgatcgcaggaggcagtgctggccggggtcgcaggcacctgtcac

SEQ ID NO: 643482 - DNA, 332 bp, Homo sapiens
  misc_feature (123)..(123): n is a, c, g, or t
  misc_feature (125)..(125): n is a, c, g, or t
  misc_feature (159)..(160): n is a, c, g, or t
  misc_feature (163)..(163): n is a, c, g, or t
  misc_feature (168)..(168): n is a, c, g, or t
  misc_feature (189)..(189): n is a, c, g, or t
  misc_feature (191)..(191): n is a, c, g, or t
  misc_feature (263)..(263): n is a, c, g, or t
  misc_feature (273)..(273): n is a, c, g, or t
  misc_feature (283)..(283): n is a, c, g, or t
  misc_feature (287)..(287): n is a, c, g, or t
  misc_feature (292)..(293): n is a, c, g, or t
  misc_feature (297)..(297): n is a, c, g, or t
  misc_feature (301)..(301): n is a, c, g, or t
  misc_feature (321)..(321): n is a, c, g, or t
ggcgccgctgtgaagggagccgccgccatgtgtgcgcatatgcaatggatggcgtgcggaactgctccagattcctgagcaagaggaataagcggacctacaggactgagcccaataacttgnanggccgcaatttctttcgcttcaacggactgattnnacnaagantgtgggcgtggagcccgcagncnaccgcttctatgtgcggaccaccatcaagaatggttgcgccacgcttagaaggattagacacatgatccgcnagaacaagtnccggcccganctgngcatnngagncatncgcgggcagaggcattctgngcagacaggct

SEQ ID NO: 643483 - DNA, 132 bp, Homo sapiens
agaagatcaaatgacctcaacctttctttaactcatggatttggcacctactactagaaagcttagaagctgaagtgcttctttggctgaatatttaagaaacagatactggctgttttagctaggatagag

SEQ ID NO: 643484 - DNA, 136 bp, Homo sapiens
  misc_feature (33)..(33): n is a, c, g, or t
aaatggcatggctcgtactggtctgggatttantggatcgcgcgtttccggaacagccctgtgcggatgaaagggaggaaaaatatgccaccctgcggccggggccggagctggagtcgccgcttccgccgccgcc

SEQ ID NO: 643485 - DNA, 888 bp, Homo sapiens
tctcaaaacatatattgacccctcctctcagtacatcttgtgagcacctttcccaaaattctcaggaacgtgtttagacccccgccccacactttcaatacccgcccataggcctgggtgatgaggccccatcaaagctgggtgcaagggcattcccgtgtcagaataccaaaacatcttcagcagctcaggcagtggcatcacccaaatatcgtgtggaaaccccggataaacgtgccagaggtggcggtgacaagggagtgccaggcctcgacccacaaagcgagacaacggagacacaggcctcaaccaaggtgcacaccatcaaataaaaaaagtgggtcactcacagcaggggagaggaactccccgggaccacaagggggggccaacgaaagccgccgtgacgaagaaaagtcagataaaacgtgactcaacagggcggcctgagagaggagtaacaggggggatcccaaaacaacgcgcgagatggtgaagaaacgattcaacccatataccctaaacaaagcaacgataaccgggcaagcgcggagccaaagggcacactcgagagacaaggagctaacccacacaagcccccgaaaaaaccggagcacaacccgaggggccaaacccgtctgcagtgctagcagcagaccccacacatagaggcaatatagctcaaaaccacgcgggaaaacataaccaccaaatcgggacaggtcaacaaacgaacataagacggcgaaaagccccagctgagagccgaggcacgcggccccgggaagtaaaaacacaaaaaacacaccacaagaggacatagaggacgagacaaaaatcccccaacaggccattccacacacgaacgcaacaccacaaaccccaagg

SEQ ID NO: 643486 - DNA, 449 bp, Homo sapiens
tactaggcacataagctgtctgctgctagaggtgtccatgagcagtccttggtggtgtacaggacagaacgtgcattccttggcagctgccacgagctgtgcttcttctctgtgaatggggcacaaaggcacctgctcacggggcgattgctacagctacctgcactccctgagcatctagtacgtgccagcgccatgtcacaccctcttgcaaatcatcccgttcttcctctcagtgaccgtggcaggagggattggtatgtccattttatggattgagagactgaggtttacagatgtgaaattatttggctagggcctgagagctccagaaggtggtgtcgtggaaccccagtgcttatctggggtgtcttttcattattcgagcacaggaagcccctggtgccttccgcttctctgtcccatcacattccccattgctgtggctc

SEQ ID NO: 643487 - DNA, 166 bp, Homo sapiens
gtaattcctcagaacttgctttggtcgatggactagcaaatcaagtgaggagacaggccatgcattaatcaagtgcatgcagatcactgattacatccacaagtttccgcacagtgcccacacagaagtatgtccagacaagcctggaaagacaggcagacatcac

SEQ ID NO: 643488 - DNA, 253 bp, Homo sapiens
ttgaaagggtctccccttccccatggtgaagtcaggcctaatgaagagagtggctacagcctacttagtgattgggaaattccctgtcttgccctgggccagagctggcgtacctctggtggatcaggtcttacaagcatagaaccttacactcccaactggcaagcctgacacctcttgctagggtgtgagcaaaactagcacaggacctataagtagatgtttgcgtctgtcatgattctccagacaaact

SEQ ID NO: 643489 - DNA, 104 bp, Homo sapiens
ttcgctactgtgtgccaccaaaccaggactttccccttccccttggcttggcatccctggctctctcctggtacccatcaagacagccaccacacagtagcgaa

SEQ ID NO: 643490 - DNA, 151 bp, Homo sapiens
ctactgaggtggggagagggtgattctctcgccaaatcccttcttgcctggctgccaaaccaaagacagcctagagccctttctgcatggggggctgagatgacaggctttccagacccccgaagctctctttccctcctccctggttttt

SEQ ID NO: 643491 - DNA, 132 bp, Homo sapiens
atttggggctgcaggttcagcaacttcctcacagcgactgcaggaacaagccctagtcccctaaggtttcatgatgttggccttgtggacagcagtgaccttgccccgccccttcttggtgcgcggattcgg

SEQ ID NO: 643492 - DNA, 495 bp, Homo sapiens
cattctagcttcttcgcatttctaaagaactttttaatctgcaccaaaagaagtaaaaagtctgcgttaatttttattgagatagcattggcttaatagatcagcctggaaataattgatatctttaacaatgttgagtcctccaatccataaacatggcatatctctccatttatttagatctgctttaattttactcagtaatattttgtagttttcaatgtacagttcttgcacatattttgttaaaattatccctacttctttcacattttttgatgctattgtatttaaacaatggtattttatttcaatttccaatcttttgttattaaaatgtaaaatacaattgatattttatattgaccttgtatcctgagaccttgctaagcttactacttctactatccttttttatagcctccctgggattttccatatatacagtatgtcatccataaataaataaaattttgtttctttcaaataaaaaaa

SEQ ID NO: 643493 - DNA, 1412 bp, Homo sapiens
ggccgtgagaagccatgagcataagtctctcgtcggacaaccctgtacgaggcggtgcggcaagtcctgcaccgggaaccagcgcaagcgccgacagagttcctggagacggtgtgagttgcaggaatcaagttgtgacacgaactagtgatccccagaaatggagcagatgcgcttcatcgtgagcaccggaacatgagcttagacgtctcgacgtcttcgcgacccttaagggttacctctgttcgtgtgtccctgaggaggtagctcagtcacgcacttgtgacgagggcttaatggcctgtggattttcccctcgacaattgtgactatccgaaggcctgcttgacagataacacctcgagcacatgagattaaagaaaatctggttcagtgacatgcattgcggccaaggaacgatacttgaatgcggatctatgttggtcctcaaggagctcatctagaatcagacgtgcagcactttgcgcagcggcagagtaccatacggggcacgcagcgatgttaagagtatacgcgtgcagggcacacagagctttcccgactttcgcacatggcgtaccacaggcgagcaaattcgtaacaaaccaatgtgttgtgaaccaaacacgttgtgtaatggacggagattgagacgcgttccagaaatttgtcccaaaaagtttaccccaaaaacaatttggaacagtgcacagtggggtatggttagaacttcggttcctttggcggccatttggctaaaaggagcggttggagacaagagggtctccaatccgggttggacaaggggcaagtttgcaagcacaagtgagaacacggaaacgttggaacaggccgtttaggatagggttaggttaggcagccacttttgacagcaccccttagtgagcggtaggttacagagaccgttcttcactcatggagggtggagttccaagtgtatagcgttcccgaggagcgaaataaacaataagctctttgggtgccagagtgaaaaacggtcgggtcctccatgggggggcccacttttacattaattagcttcccaaagatgaaagggcaaagccccaattttggggtggccaaagagggggccccacccaaaggccggccacctgttaagtttactttttaaacacagtcggccaacgcaattatagttggaaactttacaaatagtttccgtcacagttataacccccaacaggttaagaaaacgacgaacaacaacacaacgaagagagacgaaggagcaagcaagagcaaggaagagagagagacgagtcaccaagagtgagatgcgccaagaagaggaaggagtagaacgacgtagataatgggatgagaaaagaagaggaatgatgcgacagaggagcagagacaccaacgaaagg

SEQ ID NO: 643494 - DNA, 251 bp, Homo sapiens
agcccgtgcgggttcctcaggcagtatgtacgaccaacgacctggtgtatgacatctgcggacacgagatgactatcacctccttgaggatctagaggaagggatccaagcgctgatgtagcggctggaatgcgcaggctctgtgagcatgagatagaagaatcatgaaggctttgagaagcgggtcgactccagccaaagtgggatttcgctaggactgtgacacggactgtccttaggcactaacattc

SEQ ID NO: 643495 - DNA, 389 bp, Homo sapiens
  misc_feature (89)..(90): n is a, c, g, or t
  misc_feature (121)..(121): n is a, c, g, or t
  misc_feature (132)..(132): n is a, c, g, or t
gcggccgcctactactactactactactactaaattcgcggccgcgtcgacgggaggatctcttgagcccgggaggtggatgatgcagnntgggccctgaccatgccatctgattccaggnttgcagggcangaacgagatctctgtctcaaaacaaacaacaaaaaaaaaaacaaaacaaacatatccttcgcccactttttgatggggttgtttgtttttttcttgtgaatttgtttgagttcattgtagattctggatattagccctttgtcagatgagtaggttgcgaaaattatctcccattttgtaggttgcctgttcactctgatggtagtttcttttgctgtgcagaagctctttagtttaattagatcccattggtcaat

SEQ ID NO: 643496 - DNA, 531 bp, Homo sapiens
aatccacaggtgaatggggcgggctggtgccacatgacgcctcaccgcagtgacgttgagaactgtgggtggagtgccacctagtcttggttgagtccagatggagcagcagcctgtgtgagctagtgtggggccggattctggcagtggcaggggctgtatgtacctgcagggaatgggggtcgctgtgtgtccgcctctaggggctgtcaggcggtatctactgcaccagccggtaggtgatgtacctgccagcctgtctcactgggccggatgatcttcaccacctgcccacgctttatccccaaagtaccgcgccacagggtcccccgcctggatcctgggcagctggttctctcggagcttctatcgggccagcagctctgtcaacctcctccttggtcatgacgacgtgctcagggactagctcgtgctccgtgatgtcgatgagcgctcctgctgaagaaactgctccagtgatgtattgggggccatgtcgaccagggactgttggcgggggtgtccgccctg

SEQ ID NO: 643497 - DNA, 975 bp, Homo sapiens
agactcaaacatagcaggtcgaggccggtgttaatcggccgaggcgggatagtggctttcgcagactccggatctactgacccgggaactgacaggctccaactacccgggcactcagtattagccttcgcctcactggctcctctgcacaagaggaggcttccggagtagccctcggtgaagccccagaccacagctatgagtgccttcgtgtgacgtctgcgcatgaaacatgttctgcatgtccagctcaaccggtcccgaacaagaggaatgccatgaacaaggtcttctggagagagatggtagaggtgcttcaacaagatttcgagagacgctgactgtcgggcggtggtgatctctggtgcatggaaaagtgttcactgcgaggtagttgaccgtgatggacagtgggttcggacatccgtgcagcccaaaggaggatgatgtggcccggagtcagctggtacctccgtgacatcatcactcgattgcaggagagcttcgaactgtcatcgagaggtgcccaacgcccgtgatttgctgccgtccatgggtggctgcattgggccggagcgtgtggaccttggtcagcgcctgtgactccggtacttgtgccccggatgctttcttccaggtgcaaggaggtggacgtgggtttggctgcgctgtaggaacactgtctgcgcctgccgatggtccctcggggaccagagcctggtccacgagcgtgggcgttcaacgcccgcaacgatgatgtgcgtgaccgagggcctggggccgtggctgggtcagacggggtgttccccgacgcaagagggtgctgctggtgctgccttacgcggcggcgggcattgctgcagacccgtgccggtgttgctccacggtcacctgtggttcccgcacaatcgtgggcggagccccaccatgtggtcccgccctacgtgttttcccccccttttgtctcggccctta

SEQ ID NO: 643498 - DNA, 207 bp, Homo sapiens
taccgcagagagcttaaggggtacgtctaggtcagactcgcaagtccactactcattcactgtgaccttgagaaacttacctaaaccgtgtaacatattgtaaagctggggaataacaccactttcctctgagaagccatggcaagaatgagacattcttggaacattctttgcacaatgcctgttactatattttttttcatttta

SEQ ID NO: 643499 - DNA, 570 bp, Homo sapiens
  misc_feature (140)..(140): n is a, c, g, or t
  misc_feature (142)..(142): n is a, c, g, or t
  misc_feature (147)..(147): n is a, c, g, or t
  misc_feature (178)..(178): n is a, c, g, or t
  misc_feature (237)..(237): n is a, c, g, or t
  misc_feature (294)..(294): n is a, c, g, or t
  misc_feature (317)..(317): n is a, c, g, or t
  misc_feature (374)..(374): n is a, c, g, or t
  misc_feature (388)..(388): n is a, c, g, or t
  misc_feature (395)..(395): n is a, c, g, or t
  misc_feature (400)..(400): n is a, c, g, or t
tttttttttttatctgtttccagattttattatctatatattttattacgtacatatgtttttcttatgtattcattcaatttatgcaaacaatgatagattaatcatttcattttaattgtattcttaaaaataacatntnaatantactattgcaaaaatattgctttataggagnttatttaaaaatattgaactccccaactgtatttatccattctttcattccatttattnatcaaacataacctgagtacctgttatgtagcagacatattctgctatctctcaggncccttctatccttaaaaacttcntgtttacctgccctgcctgcacaagctgagagatttaaaataggaatattgggactnaatctccttgaaantttgtcncccanctttcaaacaaaagcatttctgaagttagaaaatagtagaagataacctttaactgccattcaaaagtttatcagtcttaaatgctaatattaatcattggaaggtcttatttgcatatattctgtaagcataaatattgaataaaatgagccatatgtattcacttgaa

SEQ ID NO: 643500 - DNA, 201 bp, Homo sapiens
ctgccctcagacagacagaggactgtgccaggaaactgacatgctcagcgcacaagccagctagggacagcgaacgagcccagagagacagagcaagttgcctgaggtacacagagcagaggacttgagacaccagtgcagaccgtgctccacagtaggccctactctacctaccctagcctacctgggccatatcaacgg

SEQ ID NO: 643501 - DNA, 698 bp, Homo sapiens
ggccggctccgttatggcgacccgtagccctggcgtcgtgatgagtgatgatgaaccaggcttagtgaccttgatgtacttattgcataccgtaatcattatgctgaggattcggaacgggtgttaattcctcatggactaatcatggacaggactgaacgtcttgctcgaaatgtgatgaaggagatgggaggccatcacaatttgtagccctctgtgtgctcaaggggggctatagaaatactttgctgacctgttggattacatcaaagcagtgaatagaaatagtgatagatccattcctatgacgtgtagattttatcagactgaagagctattgtaatgaccagtcaacaggggacataaaagtaatgggtggagatgatctctcaactttaactggaaagaatgtcttgattgtggaagatataattgacactggcaaaacaatgcagacttggcttccgttgggtcaggcagtataatccaaagatggtcaaggtcgcaagcttgctggtgaaaaggaccccaagaagtgtagggtataagccagacttaggtggatttgaaattcccgacaagatagaaggtaggactatgccttgggtataatggaatacttcaggggattggaatcatggtggagtaattaagtgagattggaaagcaaggtaccaaggctaaggatgagagttcag

SEQ ID NO: 643502 - DNA, 369 bp, Homo sapiens
cacgaggcacggtggctcacagctataatctcagcactttgggaggctgaggtgggagaattgcctgagcccaggagttcaagaccagcttgtgcaatatagggagactccggctctacaaaaaagagtttttcaaaattagccaggcgaagtggcacacatctgtggtcccaggtgctcaggaagctgaggtgggaggatcacttgagcccaattcaaagctgcagtgagctgtaattgcatcactgcactccaacctgggcaacagagtaagaccttgtcttaaaaaaaaataaaaacatataaaaaaataaggaatgcctctaacttcaatagctatgaacaggtgaattcctgccattttttttc

SEQ ID NO: 643503 - DNA, 397 bp, Homo sapiens
  misc_feature (2)..(2): n is a, c, g, or t
  misc_feature (7)..(7): n is a, c, g, or t
  misc_feature (31)..(31): n is a, c, g, or t
  misc_feature (66)..(66): n is a, c, g, or t
  misc_feature (71)..(71): n is a, c, g, or t
  misc_feature (104)..(104): n is a, c, g, or t
  misc_feature (268)..(268): n is a, c, g, or t
tnttganacggagtcttgctctgtcgccccnggctggagtgcagtggtgcaatcttggctcactgnaaacnccgcctcctgggaaacctggctctcaacggtantattaaaaatgaaaatccagccgggcactgtggctcatgcctgtaatcccagcactttgggaggccgaggtgggcgcattcaggagttcaaaaccagcctcaccaacatggtgaaaccctgtctctactaaaaatacaaaagttagccggacatggtggtgcanacctgtaatcccagctactggggaggctgaggcaggagaatcacttgaacccaggactcagaggttgaagtgagctgagattgcaccactgcactccagcctgagtgacaagagtgaaactccatctca

SEQ ID NO: 643504 - DNA, 129 bp, Homo sapiens
tccgttacagagtgacgcagtgaagctccctgagggagcatgccagggtctacgcgtgctagatctgcatcgccttctacttcctgcactagaggcggatcatctacagggaccttaagctggacaacg

SEQ ID NO: 643505 - DNA, 153 bp, Homo sapiens
aggcagtgagccaccgcgcccagccgtgcaactttctttagagtgcctttccagtcctcccacacctggctagggtattcatttgccacatgaacacatacaccacggccctgcaatttattgcagccacatgtcacactttaaccttcatga

SEQ ID NO: 643506 - DNA, 278 bp, Homo sapiens
  misc_feature (2)..(2): n is a, c, g, or t
  misc_feature (9)..(10): n is a, c, g, or t
  misc_feature (54)..(54): n is a, c, g, or t
  misc_feature (57)..(57): n is a, c, g, or t
  misc_feature (59)..(59): n is a, c, g, or t
  misc_feature (71)..(72): n is a, c, g, or t
  misc_feature (110)..(110): n is a, c, g, or t
  misc_feature (129)..(129): n is a, c, g, or t
  misc_feature (135)..(135): n is a, c, g, or t
  misc_feature (198)..(198): n is a, c, g, or t
  misc_feature (220)..(220): n is a, c, g, or t
ancggccgnntcgcatctcagctggttggctttggttagagctcccgtcagacnttngntcgggcctaggnnttggtagccccgaagtgtgggctctctccagtaccagnctcatttcagtaccagccnttgggnagtcgtgtgaatactcggtctcttagccacagggatagaatggcggcctgacggagccgcggngccggcgaagtcgctgaggcgncgacttgtaacccccagaccagctcaaacgggagccaaaacctcgaagccttggaagc

SEQ ID NO: 643507 - DNA, 1180 bp, Homo sapiens
tcacgaggattgcgcgattagttgattccatcacgagcactaggtcacaccatttaagcggatttacaaggacctgagcagaacgagatctctgtcgagcttaagacgacgacgtggatgatgtgccaagtgagtctcgttgggtaactaatgtgtgcacttgcgcaggatgcacacagcagtcgtacgcggaagcgaaccaaggtcaaaattctagcgaggacaagtggaacaacgtgtgcattgcttagcaatcttctgccaacaactcaagaaactacactttgtaaactgacgatctttatagttgacctagttgcgggcaaatataccagtaataaaccctccagtgaccgtggggaagagctcgcaaatacaagtcactcaattgttcaggctgctttcaaaatattactaaaatggcatttggtacgcctcttgaggccagggtcttgacagaacagctgtggggcccacagtttcaaccctaggtgaccagcgagttccacattgttgttaaactcctatagcgcaaccatctttaatattgggacttacctgttgtgatgcgtaacacttaacagaggcggattgaaagcgtactatagtcacggtggcagcaattcgtaagtcactttcccagttatcaccagagcagcgatttgcacttagtattaagtagtcctaagagtacttgaggctggtagaaagcaggagcgtagatccaagtagttactggctaaggaagaaacttgttgcatcccaacccaactgttgtgcgattggtatgtaagaagggcgggtacaggatcacgtaaaacagtgccgcgaatacttggatttgggagatgttcaacactacctggtagactctaaaggcaacaactattgtaagcctatttcagaacagtcaccggtctccatatataacagcccgatgacatgggcctttggaactctggacctatggataatttgctctaaaaaagtcccgcggccatctctcggcccacaagagccggcataacccgacatgttgtcgtatacacactgtgacggcattctacacacagatataccaaagctatccacaccgccatatctagtgtgcacgaccaacacatttgtgcagtccaaaccacaaatcagcacacacaaatatcgcgtcgtgatttttttt

SEQ ID NO: 643508 - DNA, 294 bp, Homo sapiens
atgagtctcaagctgccgcccgtttggtgaatggcgacggtattgtcgaagtcttttttggttgcccccatcttcagcgccaccgcgaagccctgcaacatttcgtccataccaaagccaatgccgtgaataccgacaatcttctcttccgatccaacgcacaccagcttcatgcggcacggctggcggtgagtggtgacggcggtatacatcgcggtgaaagaggatttatacactttcacctgatcgtcgccatactgctcgcgcgcctgcggttccgttaaaccaacagta

SEQ ID NO: 643509 - DNA, 537 bp, Homo sapiens
  misc_feature (129)..(129): n is a, c, g, or t
  misc_feature (494)..(494): n is a, c, g, or t
tttcttccatctatattttcttagttaacataattttttaaatctatgaaatcttacctgactgcagattcatcagaaattccaacatctattaaagaaaaaggtaaaatgcattttaaatcaataatnaatgtacagaatattaaaatcataagaatgcacagtgatgcatgcctctaatccaaactacttgggaggatgaggcaagaggatcacttgaggagcccagaagtttgagaccagcttgggaaacatagtaagactctaccttcataaaaaaattgtgcacacttgtgtgtatgctttagatcctgttttttgttgttgttgttgttgttgttttggtttggtttggttttttaaagcataagactgacgctttgttacaaagcattcctttgggagcatgcctgggacgttattagaattaacattcattatatgtattggtaggtaattaatgcagtaagaactcttccctctgtatttattanatgcaaagaagaatacatttattaaaatttggtatctacaagt

SEQ ID NO: 643510 - DNA, 893 bp, Homo sapiens
ggcagccgggctggtcctgctgcgagccggcggcccggagtgggcggggagaaaatgaacgtggagttgcccacagtgaagtgaatccaaatacccgtgtcatgaacagcggggtatgtggctgacatatgcatggggagtgggtgtgttcatatgtgtcttactcagcattcccttcttcagtgttcctgtgtgctgtggactttaacaaattattatacataatcgtgggatgtacgtattttggcatggagtgaaaggaacacctttcgaaactccgtgaccaggtaaaagcaaggttcctaactcatgtggaacaaatgactagtggagtacagttatacatcttcagggaagtttttcacaatttctccaataattctatatttttcctgacaaggtttctataccgaaagtatggattccaattcatttcatcctaaaacagaagttctctccgtgaggtgtactaatttcccaaaaaagtgccacaaactacatggtgtcggatcttggggaatacttaagtatggaaagtggttgtgaaacgtgaaaaaaatttttacagtagtgaatttcttatagggagggagtggttagtaaactggtgttctctgatattgtgaattgagacgttttacatgggggggcatgggtggccctcaggtgcggtgaagtgagattcattaatgatggtctgttaaaaactggactttgaaagggtaaaagcgggggggcagtaaagtaaggaaacgagggggaaactcagaacagatgtgaaacacggtatgaggggtggaaaacacctctctcgggtaacaatagggctccttattttgtcaaaaaaacggtcttggggcgttgtttctctattcacgcgccacctatggggg

SEQ ID NO: 643511 - DNA, 309 bp, Homo sapiens
ggataaaaagaatcaatatcattaacatagccatactgcccaaagccatttacagattcaatgctattcccattaaactaccaatgacattcttcacagaacaaaaaaaaaaaaaacttttaaaaatcttagggacccaaaaaggagcccaaatagccagggcaatcttaaggcaaattggcaaaaaggaacaacggtgggaggagattcatggccacttggatttacaaattaatattaacaggggatacaggtaacccaccaacaggctagggtacccgggtacaaaaggcaggacactatagacca

SEQ ID NO: 643512 - DNA, 228 bp, Homo sapiens
atgcttgggaatccaagcgctggcccaactagacccaccgtgcggaggtcgtttgaataccaaagatgctgctatatcacctctcccggttaccccaggactacccctcccaacagaactgcgagtggattgtttacgcccccgaagccaaccagaagattgtcctcaaattcaaccctcactttgaaatcgagaagcacgactgcaagtaagcgccgtcccacagtt

SEQ ID NO: 643513 - DNA, 798 bp, Homo sapiens
agccggcgatggccgaatcagaagccctgtcgaagcttcgggaagacttcaggatgcatgaataaatcctgtctttattttgggcgccagcggagaaaccggcagagtgctcttaagaggaaatcctggagcagggcctgtttgtccaaatgtcacgctcatgggccggcgagaatgctcaccttcgacgaggaaagccttataaaaatgtgaatcaagacggtggtggaactttgaaaacgttggatgactacgcctctgccttttcaaggtcatgatgttggattcttgttgcctgggttaccaccagagggaaagctggggcggagggatttcgtccgtcgttgacccgagattatgtgctgacgtctgcagaagcctggcaaaagctggagggtgcaaacatttcaaacctgctatcctctaaaggagctgataaatcaagcaatttctgcatatctaccaggtaacgggagacgtagaagccaaaggtttgacatcaacttacaatttgatcgttactctgtatttagcgccctggaggtcctgtcagtgtgatacggcacgaactctcgcccaaggtgaatggtctgctttaggaaaagtcctttgctcctttaccagaatctgtgggccaggggcattctggtgcctgttggtgcacgggggttaggaccaatgctgaacccactgttgttggaaccagagacaagccgtttggcctggtggcgacaaggcctccctgtacctgggaaaacctgggatactaaccagagccctgggcagggttactgcacc

SEQ ID NO: 643514 - DNA, 278 bp, Homo sapiens
ctggccgcagagctccaccgctgaggccaacgaggccatttctttatttgcattaaacaatattttttcaatacagttttggggggggggggggagacattaagctcatttaacaagagacataagttaacacaatgtgcgctgctttcatgaggaggaaagaggcaagatcttagaggaatccaggatactggccaccaggaatcacaggatctcacagtacaatccacttctttaaaggccgcagggtaagctatggaagaaaacccaaaacaaag

SEQ ID NO: 643515 - DNA, 260 bp, Homo sapiens
gtgcacttgcttctgcggtcgctctgaggatccccgttcgcggaagcagaaagaggtgttagggtttggggtttttgtttttgtttttgtttttaatttcttgatttcagagtttcctccctccctcgtcgtgctgcggccaccgtcctcgtatcccctgcttccgcgggcgccgcgcggctggtctggtttggtgtttggttgtattagtgtgtggtgtattaattgattgtattgcacacattttctcccaccactca

SEQ ID NO: 643516 - DNA, 774 bp, Homo sapiens
aattgttttgtactttttggtatttttgttttattttttttcagatggagtcttgcgctgtgtcccaggctggtagtgcccagggacgatctcggctcacggcaaactccgcctccggggttcacaccattctccgggctcggcctcccaaagtagctggggactacgggtggctaatttttggtattttgagtaagagacggggtttcgccgtgtgggccaggatggtctcgatctcctgaccttgtgatccggcccgcctcggcctcccagaagtgctggggattcacgggggtgagccaccgggcctgggcctaaaattggtgttggatagataattagattggagatgtacacatttctccccgattattggtgggaatccgttacattttctcacgtggatcttcagaacttttactccaaagtggcaagccgtggtgctcttgtgcacctcgaagattcattacacgtgggccatttcgtggctcccattccgtggtcgtggtccaggcatcgagtccatgtcttcgtcttccataagcggggtgctccatagtggagaatagttcacgtgttggggtgaaccacgtttcacatccgcttatttcggcgctcgcttttaaacaagagattcttgggctattctcagagctatttaattcgttccagagtaatcttgctaagtcatgtggacaaattccttacaaaaaccccagggagattccagttgaaatgtgccttaaatttggggggtcacttacgggaagacta

SEQ ID NO: 643517 - DNA, 197 bp, Homo sapiens
  misc_feature (171)..(171): n is a, c, g, or t
gggaggcagaggcgggtggatcacttgaagtcaggggttcaagaagagcctggccgacatggtgaaacccatctgggttggtcaggcatggtggcgtgtgtctgtaatcccagctacagaaagatagagaggtggctgaggcaggagagttgctcgggcccgggagttggnggttgcagtgagccgggatcacacca

SEQ ID NO: 643518 - DNA, 181 bp, Homo sapiens
gcttctattaaatgattcatgcttgatacttttataagacaacacaagcaactaattttctacaaaggctttcggcttatatgcaggcttttattgactgtttttcgtgcaaactatgtttaaaagaaatcttcactaacatgatcactgactacatttagagaaaacaatgagttttcca

SEQ ID NO: 643519 - DNA, 150 bp, Homo sapiens
tagcgatcacaggatcttaagcttggtcagcaatgacatctgctcctccatctgctttccaggtttcccatttgagttgcgggtactattctattgcttgtgtggtatagtggctgcactagactgaagcgggtagaaggacaaaagtct

SEQ ID NO: 643520 - DNA, 306 bp, Homo sapiens
  misc_feature (124)..(124): n is a, c, g, or t
ggaagacgggccctccctatggccctagaagatctggctatgtttcgggaggacccacattaactgtttgttacccaagtgatggcgttgttacatagaaggcagtggaactagtcgtccatanaacacaagggatatctgcttcatccggaccagccgtccagaaaatgccatcatctataacaacaatgaggacttccaggtcggacaagccaaggtggtcctgaagagcaaggatgaccaggtgaccgtttttggggctggggtgaccttgcacgatgccttggtcgctgctgatacttacta

SEQ ID NO: 643521 - DNA, 448 bp, Homo sapiens
aaatcgggaacactttcgggccgaagttcccctgttccccccccgttggaggaactggcccttacaaaattggttaccttacggtgcttggcacccggctttagcccaaaggacgtgttggtttcttggctgcaggggttccaggaatttccccgcgaaaagttccttatttgggcattccggcaggaacccaaccagggccccccccccttttttttgaccagcattttgggggtggcaacccaggttgtgaaaaagggggacccctttttttgcatggtgggccccaaggcccttccgttggccttttcccaaaaaaccattggccgcttggggggttaacccccccatgtcaatgtgtttgtttttatggggggggtggggggcccctgttttttaaccgcccccctgtcccccccccttaataaactccatgttccccccagca

SEQ ID NO: 643522 - DNA, 790 bp, Homo sapiens
  misc_feature (19)..(19): n is a, c, g, or t
  misc_feature (95)..(95): n is a, c, g, or t
  misc_feature (131)..(131): n is a, c, g, or t
  misc_feature (133)..(134): n is a, c, g, or t
  misc_feature (157)..(158): n is a, c, g, or t
  misc_feature (168)..(168): n is a, c, g, or t
  misc_feature (178)..(179): n is a, c, g, or t
  misc_feature (182)..(182): n is a, c, g, or t
  misc_feature (195)..(195): n is a, c, g, or t
  misc_feature (199)..(200): n is a, c, g, or t
  misc_feature (299)..(299): n is a, c, g, or t
  misc_feature (350)..(350): n is a, c, g, or t
  misc_feature (391)..(392): n is a, c, g, or t
  misc_feature (398)..(398): n is a, c, g, or t
  misc_feature (400)..(400): n is a, c, g, or t
  misc_feature (402)..(403): n is a, c, g, or t
  misc_feature (424)..(424): n is a, c, g, or t
  misc_feature (427)..(427): n is a, c, g, or t
  misc_feature (438)..(440): n is a, c, g, or t
  misc_feature (452)..(452): n is a, c, g, or t
  misc_feature (458)..(459): n is a, c, g, or t
  misc_feature (464)..(464): n is a, c, g, or t
  misc_feature (469)..(471): n is a, c, g, or t
  misc_feature (473)..(474): n is a, c, g, or t
  misc_feature (494)..(494): n is a, c, g, or t
  misc_feature (525)..(525): n is a, c, g, or t
  misc_feature (533)..(533): n is a, c, g, or t
  misc_feature (544)..(544): n is a, c, g, or t
  misc_feature (555)..(555): n is a, c, g, or t
  misc_feature (662)..(662): n is a, c, g, or t
  misc_feature (664)..(664): n is a, c, g, or t
  misc_feature (667)..(668): n is a, c, g, or t
  misc_feature (695)..(696): n is a, c, g, or t
  misc_feature (766)..(766): n is a, c, g, or t
catcctccctctggcagtngggccctcgtgtccttttgcctcagggacggaagcttttgcaggagctgagttgttcaaaggagcctgcgaaaganagttgtctagtgaggaaacctcgagatgtcaggatnannacgaactccacggcgctggcttnnggggatcgcngcgccccggnnggngcctgggcatggnctgnnccccgggtctcagactgtagtctccccttgtttgctgttggtgggcctcgtgtagaccttcctccaggggttgagggtcttgccggaccagatccagangcccgacgtgatgcccacgatcagcgtcataaggtacttaatcatgggggncgtgaagtccgggctcatgggggggtggggggggggggttnngggggntngnngtggggggggggggtagcgtngtnttgctgttttnnntatccagttgtnttcccnntggtnccggnnngnntgttcgtagaagttgcaggngatgacgatggtggttggtacagtgtacagnacgctgantgatgccaatntgcaccatgancttctccagcttctcggtcttggtgccatcgtgcttcatgatggtgcggatgcggaagatcgacacaaagccggccagcagaaaggacgtgccgataaacaggtacntnttnnggggcgccacacgaagccacgcagcgnntccacgttgttaagccccacgaagcacactccgctcagcacatcgccgtccacctggcccagcgcagggntggtgatggtcttgatggcgggca

SEQ ID NO: 643523 - DNA, 318 bp, Homo sapiens
gcttacaacattgaactcgacaaccagcccattccccacgccggagcagtgcgcggaggcctgtccaagcgccgcatcggactcggctacaccggcctgggtaccatgatggtgcagctcggcattcgctacggctcgaatgagtccatcaatgctcaccggggaagtcggcaagttcatcgccgtcgaagcctattgggagtcgaccaacctggccgtcgagcgggacaccttcccgctatacgaccgcgacaagatccaggaagcggagttcgtcaagaagctcccgaaaggaccttggtcagtgcatctacgaag

SEQ ID NO: 643524 - DNA, 218 bp, Homo sapiens
tgcaccacagatgttcctgtgtgacccttccaatgaccacctctccccccatgatgtgagcactggctatgtggaacagggcctggtgtgtctgagacaccactggctatgggaacggggcctggagtgcctgagacgctctggctatgggaacggggccaggtgtccctgagatgctctggctatgggaacagggcctggtatgcctgagacaccct

SEQ ID NO: 643525 - DNA, 180 bp, Homo sapiens
aaccaaacgaacaatacagaggctcaagcattcaggaagcactgacaggttggctaggccccaattcattaaccctcctggcctagcagtctaggcgttggctttacctatccagtctcttctgagcacacacaggccaggtaggggactaatggctggcacacagtgatgcttcaacct

SEQ ID NO: 643526 - DNA, 366 bp, Homo sapiens
gcgcttggcacacgcaacttggctcgagcatttctttttgtgtttataacatttacttgactctttacaactcttcaactgctatttgttgctataaagttttaaagtttgggcttaagacagagtctcactttagcccaggctggagtgcagtggtgcaacctcggctcgctgcaacctccgcctcccaggttcaagtgattctcgtgcctcagccttctaagaagctgggattacaggtgcccgccgccacacctggctaatttttgtatttttagtagagatggggattcaccatgttggtcaggctcgtcttgaactcctgacctcaagtgatccacctgcctcagcctcccaagttgcgtg

SEQ ID NO: 643527 - DNA, 792 bp, Homo sapiens
ccacgcgttcggcatacaccaaagtggcggatgacgccggtgcagcgggggggcccgggggccctgtgtgggcctgggcatggggaaccgctggtggcttccgcggaggtttcggcagtggcatccggggccggggtcgcggccgtggccggggccggggccgaggccgcggagctcgcggagtgcaaggccgaatggataacggagtgaattgccctgtcaccaagttgggccggtttgtcaaaggacatgaagatcgaagtcgctgcgagagagatctatctcttctcccgtgccataaaaggaatcagagatcactgatttcttccgtggggacctctctcaagggatgaggtcctgaagattatgccagtgcagaaagcaagaaccgtgccggatagcgcaccaaggttcaaggcattggtggctatcggggactacaattggacacgtcgggtctgggggagttaagttgctccaaggaggtggacaaacgccatcccagtggggccatcatccttggccaaagctctacatcgtccccgtgcgcaagaagctacctgggggaacaaagattctacaaggcccccaacactgtaccttgccaagagggtgacaggccgtgagagtctggtgcatgtgtacgcctcatcacttgaccccaagggcaaatggcatctgctaccgcacctggcctaaaaagctgtcatgatgcgtgtatcgatagtgtacactcaacccggatgaatgacagctgaaatcgcaggcacttgagcactaaactaatacgcc

SEQ ID NO: 643528 - DNA, 480 bp, Homo sapiens
  misc_feature (266)..(266): n is a, c, g, or t
taaattagttgaaacttgtaagacttacatatatatatatagcaggcttgtataccagcagtccccaaccttcttggccccagggactggtttcatggaagataattcttccatgaacttgcggccagtagggggatagtttggggatgattcgagcacattacatttattatgcactttatttctattattattacattgtaatatataacaacataattatataactcatcataatgtagaatcagtgggaggcctgagcttgntttcctacaactaggtggtcccatctgggggtgatgggagacagtgacaaatcatcaggcattagattcttataagaagcatacaaccaagatcccttgcatgcacagttcacaatggggttcgcactcctatgagaatctagtggcaccactgatgtgacactaggcggagctcaggcagtaatgctcacttgtccaccactcaccttccact

SEQ ID NO: 643529 - DNA, 710 bp, Homo sapiens
  misc_feature (56)..(57): n is a, c, g, or t
  misc_feature (59)..(59): n is a, c, g, or t
  misc_feature (463)..(463): n is a, c, g, or t
  misc_feature (561)..(561): n is a, c, g, or t
gagaccctgacaccaccttcaactcacgggccctgactcaggggcctggtggcgannangaagctccgagtctggatcatctctggacagcagctgccgaagtcaataagaataagaattctatcgtggaccccaaggtgatagtggagatccacggtgtggccaggatgtggcagccgtcagacagcagttattaccaataatggtttcaacccacggtgggacacggagtttgagtttgtggtagcagtgcctgaccttgcccttgtacgtttcatggtagaaggattatgactcctcctctaagaacgactttatcggccagagtactatcccctggaacagcctcaagcaggggtaccgccatgtccacctcttgtctaagaatggagacctgcatccatcagccactctctttgtgaagatctccatccaggactaagcctgggggactgacgcaggntcccctgagtgggcggagctgtgtccacacctgtctggcaatgttgcacctctggcgcggagcttgaggccactgaactgccttcagctctaacacantcgcctgagcttctacttctctgggggtccaggagcagtccagtccccggagtggtctaaaattccgttaggaacaacactgcatctctctccctacccctagttgactttaggttgtgagtttttatataaaaaaaaataataatcac

SEQ ID NO: 643530 - DNA, 675 bp, Homo sapiens
gggaagaggtatgaggggaacatatgaacatgccttataccaacctggctgcttgtctaactggcaccttgacattgtttgctgactttgtcaattgaaatttttattaatctggaatgccttttcctcctctggtatcaaaagcctgtctttcctccgtgggctcaactaaaccacagcttttcaatgaaccactttagatctcattctcatctttctgtctctaccatcagatttttaacaattttatttatttattttaaacagggcctaatgctgccgtcccaggctggaatgcagtgatgcaatcatggcttgctgccaaccttgacctcctgggctcatgatcctcctgcctcagctccgtagtagctgggactgcaggtgcaccaacaacctggctattttaggggagttaaaagtcgtatgaagtaaagggtagaagaacgtgagtctcgctatgtagcccagaactggttccaaactcctgagctcaaagcagtcctccagccttggcttctcggaaccagctgggattgcagtgtgagacactgacacctggcaataactatcagattttcaaacactatcaataccgactgagcaactctgaacttgtgttgtgctggccatttacgtatcaccaggacaaggtcacaatgataggcgagaaaa

SEQ ID NO: 643531 - DNA, 231 bp, Homo sapiens
agcatccatatccgttacatcactcagctcgagctgcagtgatgtccggtcatccatctacttgatcacacggttcgtggtgtgggctccggagcccggcatgcccacctcgcttctcctgcatatacccttgttttcaatttttggtcccgcaaaccactcaggcagctttccacactccagtttccagaaatttgtgtgtttctgggccccaaattggcccttatcgag

SEQ ID NO: 643532 - DNA, 969 bp, Homo sapiens
tatatattatcgagtataacacagtcatacaaaaacattgagtagaaatataattcacacataaaaacagtctacttattttgtgtcccttttatatcctattttaggcaaaatgataaaacccagaaaataacaggaatgtactagtcctaaaaagtggcaccttttataaatgaaacagatccgatcacctataccttctctcaaattccaaataatgaggcttactgacctgtactctcagaaatcaacttaaatacattttagcttgatgtggatgatatatgtactttcagttgttgacaatccaggtagaacatgtacataaagatgattcctaagtcaaaacatttcatacaaaaggagatggttttaacccagacaactcaagaggacaatgcactgaattcaaaaacttctgaaacaggcattttgggaccatttataaaatactaaaaagttcagaagtgctgaaaaacaaaagtttatcataaaatagagccaggggtgaaacaactatcatgtgtctcaaactcactctaaagacatatattatataatgtgaatatataattagaaaccaggtttaaagttgcatttctcctgtgtaccaagtgactaatcacatgtaaaactggccattcaattaaaaatgccatttaatacagtattagcaagccttctggccatttatgtaacaccttcaacaattactgtttcgcacttggaaaaatagagctacatacgtttttaaaacaagccaggtggtgaacgtgcactacattgtgtgcaaaccttgctcaacaaatctttgcgcctgctcacacttcttataaatagactttaagcgtctccaaacagcggtttccatgcccttgtgagcacttcatgcgggccacacgactggggaccgccttaacacctttccctagaacaaaaccggctccatctcctccagcaggcgacgac

SEQ ID NO: 643533 - DNA, 699 bp, Homo sapiens
tcgatcatcaccatcacaatacgggaaattttgccaattcagcaggccggcaagaacatgagtgccagcgtgactgttgtctgcaagcagtgccctctcttcagaaaaggtctaaattacattattatgggccaagtaggtgaagatgggcgaggcaaaatcatgccaaacagctttatcatgatgttcaagaccaagaatcagaagctcctggatgccttaaaaaataagcaatgttaacagtgaactgtgtccatttaagctgtattctgccattgcctttgaaagatctatgttctctcagtagaaaaaaaaatacttataaaattacatattctgaaagaggattccgaaagatgggactggttgactcttcacatgatggaggtatgaggcctccgagatagctgagggaagttctttgcctgctgtcagaggagcagctatctgattggaaacctgccgacttagtgcggtgataggaagctaaaagtgtcaagcgttgacagcttggaagcgtttatttatacatctctgtaaaaggatatttcatccctccctcgtgagaagatgtccaaatgggatggtagaaggcgagggcttatagtgtaatttgcttctccttcaagccgttgccctgaggtgagacaatcttgtattgagttttgtaaaataatggtaaaaaaaaaaattataaaa

SEQ ID NO: 643534 - DNA, 296 bp, Homo sapiens
ctctgttatgaagtgtcctactggatgcttcaaatctattctataaataggtgagataggaaacaatgagtaaatatttatcggatcattattttccaatgttaagtgttttaactacagtgtagtatgtttatgattcttgaaactctctttttcatgatatcttgagttattaaacatgcattcactaaaagcatctgactcatcacatctggcccaaattctgatatatgtacaaatgttcacacattatcggcaagattacatataaaagactggcatcacaatgtatcagt

SEQ ID NO: 643535 - DNA, 212 bp, Homo sapiens
caccacctatagatcagtagcaacgaagttgacggctaacagccgcgtggcattgagcccgaacacggctaacacacattcggacaggctgtagataaagcctttactcttgctttttagaacacgtggttcaagtataaaattgcaaacgcctttggcaaccttgaactaaaagaaaaaaacaaaaaaatttgggccattactctttttct

SEQ ID NO: 643536 - DNA, 379 bp, Homo sapiens
gtatccctaccgcaggcggtctgtggtgctgatcggcgcactgctgtcctgcttggcttcctgctgcgcagccaagggtaccaagtgttggcgcaggaggccccgtgctgggacgcccctttgagggacccagccttgagacagctgctgtgcgggacagaactgacgactctgcagccctcggaaccccactcggcgggtgccctctgctcaggcctccctagcacctctccctaaccaaattctccctggacccaattctgagctccccatcaccatggaaggtggggcctcaatctacggccttccctgtcagaagggggtttgtggccacaatccccatcacaagctgccagcttgccccgccgggtaccgagct

SEQ ID NO: 643537 - DNA, 610 bp, Homo sapiens
  misc_feature (396)..(396): n is a, c, g, or t
agtgcatattttaataaatgtcctttggagtcatcttaaaggccatatatctgtgtactgctaggaacagggcagtcttgatctgtgtgttttcacgttttatttctaaaatagaaaacatgttttcatttttatttcttctcctcactggagtctttcagaggctcatttttatttcttctcctcactggagtctttcagaggctaccgtgaaccatgaacatctgtgagggtgggattggggaagaagggcataatggagatcagtacataccttggttccactggctggggtggctggagaagatggcatggatgtacagctgtggttactctgactagcactggagctggaacgagtaggggaagctgcccgggaagatggtttggaccttngaccccgtgagcggaagggggtcattccctgggatgctccctctggtaggatgaatttctctctaagttcaatgttagttctacctcgtgctcggcagggatcatttttcactaaaaattcgtgccaaggccatccatcctccaccaacgcgaaccatacacggtgctgcgcagaatgacggaccagccgcaactgatgagaatccccgtcaga

SEQ ID NO: 643538 - DNA, 1508 bp, Homo sapiens
  misc_feature (406)..(406): n is a, c, g, or t
  misc_feature (1212)..(1212): n is a, c, g, or t
ggcgcaagagccgcatctccaggccttagtatcagagaagcttatgataactcctagtttacctcctaggcattacaacgtatacgtgcgactgatataagttgagaaggctgcgacgtctagtacgactagttcgtactcggcataggggtgcaagcatcgatgaaagagtgatacgccagtgcggtacactgatacgcaaaaggagctaaaccccttagtagcctcttcgtagcggtacttgtatttatacctagaatatgtagacgtttgtgcagatggagatgccaagagcttatggacacacctcgaaacaagcacgagcagacgactaccctgtacacgcataacaacgaccttagaaaaaagacggcattcgagctccagattcttagtgttaagacangaacacttaggtcggagacacagactttggatacgcagtgacggaacgagacggcactattaacacataagcactgctgacgcaagagtagaattgacgtcgagcgaatgggttccgaaaggtactaacggacaatttcttcttaagattttccacagcattgttcctacacggttaattggctcgccagcgaagcgagatcgccactttcgttaaagaagttcgcgcacgttgtgcataagaaacatttcttatcacctggtcttaagttacgcgcataaagacaggaggataaccaaggattgccctctaatggtggacccaacccttaggtgcacaccaaagaaaacacctttaggttggggaaagcacggcacgggatcacacggaacgacaatagttttggaaaaggcgtaacattcccaaagttaagggcttaaggaagctcccctttagcgacgagaagggcaacggtcccgagcggccgaaaataatagagccgtaagaaagggccgacatttaccatacagggcctgtcccgaataaacacacctccggagacgataaacgcacgtgtgaggcaacaatatggagattcggcgctaatagacaccaaagttacaattagcaccgtgtggaagacatataccccgttacgagaggaaagaaccgccaataagttcaggaggaatcccgcaaaaaaagttcgtgtaaggattctgaagccccacggttaagtgtaatagcacatcgggcaataaatccattaagaagttcgggtcttcaaacggtcacacttataatangtttacacaccagagatagggcacatagagaaccccaatttttttgcgatacccccattgtcccccggacgcgattttagaaaggacgccctttggctaggttgtcaacgtgaacctatttacaaagagaagcgagatctcgttggtgaacgaccgttgggcacacggcggaacgatcgtcaagaacgctaaagtgcgccgccgaagtagatcagatatcgtaaacggacagttccagagaagagcccaagagcacacagaggatccgatattctgagaatgttacagggcccacg

SEQ ID NO: 643539 - DNA, 364 bp, Homo sapiens
  misc_feature (201)..(201): n is a, c, g, or t
cgtggatgaagtacccgacatcgagctggcccgggcccgcaacctgatttcacccaggatggagaaggccttgagtcaattggccctgcgctctgctgcgcccagcagccccgggggtccttcccaagggcccagcaacttggcctggggctaacccccaaccaggccaaccccggccttggcatggccttcgttcccagngtcctcttgaggggtcagatctgtgacgatcacagagacagagatgacaataccggccgacagacgtgagtaacgggctactgccgtgtggacgtgttcgagcagctgctcgtgagtgctgtcgatgggatgtgtctatatactgggaatgaactgtgctcac

SEQ ID NO: 643540 - DNA, 867 bp, Homo sapiens
  misc_feature (140)..(140): n is a, c, g, or t
  misc_feature (609)..(609): n is a, c, g, or t
  misc_feature (694)..(694): n is a, c, g, or t
gggcgaaggacatgaacagacacttctcaaaagaagacatttatgcagccaaaaaacacatgaaaaaatgctcatcatcactggccatcagagaaatgcaaatcaaaaccacaatgagataccatctcacaccagggttntgagaatggcaatcgatttaaaaacgtgcaaaaaagggggaaaagacgaaaaaaaatgagaaaaaaccagggtgccattagggggaaagggcaaagggggggggcaaacttgggggttggacaaaaacgggaaaatattaggcacaccgaaccttttttttttttgggttttttttaacccaaccctagtttcggtccgggcactattagggtttttctaaaaagcaaggcaaattaaaccccgcttttcaaacggggatttattcccgaaaataacccccacaagtttatgagggactacgccgggggccaaacacacaaaacgggggggtttttccccccaaaaaaggggctacgctttggggacgggcccagggcggcacaccttttcgagttttgtacacctacacccctctattgttttttctccccctaaaaagggagcccaagggcgcggacggccagcacnaaatactactttatttcccctgtcgtttttataacgggcgcgaacacaaaatcataacgacccgtgttttatacaaggggctgancaaaagatataaaatctagaaacatctttttatatagcacaccgcagcccggaaaaatgacgtttctacattctccgcgttcgatggaggaagcaagaagcacctcgtaatccccgtacgccgcatctaaaagggcggatctcgccttacccgtaaaaaatgcttttgcccac

SEQ ID NO: 643541 - DNA, 113 bp, Homo sapiens
gcagggtctccagtgcacaccaggctcggtcccccagcccccgcatggcttttgttcccaagcccctcacgcagtcaatcctcagtggggtcagtcaagcattccattgccag

SEQ ID NO: 643542 - DNA, 344 bp, Homo sapiens
  misc_feature (255)..(255): n is a, c, g, or t
  misc_feature (293)..(293): n is a, c, g, or t
  misc_feature (325)..(325): n is a, c, g, or t
  misc_feature (331)..(331): n is a, c, g, or t
tcgcagcctgtcccactgcccctacctaagaatctgagagggaggttatctttgaaagctccctagatgattctatcatatatccattgttgagaactgcagttaatctgcataacattttcagggaaataatattatgctacagtaatagctaaatcaagacagatatagtcagtaattactcagttaaatgtcttgatggtgttaattaaaccaattgctttaaaatacttcagtcagcttggactaaaaaantaaggaaaaacaaaaaacccagtttggggcttcaaaantttaaaaaactcttaccaaggccaggaggganttttgncaaaccaaacttt

SEQ ID NO: 643543 - DNA, 329 bp, Homo sapiens
  misc_feature (141)..(141): n is a, c, g, or t
  misc_feature (149)..(149): n is a, c, g, or t
  misc_feature (168)..(168): n is a, c, g, or t
  misc_feature (171)..(172): n is a, c, g, or t
  misc_feature (194)..(194): n is a, c, g, or t
tctagttcgcgaccagctcgattgcttatgtcttgtctgagcgagctacctataccttcactctgtagagaagtttcctcagctttaaacttataaccccagctgtggtctctgagagactgaagattcgaggctccctgnccagggcncccttcaggagctccttantannggacttatcaaactggtttcanagcacagagctcagtaatttacaccagaaataccaagggtggagatgctccagctgctggtgaagatgcatgaataggtccaaccagctgtacatttggaaaaataaaactttattaaatcaaaaaaaaaagcgg

SEQ ID NO: 643544 - DNA, 107 bp, Homo sapiens
taaatttttccccccccccccccgggggggggggggttttttttggggtttttttttttggggccccctgttttttttttggggaaaaaagccccctttgggggcca

SEQ ID NO: 643545 - DNA, 200 bp, Homo sapiens
  misc_feature (65)..(65): n is a, c, g, or t
accatctagcacaggccagcgaacgaagaagacggcccgacctaggattcacaaactggtttcanagcacagagctcagtaatttacaccagaaataccaagggtggagatgctccagctgctggtgaagatgcatgaataggtccaaccagctgtacatttggaaaaataaaactttattaaatcaaaaaaaaaagcgg

SEQ ID NO: 643546 - DNA, 1463 bp, Homo sapiens
  misc_feature (478)..(478): n is a, c, g, or t
  misc_feature (1463)..(1463): n is a, c, g, or t
ggtgacttgaactctcgggctttgcgagttataggctgggtcggggctcagttgtcttcagagaagctcgagagctcttaggatggatccgtggaacaggaagggatggggtgccataaagatgataagggcgataggaggacgtgcaatcgcagtcccgaggatcgacatccttgagccccggcatcagtgaatgagtgtgacgcggcgatagttagtcaaggctggcaggcgggcaatcctatcagaatcgcatcgtactcatccagcctggctcagtaacttcatgtcattccaaacaagatggagatacgagcaccatgttaccagcacaatggaggcatacttgcgagacgtcgttcatacaggggatacagcatggatatacgatcgagaaatgtacatccgttaaccacgtacagacagacagggatgatcgtagtgtggggacccgagaggcctgaggactttacagagntagcatgaggtacatacgcggaggggcgcttctctgaaagcaaaaaactaggatccgacttcctgtttctcctatagggagggacctgggaagctgtgagatgagcacgttgaatgcaggacttgcgcctgcgcagtagggcaaacgcagaaagtcctcatgcggcgtggggttggggggaaacttagggcggccacttgaacacggttgaagcacttgcgcctaattcggacaacatacgcgttggatcgtaatgcgtataggccatggacaccacattggttgttctgtgcccaaccattgtgtgggtgtccccctttatcacttatggccttgtgattcgacatgggtgagaagggggtaggaagagttggggctagttgttcatcattacacaggggagggtaccaagacggcggggaaacctacctagttccggcccatttttcgaacatcaagcgggtgcaccacgttcgggcaattaggaagcgccaaggcgcctgtcctgtgtctgtggccttataatcgccctttcgtgtcggtgagaatcgtcctatagtcccacagggaatccgagagcgggtatcgaccatctccgggcgagcgttagttgacttgaactcgaagaggaattcacgggcctcatagttttcggatcttgtgcgaagggagtggggtggaagacagattccgtggggggagtcccctgtgagaaggatgctttagatggggcgttccaggatactttccggcacgaaaagcactcccgtaaccaaaggggacttggagagggccctaaggcagcgggagccattttgccccaagcggtacagatcgtttggcggggttcacaagagggagcgttaacaatcttcgccaggaaattttcttggcgcccggtacacaactctcctggagagacggtgccacattctgaccacaccacgtctttggaattatagacgaacccgaagcgcagattgtn

SEQ ID NO: 643547 - DNA, 1144 bp, Homo sapiens
  misc_feature (221)..(221): n is a, c, g, or t
  misc_feature (223)..(223): n is a, c, g, or t
  misc_feature (240)..(240): n is a, c, g, or t
  misc_feature (264)..(265): n is a, c, g, or t
  misc_feature (267)..(267): n is a, c, g, or t
  misc_feature (269)..(269): n is a, c, g, or t
  misc_feature (271)..(271): n is a, c, g, or t
  misc_feature (276)..(276): n is a, c, g, or t
  misc_feature (286)..(286): n is a, c, g, or t
  misc_feature (288)..(288): n is a, c, g, or t
  misc_feature (305)..(305): n is a, c, g, or t
  misc_feature (307)..(308): n is a, c, g, or t
  misc_feature (310)..(310): n is a, c, g, or t
  misc_feature (316)..(317): n is a, c, g, or t
  misc_feature (348)..(349): n is a, c, g, or t
  misc_feature (374)..(374): n is a, c, g, or t
  misc_feature (376)..(376): n is a, c, g, or t
gagagccgcgcgccgggcgggaatgtaagatggcggagtagcaacgcaaagcgctggtatgagtctgtggccgacttcggttccggtctctgcagcagccgtgatcgcttagtggagtgcttagggtagttggccaggatgccgaatatcaaaatcttcagcggcagttcccaccaggacttatctcagaaaatgtgctgaccgcctgggcctggagctangncaggtggtgactacaantcagcaaccaggagacctgtgtgnnanantngtganagtgtacgtngngaggatgtctacatgtncnnantgtttnnggcgaaatcaatgacaatttaatggagcttnngatcatgattaatgcctgcaagatngnttcagccagccgggttactgcagtcatcccatgcttcccttatgcccggcaggataagaaagataagagccgggcgccaatctcagccaagcttgttgcaaatatgctatctgtagcaggtgcagatcatattatcaccatggacctacatgcttctcaaattcagggcttttttgatatcccagtagacaatttgtatgcagagccggctgtcctaaagtggataagggagaatatctctgagtggaggaactgcactattgtctcacctgatgctggtggagctaagagagtgacctccattgcagacaggctgaatgtggactttgccttgattcacaaagaacggaagaaggccaatgaagtggaccgcatggtgcttgtgggagatgtgaaggatcgggtggccatccttgtggatgacatggctgacacttgtggcacaatctgccatgcagctgacaaacttctctcagctggcgccaccagagtttatgccatcttgactcatggaatcttctccggtcctgctatttctcgcatcaacaacgcatgctttgaggcagtagtagtcaccaataccatacctcaggaggacaagatgaagcattgctccaaaatacaggtgattgacatctctatgatccttgcagaagccatcaggagaactcacaatggagaatccgtttcttacctattcagccatgtccctttataatagagtaacttctgaggctttttgagaataaaatccaccccacccttgtt

SEQ ID NO: 643548 - DNA, 465 bp, Homo sapiens
ccacgcgtccgaatttaagtatttaattaatcaaaaggcactacgataccacctaaaacctactgccttttgattaatttaagtatttaattttcatcttccttctttggatctatttggcctctcaaatgaactgagattcctgttaaaaaagattgatgttattgtctcttgtagaggaaactaataaagtgtgtgtacctgtgtgatttggggtctgtatcatacataatctgtactgatctctctgctaaaggtttggtttagatagatgtcttgctgtccattgatagctcttatttgtttccaaactacgttagcttcattgttaaaccaagagaagacattggcagcagttttattcaactgtaagactaagatgtctggagtttactggaaatgttcattagagatgtgtaatctcttgtcgcagatatccctaaacttatacgcatgtataatgtc

SEQ ID NO: 643549 - DNA, 440 bp, Homo sapiens
catatgatattttgttgtggaagcctaagcaggctaatatactcctccctgactaaaattctgcaatgacaagtaagatgaatccaaatcaacattttttccctctagacttctctcagctggcgccaccagagtttatgccatcttgactcatggaatcttctccggtcctgctatttctcgcatcaacaacgcatgctttgaggcagtagtagtcaccaataccatacctcaggaggacaagatgaagcattgctccaaaatacaggtgaggatgagatttgtgcaaaacaagacttttctaagtgtttaggaggtggttacttacgttgaattaggtctctggattctgaagatatctttctttggtctgaaggatttagtcttgtcatcagaatttgtgatccaaaagttaacaatcacctgtttcttttcctttt

SEQ ID NO: 643550 - DNA, 159 bp, Homo sapiens
gactctagagatccccccgccgtaccaggttgcgccataccaaacgcccctcttcgtctgattcgtcctaatcacagcagtcctacttctcctatctctcccagtccgtagctgctggcatcactatactactaagcagaccgcaactggtacggcggg

SEQ ID NO: 643551 - DNA, 2088 bp, Homo sapiens
  misc_feature (221)..(221): n is a, c, g, or t
  misc_feature (223)..(223): n is a, c, g, or t
  misc_feature (240)..(240): n is a, c, g, or t
  misc_feature (264)..(265): n is a, c, g, or t
  misc_feature (267)..(267): n is a, c, g, or t
  misc_feature (269)..(269): n is a, c, g, or t
  misc_feature (271)..(271): n is a, c, g, or t
  misc_feature (276)..(276): n is a, c, g, or t
  misc_feature (286)..(286): n is a, c, g, or t
  misc_feature (288)..(288): n is a, c, g, or t
  misc_feature (305)..(305): n is a, c, g, or t
  misc_feature (307)..(308): n is a, c, g, or t
  misc_feature (310)..(310): n is a, c, g, or t
  misc_feature (316)..(317): n is a, c, g, or t
  misc_feature (348)..(349): n is a, c, g, or t
  misc_feature (374)..(374): n is a, c, g, or t
  misc_feature (376)..(376): n is a, c, g, or t
gagagccgcgcgccgggcgggaatgtaagatggcggagtagcaacgcaaagcgctggtatgagtctgtggccgacttcggttccggtctctgcagcagccgtgatcgcttagtggagtgcttagggtagttggccaggatgccgaatatcaaaatcttcagcggcagttcccaccaggacttatctcagaaaatgtgctgaccgcctgggcctggagctangncaggtggtgactacaantcagcaaccaggagacctgtgtgnnanantngtganagtgtacgtngngaggatgtctacatgtncnnantgtttnnggcgaaatcaatgacaatttaatggagcttnngatcatgattaatgcctgcaagatngnttcagccagccgggttactgcagtcatcccatgcttcccttatgcccggcaggataagaaagataagagccgggcgccaatctcagccaagcttgttgcaaatatgctatctgtagcaggtgcagatcatattatcaccatggacctacatgcttctcaaattcagggcttttttgatatcccagtagacaatttgtatgcagagccggctgtcctaaagtggataagggagaatatctctgagtggaggaactgcactattgtctcacctgatgctggtggagctaagagagtgacctccattgcagacaggctgaatgtggactttgccttgattcacaaagaacggaagaaggccaatgaagtggaccgcatggtgcttgtgggagatgtgaaggatcgggtggccatccttgtggatgacatggctgacacttgtggcacaatctgccatgcagctgacaaacttctctcagctggcgccaccagagtttatgccatcttgactcatggaatcttctccggtcctgctatttctcgcatcaacaacgcatgctttgaggcagtagtagtcaccaataccatacctcaggaggacaagatgaagcattgctccaaaatacaggtgattgacatctctatgatccttgcagaagccatcaggagaactcacaatggagaatccgtttcttacctattcagccatgtccctttataatagagtaacttctgaggctttttgagaataaaatccaccccacccttgtttccccttggtatttgatgacaaattcagcagaagacccggcttgctccagtgtagctttctacatcccacatcaggtatattagagcttatccgaactggggaaagacggattgagattaactgctgggacctcctacctgcattatctcattctggcttccttgataattctgtgggccttgcagctttaactatagctcagctgctgcaagatttcagacttttgaggatgttgtgtgagggtgtttgactgtgactggggaagctcagactactttgtatgtgaatgcttcagggttttctttgttgagaacaactagcaacaaaggcaacccatgtgtgaccagttctccccaaggtctatgctaaattatagcaagagccctgggcaaccccaaacctagtcctggtagctgagcaccctgtaaggcaggagcaggcagctcagcttgagcagacattgggtggggggtggggggtggttgaggggggaggcagcacagtgcagcaaatgtttcttgggaggaagaagcctgatccatcaccatctgcttgactatgtagcttggattctcctttgtacctatccctttcgatttggctttaccttcatctatcttgatcctttcctggccaaatatcctcttgggcccaaatgaacattgtaccatagtcttctggaaagcaaacatgcttcctgctatgtaattgctaacattcatattagatgatgtgctgtagcttgatcttccttagcctactgccactgaggcagtaggttttaggtggtatcgtagtgccttttgattaatttaagtatttaattttcatcttccttctttggatctatttggcctctcaaatgaactgagattcctgttaaaaaagattgatgttattgtctcttgtagaggaaactaataaagtgtgtgtacctgtgtga

SEQ ID NO: 643552 - DNA, 313 bp, Homo sapiens
  misc_feature (76)..(76): n is a, c, g, or t
  misc_feature (160)..(160): n is a, c, g, or t
  misc_feature (212)..(212): n is a, c, g, or t
gttgtcctccttttggcccaggacctcgggtggcctcacgctttgtaatccccaggccacttttggggggcccctnggcaggcggatccacaaggtccgggaagtttcgaaaccagccctggccaaacaaggcaaaaccccgtctctacttaaaaatacnaaaattagccgggcatggtggtgtgcgcctgtaatcccagctactggggagnctgaggcagaagaatcgcttgaacccaggaggtgaggttgcagtgagctgagattgcaccactggactacagcctgggtgacagaaccgagctccgtctca

SEQ ID NO: 643553 - DNA, 107 bp, Homo sapiens
ttattcgtgtagcacagggtagacagaaatcctttcataaagcaccagcagtgtgtaaaagatgagctaccattacttatactttaatgggttcagcttcaagatct

SEQ ID NO: 643554 - DNA, 2276 bp, Homo sapiens
  misc_feature (221)..(221): n is a, c, g, or t
  misc_feature (223)..(223): n is a, c, g, or t
  misc_feature (240)..(240): n is a, c, g, or t
  misc_feature (264)..(265): n is a, c, g, or t
  misc_feature (267)..(267): n is a, c, g, or t
  misc_feature (269)..(269): n is a, c, g, or t
  misc_feature (271)..(271): n is a, c, g, or t
  misc_feature (276)..(276): n is a, c, g, or t
  misc_feature (286)..(286): n is a, c, g, or t
  misc_feature (288)..(288): n is a, c, g, or t
  misc_feature (305)..(305): n is a, c, g, or t
  misc_feature (307)..(308): n is a, c, g, or t
  misc_feature (310)..(310): n is a, c, g, or t
  misc_feature (316)..(317): n is a, c, g, or t
  misc_feature (348)..(349): n is a, c, g, or t
  misc_feature (374)..(374): n is a, c, g, or t
  misc_feature (376)..(376): n is a, c, g, or t
gagagccgcgcgccgggcgggaatgtaagatggcggagtagcaacgcaaagcgctggtatgagtctgtggccgacttcggttccggtctctgcagcagccgtgatcgcttagtggagtgcttagggtagttggccaggatgccgaatatcaaaatcttcagcggcagttcccaccaggacttatctcagaaaatgtgctgaccgcctgggcctggagctangncaggtggtgactacaantcagcaaccaggagacctgtgtgnnanantngtganagtgtacgtngngaggatgtctacatgtncnnantgtttnnggcgaaatcaatgacaatttaatggagcttnngatcatgattaatgcctgcaagatngnttcagccagccgggttactgcagtcatcccatgcttcccttatgcccggcaggataagaaagataagagccgggcgccaatctcagccaagcttgttgcaaatatgctatctgtagcaggtgcagatcatattatcaccatggacctacatgcttctcaaattcagggcttttttgatatcccagtagacaatttgtatgcagagccggctgtcctaaagtggataagggagaatatctctgagtggaggaactgcactattgtctcacctgatgctggtggagctaagagagtgacctccattgcagacaggctgaatgtggactttgccttgattcacaaagaacggaagaaggccaatgaagtggaccgcatggtgcttgtgggagatgtgaaggatcgggtggccatccttgtggatgacatggctgacacttgtggcacaatctgccatgcagctgacaaacttctctcagctggcgccaccagagtttatgccatcttgactcatggaatcttctccggtcctgctatttctcgcatcaacaacgcatgctttgaggcagtagtagtcaccaataccatacctcaggaggacaagatgaagcattgctccaaaatacaggtgattgacatctctatgatccttgcagaagccatcaggagaactcacaatggagaatccgtttcttacctattcagccatgtccctttataatagagtaacttctgaggctttttgagaataaaatccaccccacccttgtttccccttggtatttgatgacaaattcagcagaagacccggcttgctccagtgtagctttctacatcccacatcaggtatattagagcttatccgaactggggaaagacggattgagattaactgctgggacctcctacctgcattatctcattctggcttccttgataattctgtgggccttgcagctttaactatagctcagctgctgcaagatttcagacttttgaggatgttgtgtgagggtgtttgactgtgactggggaagctcagactactttgtatgtgaatgcttcagggttttctttgttgagaacaactagcaacaaaggcaacccatgtgtgaccagttctccccaaggtctatgctaaattatagcaagagccctgggcaaccccaaacctagtcctggtagctgagcaccctgtaaggcaggagcaggcagctcagcttgagcagacattgggtggggggtggggggtggttgaggggggaggcagcacagtgcagcaaatgtttcttgggaggaagaagcctgatccatcaccatctgcttgactatgtagcttggattctcctttgtacctatccctttcgatttggctttaccttcatctatcttgatcctttcctggccaaatatcctcttgggcccaaatgaacattgtaccatagtcttctggaaagcaaacatgcttcctgctatgtaattgctaacattcatattagattgccttttgattaatttaagtatttaattttcatcttccttctttggatctatttggcctctcaaatgaactgagattcctgttaaaaaagattgatgttattgtctcttgtagaggaaactaataaagtgtgtgtacctgtgtgatttggggtctgtatcatacataatctgtactgatctctctgctaaaggtttggtttagatagatgtcttgctgtccattgatagctcttatttgtttccaaactacgttagcttcattgttaaaccaagagaagacattggcagcagttttattcaactgtaagactaagatgtctggagtttactggaaatgttcattagagatgtgtaatctcttgtcgcagatatccctaaacttatacgcatgtataatgtc

SEQ ID NO: 643555 - DNA, 485 bp, Homo sapiens
atgaaacatatatttgttaatggactattccgggatgacttttaaatatttacactgaataaatacctgtatctggttggcccatgtcctagctgctgaatattcaggaaagaataagggatggctcctgaccttgagaagcttagatttctggtgaaagtagctttctcagtgcaattatactgtgagtggcatcttcttcctctctgggccctccccctggttcctgctccccactactattgccacagctgagtgtcaggctgaatgaatcatggagctatctgaggatggcagtacttacattactttattacgttgtaaaatacttcctgataagaacgtactagtggttttttgagtgtctggaaacattgtaaacctgtcaaataattctaaagattccgctgttaacatcagcttaaagatttgttagtaacgtaacttgccaaattccttgccccatcacagtggtctccctaatt

SEQ ID NO: 643556 - DNA, 131 bp, Homo sapiens
gctcatttgcagtggggagccaaaaggggcatcatctctgccccctctgctgatgccgccatgttcgctatgggtgtgaaccatgagaagtctgacaacagcctcaagatcgtcagccatgcctccttggt

SEQ ID NO: 643557 - DNA, 1867 bp, Homo sapiens
  misc_feature (221)..(221): n is a, c, g, or t
  misc_feature (223)..(223): n is a, c, g, or t
  misc_feature (240)..(240): n is a, c, g, or t
  misc_feature (264)..(265): n is a, c, g, or t
  misc_feature (267)..(267): n is a, c, g, or t
  misc_feature (269)..(269): n is a, c, g, or t
  misc_feature (271)..(271): n is a, c, g, or t
  misc_feature (276)..(276): n is a, c, g, or t
  misc_feature (286)..(286): n is a, c, g, or t
  misc_feature (288)..(288): n is a, c, g, or t
  misc_feature (305)..(305): n is a, c, g, or t
  misc_feature (307)..(308): n is a, c, g, or t
  misc_feature (310)..(310): n is a, c, g, or t
  misc_feature (316)..(317): n is a, c, g, or t
  misc_feature (348)..(349): n is a, c, g, or t
  misc_feature (374)..(374): n is a, c, g, or t
  misc_feature (376)..(376): n is a, c, g, or t
gagagccgcgcgccgggcgggaatgtaagatggcggagtagcaacgcaaagcgctggtatgagtctgtggccgacttcggttccggtctctgcagcagccgtgatcgcttagtggagtgcttagggtagttggccaggatgccgaatatcaaaatcttcagcggcagttcccaccaggacttatctcagaaaatgtgctgaccgcctgggcctggagctangncaggtggtgactacaantcagcaaccaggagacctgtgtgnnanantngtganagtgtacgtngngaggatgtctacatgtncnnantgtttnnggcgaaatcaatgacaatttaatggagcttnngatcatgattaatgcctgcaagatngnttcagccagccgggttactgcagtcatcccatgcttcccttatgcccggcaggataagaaagataagagccgggcgccaatctcagccaagcttgttgcaaatatgctatctgtagcaggtgcagatcatattatcaccatggacctacatgcttctcaaattcagggcttttttgatatcccagtagacaatttgtatgcagagccggctgtcctaaagtggataagggagaatatctctgagtggaggaactgcactattgtctcacctgatgctggtggagctaagagagtgacctccattgcagacaggctgaatgtggactttgccttgattcacaaagaacggaagaaggccaatgaagtggaccgcatggtgcttgtgggagatgtgaaggatcgggtggccatccttgtggatgacatggctgacacttgtggcacaatctgccatgcagctgacaaacttctctcagctggcgccaccagagtttatgccatcttgactcatggaatcttctccggtcctgctatttctcgcatcaacaacgcatgctttgaggcagtagtagtcaccaataccatacctcaggaggacaagatgaagcattgctccaaaatacaggtgattgacatctctatgatccttgcagaagccatcaggagaactcacaatggagaatccgtttcttacctattcagccatgtccctttataatagagtaacttctgaggctttttgagaataaaatccaccccacccttgtttccccttggtatttgatgacaaattcagcagaagacccggcttgctccagtgtagctttctacatcccacatcaggtatattagagcttatccgaactggggaaagacggattgagattaactgctgggacctcctacctgcattatctcattctggcttccttgataattctgtgggccttgcagctttaactatagctcagctgctgcaagatttcagacttttgaggatgttgtggaagaggccagaaaatggaagagacgcccctgtaacgggaatgctaatgaggaacatggggagcaggaggctgacaatgaggtagacgacgcagaggaagaaggtgcggcggcaagacggacgcggaaggaaacgaacggtgcctggtgaccccacgaaggctggaccgatggacgatgacggaagcctgagtctagctaccgggcaagccggcgcctgcagaatgattgaggctcacgacgtcgctccagaagctgagaccgacagcgctgctcaccgccaacacggctctgttctcttaacaacaaggcgcgtgactcatagcctcatccgtctagcactacggtccttgagtacaggccccgccacggactgccccgtagcggtctcccacctcccacctgcgtggaacacaccgggtcacagcaaacgcgcgccctaccgtttgtcaacgaaccgccctattgtacccacccccccttttt

SEQ ID NO: 643558 - DNA, 270 bp, Homo sapiens
  misc_feature (9)..(9): n is a, c, g, or t
  misc_feature (23)..(23): n is a, c, g, or t
  misc_feature (108)..(108): n is a, c, g, or t
  misc_feature (137)..(137): n is a, c, g, or t
  misc_feature (157)..(157): n is a, c, g, or t
ccttccctncccgagggtccggnatccaccgtcttgccttcctgctcttcaagcagggccagccgattgacttctctgaggaggcacgcccctcaccctgctatcagntggcccagcgggccttccggacttttganttctacaagaaacaccaagnaaccatgactccagccggcttgtccttcttccagtgccgctgggtatgctccgtcacctacatcttccaccattcttctggatcatgcgggagccggtgtttggagttgcgtg

SEQ ID NO: 643559 - DNA, 148 bp, Homo sapiens
ctctgatggtcccacagcacagaggaggtggacagctggacggccagcagagggagaacctgctgctagtcgacctcccaaagaataatgcccttcagagacttagtggcctgcgtgtgggcctcctctgtgctgcccctcctctgtg

SEQ ID NO: 643560 - DNA, 718 bp, Homo sapiens
  misc_feature (363)..(363): n is a, c, g, or t
attgaaagttccaattaatgcgtgacctgaacgaggtaaagtatttatctggaaagggaggtttctgggtttggaggagagtaatgaatgtgatcccaagttggaccatgggtttaccaagttgtgtggatgcctttgtggaaccatgtgttccctgtatgtcttaaaattgtggtttccagccaggatggtaaatttgcccccttgttgtggtatgtttaaaaacatgagtgcactcactactgggccctcttgtgaagattggagatttcaactgggtagattttcttggtaacggcttgttcctgagagcctgttcttctggaggagcccaccaccactgtttaaataccacgaccacgncttttcctcgagatcactttgagatttagttgtgcaccctgatttttggtcttaaacggaacttatgtgcccccatatatctttatttattctcttaagatttttagccctgtatagttaaaagtggctttacactgaatgaatgtcgcaaaagccgtttgtccccctttactgggttttgggggttgtttaaagaattaggggatgaacgatgccaaatggtttatcgttcaaactgtccactctgatcccaccccgtactgatagtacttccccgtatgatattgtgatgtttcataccatgccagtgaacataacccacttgttacctaaattaagaattgataaaaaccca

SEQ ID NO: 643561 - DNA, 363 bp, Homo sapiens
ccccaagtccccgctgctctactgtgacgctgactagctgaggtggagaaaggtgtgctcccctggtgatgtgactggactggtgttccagtcaaatcactccacctatgagccagtgctgctggcctagacgcgctcgtctgagtccatcccgcacctgggcgcagacgccggcctgcatgctgcactgcacgccactgtggtccaggaccatggtgcctgcactgacggcatccagcgcgtgctgttttggcaacaacctgaactactggctgcacaagcttgtcttcgtggatgccgtggccttcctcacggggaagctgcctctccctgccattggaccgctacatccttggtggacat

SEQ ID NO: 643562 - DNA, 779 bp, Homo sapiens
gctctcaagcttggcgttgtttggtggggttacacgcggtttcaacatgcgtatcgaaaagtgtatttctgttcggggtcccatctatcctggtacacggtcactgatgttcgtccgcgaagcgattgcaaggtgttcagattttgcaacatctaaatgtcataaaaactttaccacagagaagcgcaatcctcgcaaagttaggtggaccaaagcattccggaaagcagctggtaaagagcttacagtggataatacatttgaattcgaaaaacgtagataggtgaacctatcaaataccagcgaggagctatgtgaaataagactattgatgcgatgaagacgagttgacagtaaatcaacacagaagcgccaagctaaatttataatgaacagattgcagaataatagagagctacagaaagttcaggatatcaaacgaagtcaagcaaaacattcatcttatccgagcccctcttgcggcaaagggaaacacgtggacagcgaaaatggtacagcagttaacgatgaggctgtggaccttggaagatgctccttaaaatctctgtaacccatgcttttatgttcctttgaaaaatgcctgttgatgtcttggaactgtgaaatcattttatttttttacctcaggtcccttaactgaaaagcgcataacagacatcttgctgcattgccctctacgtatatcgatatcacggagttgcaatggacctccaagcacaccttcctgaaagagtgatgaaacctgaaaccctctggtc

SEQ ID NO: 643563 - DNA, 398 bp, Homo sapiens
caccaggggagaggcgaccagtgcagtctccgtgcaacgcagccggggcaggtacagggagtgctacaaatcagacgaagggagtgctgggacgcaaacggtgaacgcagtgagaatagattctaggaagaaactgggcatatggtacctcaatatgaaaagttcacatttagagaagagctttgcgtgagtgtgagagcacacacttgctcgttagaaagagagacgactgatttccttagatgtctcaagtagctttaaacacatatcataatttttttaaatgcaaaaaacaaacaaacaaacaaacagtccagttccacaagcccctactacttttcctctcttggtatttaccccagggcagggtctataaagtacggttccacaaagtcaaa

SEQ ID NO: 643564 - DNA, 187 bp, Homo sapiens
cccggggaattttttgggggaaaaggagggatgggtttaaggagttggaaattcgggaaggaaggttgggggccagggtccggggttgggtgttccggagccaaggaaaactgggaaagctgcccccctttgccaattatttattttttttttttgagagaggggaagggaaaggccgattctttga

SEQ ID NO: 643565 - DNA, 812 bp, Homo sapiens
  misc_feature (26)..(27): n is a, c, g, or t
  misc_feature (113)..(113): n is a, c, g, or t
  misc_feature (115)..(115): n is a, c, g, or t
  misc_feature (121)..(121): n is a, c, g, or t
  misc_feature (131)..(131): n is a, c, g, or t
  misc_feature (146)..(147): n is a, c, g, or t
  misc_feature (151)..(152): n is a, c, g, or t
  misc_feature (156)..(157): n is a, c, g, or t
  misc_feature (162)..(163): n is a, c, g, or t
  misc_feature (166)..(166): n is a, c, g, or t
  misc_feature (267)..(267): n is a, c, g, or t
  misc_feature (271)..(271): n is a, c, g, or t
  misc_feature (284)..(284): n is a, c, g, or t
  misc_feature (302)..(302): n is a, c, g, or t
  misc_feature (305)..(305): n is a, c, g, or t
  misc_feature (314)..(314): n is a, c, g, or t
  misc_feature (341)..(341): n is a, c, g, or t
  misc_feature (360)..(361): n is a, c, g, or t
  misc_feature (430)..(431): n is a, c, g, or t
  misc_feature (437)..(437): n is a, c, g, or t
  misc_feature (458)..(458): n is a, c, g, or t
  misc_feature (470)..(470): n is a, c, g, or t
  misc_feature (490)..(490): n is a, c, g, or t
  misc_feature (529)..(529): n is a, c, g, or t
  misc_feature (549)..(549): n is a, c, g, or t
  misc_feature (592)..(592): n is a, c, g, or t
  misc_feature (673)..(673): n is a, c, g, or t
  misc_feature (779)..(779): n is a, c, g, or t
cgggggggacggcgcccgccaggagnncccccactcccaggccagcccaccccggcggaccgggccccgcgcgcccaggcgaggtgaggcccgcgccgtcagggctgcgtggngncccgcncccctgcccngcccgcgaggaccgnngccnncccnngcganngcncccacccccgcgccccaggtgagccccggagtccaggtaaggctccgcgttgcaggtaagagcccctgagcgtagaggaggccttggcgcccgaaggtganagcncctcccctcctangggaccctcaactttcanggngaggcctcngacctcctccaggtgggggaccatctncccgatgaaccccctaaannaccagttaaccccactgctctccagatgaggtcgcaaggaccaaccagtgcttactcgctcatgctccnncgaaantgggaattgaaagctcagctnctccaaagctcntttttccagcttcagctgcnaggtcagcaagggtgaggccggaagcaggcgggtgattnaccctgggcatctccgagcntaagtttctccatggatgcaacctgaggcctcctcactgagtnaaaaccgagacgcctctggtccccggagaggctgctggctctggggaaaggagagagcagcccagtgtgacagagcgagtncccacggctctgggagtgcctcgcatgtgtgtggcccaggtcctgacagcacacctactccctccccggcaggcactgggctccctctgctccccgtgggccgctncccgcgttgggccacttcccccggcccccgcat

SEQ ID NO: 643566 - DNA, 262 bp, Homo sapiens
tcgatacgacttttttttacttctttctctctttctttgtagagacagggtttcaccgcattgcccaggttggtcttgaactcctggcttcaagtgatcctcctgtcttggccttccgagtgttgggattacaggcgtgatccaccgcacctggcccagaatttttcttatacttgaatacttcctatggattactttattttccttgaattaactccggaatgtattttatccccttctgtcgtcttctcgcaaaagtata

SEQ ID NO: 643567 - DNA, 110 bp, Homo sapiens
  misc_feature (14)..(14): n is a, c, g, or t
  misc_feature (43)..(43): n is a, c, g, or t
cacactggctcacntctgaagcctagcgctttgggaaactaangaaagtaaatcaactgaggtcagaagttaagagaccagcctggccaacatggtgaaaccccatctct

SEQ ID NO: 643568 - DNA, 574 bp, Homo sapiens
  misc_feature (494)..(494): n is a, c, g, or t
gcgtgcgctactactaccttcctgcaagaacttagacatataggatggcaaaagtaaaactaaaagaagccatgggctttctggtacggtggtgcctctccttgatgaacacatcttggatgaatccttccatttcccagcggagaatacccaataaaaaatatgtttaggcggggcgcggcggctcatgccggtaatcccagcacttggggagaccgaggcggggggatcacctgaggtcgggagttcgagaccagcctgaccaaggtggagaaaccccgtctctactaaaaatacaaaattagccaggcaggggggcgcatgccggtaatcccagctactcgggaggctgaggcaagaaaatcactggaacccaggagggggaggtggtggtgagccgagatcgtgccatggcactccagccggggcaccatggagcacggagtgaaccagactccgtctgcaatcccggcacctcgggagtgcaaggctgncggatcactcgcggttaggagctggagaccagcccggccaacacagggaaacccggtctccaccaaaaaaatacgaaaac

SEQ ID NO: 643569 - DNA, 210 bp, Homo sapiens
  misc_feature (82)..(82): n is a, c, g, or t
  misc_feature (89)..(89): n is a, c, g, or t
  misc_feature (103)..(103): n is a, c, g, or t
tctagaggacgggtctagccgcgcagtgtacaggccccggtgtgacaggtaggtcatgctgtgacaggcaccggtgtgacangccccgntgtgacaggtcggngtgacaggcaccggtgtgacaggtcggtcacgttggctccctggcacgcggcagagtggggaccgtgcccccgtgagtgtcacactggggtccacaccaggctgatc

SEQ ID NO: 643570 - DNA, 123 bp, Homo sapiens
  misc_feature (97)..(97): n is a, c, g, or t
cactctagaggatctgtatagcaaagaaaactcacatgtatatgagcgcactttatacttatattctgtacacgtataactaggtctaactatccanggatgcctccggcctcatttgaaagg

SEQ ID NO: 643571 - DNA, 352 bp, Homo sapiens
  misc_feature (347)..(347): n is a, c, g, or t
tacagaaaataattataattcattatagttactgtaaacatgtatacagcttaacaatatttaggtcacaagcgagacagtctttgagcgtcagaatagccttttaaaaatgggctaacactttatgaagtaaaaaggcaaataatcaaataatcattttgctggaagatgagtaccaatgtcatgataccaaaagtaacaagtaaactggaccttaaacttgttatatcatttgttcattgttattaaaatacatttagttctcctgcatcatatagaaaattccaatggggtaaagggatccatttaattatccataggggcccccttaaattctggatttggcncccgc

SEQ ID NO: 643572 - DNA, 260 bp, Homo sapiens
ggttactgcactgaccaacatggacaaaccccgtctctgctaaaaatcaaaaaaaattagctgggtatggtggtgcatgcctgtatcccagctactcggaagcctgaggcaggagaattgcttgaacctgggaggcggaggttgcagtgagccaagattgcgccactgcactccagcctgggcaacaagagcgaaactccatcccaaaaaaaacacaaaaaccatatacgtgtgtgtgcaacacacaaacacacatacac

SEQ ID NO: 643573 - DNA, 465 bp, Homo sapiens
  misc_feature (18)..(18): n is a, c, g, or t
tccccacctgtcaaatgngcattaagaattccattgtggtttgatacatggaggttctcactgtgttgcccaggctggagtgcagtagcatgatgatagcttcactacagcctcaagcaatcctcctgccacacctcccgagtacctggaactacaggtgtgtgccaccatgcctggctaatttttttattttattttattttattttttgtagagatggagtctcactatgttgcccaggctggcctcaaactcctggcctcaagtgatcctcctgcctcggtctctcaaattgttgggatgacaggtatgagccactgcacatggcccaagagtttttgtctgttagttttgttttttgagatggattttcactcatctcccaggttgcagtgagctgaggtcacgtcatcgcactccagcctggtcaacaagagggaaactccttccccgcctcccccacca

SEQ ID NO: 643574 - DNA, 304 bp, Homo sapiens
tcataatataatagagacattatatcgacctggtctgtcataatacagaagagacagtagatctagctggtctgtcataatataatagagacagtagatctagctggtctgtcataatacaatagagacagtagatttagctgctctgtcataccataatagagacatagagacagtagatttagctgctctgtcataccataatagagacatagagacagtagatttagctggtctgtcataacataatagagacagtatatctacctggtctgtcattttataatagagacagtgtcgacgc

SEQ ID NO: 643575 - DNA, 399 bp, Homo sapiens
ctctagagtatcccctagctgcataggtggataagcttatacactacgatcaagttggcttcatcccttggtatgcaatgctggtacaacatacgcaatcaataaacatatctatcacatagacagaaccaattacaataaccacattattatctcaacagatgctgaaaaggtctttgacaaaattcaataactcttcatgcttaaaactctatgtattgaaacatatctcaaaataattagagctatttattacaaacccacagccaatatactgaatgggctaaaactggaagctttccctttgaaaagtggcacgagacaaggattccctctctcaccactcctatttcacatagtattgcaatcatgctatcaggctggataacgaaatcaagg

SEQ ID NO: 643576 - DNA, 410 bp, Homo sapiens
agggaacacctgtatgctggagcacatgacagttactaatgcctgccttcacatattttgatctgttgatagacagatattgtcacagggtccttcctggttgtgatgtgcttggagacacattgaaggaacccttcccagaggataatgaatgctgtgtcatagcagggcctggattaaagaggagaagacagcacctgcaggagatgtaggaggctgtaaaaggagttaagagagcaaaggtttgggggactcccagggagccttatgtggtgagtcatcaatggagtacagcaggaggtgaccagagccgttcctgagggaactaaggttcacagagaaggttgctgtttaaggtcacaggtctaggagctgacaaagctggagtttgagccaagtctttggactcc

SEQ ID NO: 643577 - DNA, 161 bp, Homo sapiens
tctgtgtatcacagtgggcatggtggtgggtgctagtaaccccacgctgcttgtggacggctgttgcaggtgaatcgcttgaacacgggaggcggaggttgctgtgagccgacattgcgccactgcactccagcctgggcaacagagtgagactccatctc

SEQ ID NO: 643578 - DNA, 309 bp, Homo sapiens
ccccccccccccccccggggttttgggtttcggcccccccagggggcttttttttcccccaaaggcccccttttgaacccccttttttcccccaggttttgggtttcccttagggcccccccttggggttttccccgggggggggccaattttttttttttggggggcccccttttaaaaagggtaggttttcgcgcccccccccccccccccccaaggccccttttttttgggggcccccaaagggaaaggtttttttggggtttttttttttaaaaacgggggtttttttttttttttttaggccca

SEQ ID NO: 643579 - DNA, 161 bp, Homo sapiens
tagtagtgctcggtccctcgtacgcggccgcggccatcgcacacctggaagcgcgccgcgctcggcgacgtattgcgggatcttgccgctatccaggaagtgctggtacttctgcggcgtcatctgcggccgccaggtgccttcataggtttgcgtcaata

SEQ ID NO: 643580 - DNA, 117 bp, Homo sapiens
gatatggacatatcacactgatcactttgagttcaagtatgcagaaccaaggagaaaatgaaagtttcagagataaaaataggcttaaaaattaaaatgtgacaatgtaaaatctta

SEQ ID NO: 643581 - DNA, 168 bp, Homo sapiens
ggaccaaacatcacttatcgtgcagaagatcacttatcgtgcagaagatcaccgatagtgcagaagatcacctcgtgcagaagatcacctatcgtgcagaagatccaccttattgtgcagaagatcacctcgtgcagaagatcacctatcgtgcagaagatcaacctt

SEQ ID NO: 643582 - DNA, 274 bp, Homo sapiens
ttacaaggtacgcctggccttgaactttctaaggaaattcaagacagtctatcagaagtaaagtggaaaatagctttacaaggtatgtttggccttgaactttctctagtgttagaagcccttttgttccttttcacatgttatcaagtggttaaggcagggcggattctagatgaaattcaggacaatctatcagaagtaaagcggggagagagagtaggagcaaagagaaaatatggtacacaaaataagtcgtatcgatgtcgagcgatcg

SEQ ID NO: 643583 - DNA, 479 bp, Homo sapiens
  misc_feature (32)..(32): n is a, c, g, or t
  misc_feature (69)..(69): n is a, c, g, or t
  misc_feature (474)..(474): n is a, c, g, or t
cgcccccccattttattccctaaattaggccngcccaccaagggttaaaatttggctcacaggggaatncccttatggaccaaaggaacttcaaaagtctttcacatgaaaccaaatgcataaatgattgctttctctgtttcatgtttcacttaagccgagattaaggtataactgactattcctctactctcctctcacatgtaaattgtatattcagtgaaaggctaatcagaaactcaaaaaaatgcaaccctttctctcttacctgcctatgcttgaagcccctgcccctcttcaagttgtcctgcctttcaagaccaatgtacaccttacacatactgattgatgtctcatgtctctctaaaatgtgtaaaaccaagctgtgccccaaccaccttgggcacatgtggtgaggacctcctgaggctgtgtcatgggcacaccttaaccctgggaaaataaactttctanactga

SEQ ID NO: 643584 - DNA, 182 bp, Homo sapiens
gcggcccctactactatctactgctcgaattcaagcttctaacgatgtacggggacatgcctgtaatctcagcactttgggaggctgaggtgggaggattgcttgaggccaggagtttgagaccagcctgggcaacgtagagagaccccatctctacaaaataacaaaaaattagcaaaaaa

SEQ ID NO: 643585 - DNA, 454 bp, Homo sapiens
caatagataaaatggcagcaaaggtaaaataactgcttggaatcaatcacttctggggccaagaaaaattgtacctgagcttaatacagctcatgagttgcacttcttgaacagtgcagtttatgtggccccagaagatggatcttcttggtcatcttggtggatcttcaaagatgatgaaatacagttttcaaaaagatacagaaacacacacacacacacacacagatataaaaacatgactcacatagaatgactacatgtcaaagatttatttgactcattaatgagggacctagcaagattgtaaatctgattttgtgcaagtattgttttcttagttatggtactaggttgtaggtattaaggagattgtcattatagaatacttgctgatgtgtttagggatgagggcttataacatctaacttcagtttcatgtagttctgcaaaa

SEQ ID NO: 643586 - DNA, 237 bp, Homo sapiens
gctccttggagcaaaagcccactgactgctccatcgaatgagtcactggatctggaggacctgtcttctggtgctgggtgttgaccagctgtatctgggccctgtccccatgttagagcatcagatgcggtcttcgacatcctgccaggcccacacagctgcagtctttcttgctcccttcagcccgcatcccctcccctatctcccaccctgtacctcatactatgataccctctt

SEQ ID NO: 643587 - DNA, 1030 bp, Homo sapiens
tcacacgtgggtcacgaatactggcgaaaggtcccaccttatgcgtttgtccccactacagggagggggtcccatccttcaggggccgggaacggaattcggcgtaggacgaatgaatctcctcgtccttccaaagtctcgcccgtcccgggccccaacagatacgcaccagggaaagagttcacaccagggctaagaggacttaagagggatcaaacccaaaaggcaacacatcccgggcaattggactctcggaacaaattttggcagagagtacaacgaagaatcttaggcgggctgcacccagtttccaccacgataagggtcttttacggaataaaggaagatgtccgtgtcctgtagtgttcctgcattttcgggacagaatggaatctcagaccttgtgcaggcggactctgacttctgaggaagaggcccgtttgaagaagagtgcagatacactatgggggatccaaaaggagccgcaatctttaagtcttctgatgtcatatcatttcactgtctaggctaccacaggattctaggtggaggttgtgcatgttgtcctctttttatctgatctgtgattaaacgcagtaatacttttaagatggactggggaacaaacattcaactcctgaagccttagaacaataagaatggtttgctaaaatccacagctatatcctgactgctggatggtattaatcttgtgtagtcttcaactggttagtgtgaaatagttctgccacctctgacgcaccactgccacatgctgtacgtactgcatttgccccctgagccaggtggatgctttaaccgtgctcgcttatataacttcctggctccttcacgtgaacatgcctacgtccaacattctttcccagtgagtcacatcctgggatccaagtgtataaatccaatccatcaatgtctttgtgcattaattcttcccaaggatcttattttgtgaactatatcagtagtgtacattaccatataatgtaaaaagatcaaatatccacacatg

SEQ ID NO: 643588 - DNA, 897 bp, Homo sapiens
gcccatccaagacctggtaggccctgcgcgtcgctcacggtcgtctctatcaagagagcgacgcggaaccgagaaacagcacccaggactatcttctcaaaggagttctggatattcctacaatgacaagtctctctcagcgctgttgagcattggcctgacagagactccatcccaagtggtaaaacctggcttccagttctgcagtataataacagaatgcttcacggtgtcttcgcaatgcttgcatcgcagtgtcctagtgaacctagcaattcatatccagcggaactttggcatgacgattcggctcgttgcttgtccgaatcttagcattacttactggcttgtacgtcgagactgacgcagttgggaaccccggaatctcctgtagacagctgttgacgcctagatggcctgcacgtttgctacgcgcaacattgggctacacggagaatgaacgattctccagtactatatgtattgggtagcatgctttacccagaaactgtgagccacgtcttgcttacaatcatccggacaaaaaacattgttgcctactcttcaatgattaggtttacatcccttaatcatgaccacgaatgaaagaacctggaggagaaacctcaatattgcaattgatgtcatagatgctttaccacaaacatcctgaatcaggaatggcccgttcttgattcatcacagacctctttctgaaaagcccggacatggtacaagccatgtatcccaaaactgaacaattccacgaaagagttacaatggtaagacttatgataggcaagataacgagtgatgagcccactcaccaagggactgacatacctgttgttaaaggcggcatgcctgcacgttgcttgcaagcacctttgaggaatc

SEQ ID NO: 643589 - DNA, 683 bp, Homo sapiens
ggacgcgtgggtcgacccacgcgtcgcggacgcgttgggaaaaaaacaaaaaaaaaaaaaaaaaaaaaaaaaaaaaaagcgggccacacaatagactatatacctatagaaggggcgcaaaagagaatacgcgacaccagatttttttgacccagaagaggccgctagcaattgatagaagctagattagaaatgaaaagagctaagacctgagttataaagagtagtcaagatggaatatatcgcgggacgctggggaaaaatttggagctaaccgcacccgcttgattaccgcgtgagtctcacacatctcatggtgtgcacgacggagagcacaagaaaagatatattaaagagttaaccagagccaaaactatatacactgtctaaacccggggttaagacatgtgtgtattcacacaccaaaagcgcaattaattccagctgaaacgtataggcaagaatgatgaggaatatctacaaccaccaaagcctactgaccgcccccccccctctttgttctagtcccccggggcctagaactcctccgaagtaaccaacccccacggcatcagacttctgcacaaccaatacacaaccacccacaaacactgcatcatcatccccccgaccccaccatcccacccacccgcccggccctagcaaacgacccagcccccacc

SEQ ID NO: 643590 - DNA, 598 bp, Homo sapiens
ttgactcattatcagtaattttcccagaggaacggcattactggtatccacagtaaaggtgcacagtggttactgatcctatacaggatctttctaattaatagaacaatgtatcattaaacaatttggtaagcctattaccatgtagtacatatcgagcatggataagttattctcaaatcaacgtactttatatatcataaatcttaattcaagaacctaaaccaaatattacagacagattttattgcacttcacgtcaatgcacttcacagatactgcctataatatatggagacagagtcttgctctgtcacccaggctggagtgcaatggcacgatcttggatcactgcaacctctgcctcccgggttcaagtgattctcctgcctacagcctcccaagtagctaggactacaggtgtgtgccaccacgccaggctgatatattgaatttttagagagactgggtataaccatgttggctgggctcatctcaaactcctgacctcaggtgatccacccgcctaggcctcccaaagcatagggattataggcgtaagccaccatgcctggcctatttacacactttaaagcca

SEQ ID NO: 643591 - DNA, 241 bp, Homo sapiens
actatagactggatgaagtgttagcatgtactgctcggaggttgggttctgcatccgaggtcgcacccaagcgaaatttagaatgcaggtctggtgagtttaggacctgtgggtttgttaggtactgttgcattaataaattaaagccccatagggtcatctcgtctcttctctatgtacatctcgtctcttccttgtacatctcgtctcttctcttgtacatctcgtctcttctcttgta

SEQ ID NO: 643592 - DNA, 309 bp, Homo sapiens
tacttctctgcacacttgtactgggatttgtagccaggacaattagaccagaaaaagaaataaaaggcgagatttcagtgggaaagaatagacttttccaccaatgatgctgggacaactggatatccacaggagaaaccatgaagttgagccccctactcccaccatataccaaaattaactccaatgaatccattaaatgtaagagctagaatcatagacgtcttagaagaaagcctaggcctagatcttcattggcttggattaggttatgatctcttacttataacaccaagagcgactgacagt

SEQ ID NO: 643593 - DNA, 846 bp, Homo sapiens
tatatcaggtgtatcctgacacctaatctttaggctccggcatctcacgttacaatcttgttctcagctagtactcgcatgagggcttatctacttggctagttgcaagatccttatagtggcagcctactggctcatgcactgacacttgcctgtcaaccaatcatgtctctacgcaactggtatctgtcgaagctcttgcctgaagtttgtatccctatccagctattatttggattagtttttggtgcaacaccgggcgaattagtcgctcctggacttatggttacaaacagtacaggacttagcccttcttctccgagaggtgtggcactcgagagaagtcacgctcttgcgcttcctgaccgtatgccctaggatagcagacgctcgtggttccccgtgtctcttattcctctgtagatcctctcactacctctaaatgtacacagctctttcccagtggtatgttgctctaggcgtatatactagtgcgaacgagaatgaaaccaccatgtattcgatgtttttgagcaatgtagcattcacaaataaatttcactgcacgtattattccttaattcggatattcgtggatgatataaggagcgagatcgatcctcttgtgatgggtattctaatggcacgtttttattaatttaaactggtccgtaagaacgagaaggaagttggactcgcgtggggattacacctgtctgtagaatgtgtggtcccggagggaagcacctgacgcatttgaccacagggtcatgctccacttatccctccaaattacttacggccgcaacagcgctgcgcactggtctgaacctggagcaaacggat

SEQ ID NO: 643594 - DNA, 208 bp, Homo sapiens
aataccaaatactgccctcctcctactaatagggtcaacactttactatcttcctttaaaaatatatttaaaattagtttacatatcttcccatacatataaccattttaataatgtattaagtgtacagtgaagtggcattaagtacagtagagacaaaacatttgtgtaataatggatcccctatccacccgaggcacgaacttcg

SEQ ID NO: 643595 - DNA, 423 bp, Homo sapiens
  misc_feature (7)..(7): n is a, c, g, or t
  misc_feature (58)..(58): n is a, c, g, or t
  misc_feature (410)..(410): n is a, c, g, or t
ggatagnaaaaaaaaacatgctgggcattacaaaacccctgtttccatggctcctcanattgtaaagtgcctatgtatgggagacctagtacaatcctcctccccatgaaatgtaatggtgtcccattattcccggtgctggctggatgcagtggccccacgccctataatccccagcactttgggaggccaaggagggtgaatcactgaggtcaggagttcaagaccagcctggccaacatagtgaagccctgtctgcactaaaaatgcaaaaattagccaagtgtggtggtgcacgcttgtaatcccagctacttcggaggctgaggtgggagaattgcttgaacctgggaagcagaagttgccgtgagccaagatcacttcactgcactgcagtctgggcaacaganaaaggccctgtct

SEQ ID NO: 643596 - DNA, 239 bp, Homo sapiens
gacctaggtctgagaaggttgctgggttcctctgcagacattcacccaagcatcaaggggctgtcaaggccgtagcatggtgtccctggcagtccaatgtcctggcaaggcggagggggcaccagtgtatcgacacattcgcatcttggaatgtgtgctctagggcgcctgtctgagtgccgtggcatgcccgattcccagtgtgtgctccgatccgtctggttcatccccattacaag

SEQ ID NO: 643597 - DNA, 108 bp, Homo sapiens
  misc_feature (6)..(6): n is a, c, g, or t
  misc_feature (31)..(31): n is a, c, g, or t
  misc_feature (64)..(64): n is a, c, g, or t
tcgaanttcaagcttctaacgcatgtacggnggacatgataaaaagaaaatgtgatgttgtctntcccttctcttgcacttttgaaataaagtatttatctcctgcca

SEQ ID NO: 643598 - DNA, 448 bp, Homo sapiens
atggggggttgtccatcaaaggaccaaaatctcagatggacaggaggaggaggttttgacatcccgtgcacagcagggtgaccagagtcaatgggaatgtactgcattgcaaaacacctgagagagtccatgtcaaatgtctttttgcatttacattagagaggatgaaggccctgaggtccaagaacattgaaacctgacaggtcagtcatgcgtgtactccaacagctgcgggtaggggccaggcaagatgtccacactgccgtggcttcaaaggcatcctatcccaaggggtgaactgaaggacagcctggagcttcctggagaccagagggcccctccaccctacctggagcaacgccagagcctggactatttcctgcagcacttctcccctgccctgctctattttatcttttttaataaagatgactcctgaaaaaaaaaa

SEQ ID NO: 643599 - DNA, 299 bp, Homo sapiens
  misc_feature (249)..(249): n is a, c, g, or t
gagaggtgtgtctccctacacatgtgtacaacatatcctcatatttcttgggagtactttttgtatttaatatgtaatgtctttgaaatgatacactgccacgctttctactactgtgctctggacatgccacctcacacagctgtgcatatggccagcctggtggagtgaaataggaattcaactttcattttgttccagatggatagccaatcatggttgattgaactggaaatctaagttcctaanatacctacaacctctttctgaattctgttgtgtaagtaagcattcttttt

SEQ ID NO: 643600 - DNA, 1108 bp, Homo sapiens
aggatgatgaaaataactggtctttgacgatgagggtaatgtcctgctatgtgcgttgtctgcagaggatctaggacaaaagctggaagcgaggtgactcgttcgatcgcatgtgcagcgtgccacttaaatgcctgcatcgcgtatcgctctgccctctctggcacagtatcatgtcatcttactatgaaccacagacttgcgtaagctctatgggcgtgttgaacgatttcaggggaaccttggtagcgccatcgcataggcacgcggtcgtatgttgtggaaaagccagccatattgtgcctcgctttctacgcctttggacgttggggtggtgctcggattatgcggagctctggattgggcgcatgtgcttggttggagtgccctcgtcctcgttctttgtggcatctggcttggccttggcactctgtttggtccgatgcatagcgagcacgtctttggggtggcggaccctcctcgtgcttatgccatgtgtcgtcagatcattagggttaactgggtcctctgctgctccgtggtacctctggaccacagtctgcatgaggctgctggttgggaggcagggccactccgttccttcctggtgtgggagatgggcatctgaaaagtgggaagtcaggtgtgctcgaacagggggtgcgtctgtagcggcaggcgtgtacctcgcgctgaggttgctatgatgccgtgtccttgattctgcggctgaccgccctggtttgtatgggggccatttgctcgggtggaagtcaggataccagcgccttgaatggaagatgttctcttttgtgacattatggcttcgaacagagtattaactttggggtgcacagttgggagaattgcctgtgcccgaaggggggccagccccggtgcccctacgtataggtcgggtatggggattcctctgtggggtgcgggagcccggggggcttcccccccatcaggtggcacaaagtcacgtgcaagtggtggtcttgaaccgcaattaccacctatatcagaccccaccaacggggggattccccgacaatgggcctccggcgacgtgtatccaccttgtgtgtgtacagagggtgtcacc

SEQ ID NO: 643601 - DNA, 186 bp, Homo sapiens
  misc_feature (8)..(8): n is a, c, g, or t
ctacaggnagagagaactgtagggcaggataaggggatggagaaaaagtggggatgggaaggagggactctctcttgtaagccggctccaggacttcaccagattatttatttatgtgttttgtgtgtgtggctagtatttttttttttttttttaaaacggagtttctctctggtggcccgggtg

SEQ ID NO: 643602 - DNA, 1079 bp, Homo sapiens
ttcccctgttccgcatctgcgttgttggtgtgttcagactttggttgccgcttgtgggcggggctccccatatcggcccgcgttgggttttcgtttgcctcgtgcgcgcaactggttgcctgggccgcttcacttagcgtgtcagtcctcgttcctttgcgtggcccgttgtggtcgtttcgttccttatgcgctcgtctgtggtcgcttgcgtacgccgtatttgtgcatgccgtgcctttctccaatctctggtgcgatggcacactgttgtgcccgcttcccaccgtagggtgaaggtgttcttgacggttggcttgtcccctttgcggttgactcccatgtttcccgcttcaagtctctcgtgtgcctaaccatgtagtagtgtattagatgcatgtggacgaaagtgatgatgaaggactttgttcgtggctagcggacgcactccgatccgcggattacctcccatgtatctagtttctgtgttcccttggacctatcagcgggggacccagctttctagcgcttcgtattgcacaagtcacctgtgaactgcacccgactacagaatctggtagaatcggtctggccttgcgctcagtccctcaatgcaaaggtaacttgttcgtcgcaaccctttcaaggagaaaagtagatgaggccagttaatgtatcacgttcatatcccaccctcgacgaatccgcttacaggggtcaacatagaacatggatatgcccaggaacatcacctaccaatcatctcctagaattgcagagggtggtacaacgcaccggactgagtgaggccaggattcttatccagtccacctgagggactggcggcaggactcctgtttcctctgggcctctatttccacagcctggtaatatgggggcaatagtcactatagccagctcaacagggaggatctaagcatcagaagagctcacatcaaatagacgtaaaagtgactaaatagttccataaggcacgctggccgggcgccaggtagactcacacactgtaatcccagcactttgggagccgaggcggaaagatcacgagtcaagtagat

SEQ ID NO: 643603 - DNA, 1069 bp, Homo sapiens
gccggcgcgcccaccccgagccccctccccagctgtggcgccctccacgacgaaggcctgtcgtccttcgtaacgtgtcagagtgaagacccccacggcggacccccatcatgcccactggacaacatcaatgctcccaccaggccgtgcccgtcccaccatgcctcgctgggcaccgggtgccctgggaggcggctgccccagtgcggcgccgggagccacctgcaccgcacgccaggaccaagatacattcacagtgtacatcacagcccggtggcagaacatgccagttgcagggcgccacatggagcccctagaagaggatggacagccacctggggccaaagcaggaggtactcggatcaccaccaacgtactgaactgccccccgcactcgggccagaacacattggctgagaagaccacgaggtgacaaagtctgcatgtccgaggcacggacccctgcacttgggagcctggcgcgaccagacgctgcaagaagctaagtgatacagggacctcaagatgaaggactcccggaagtcaagacagctcaaagacgtgaacgatgcaggttgggccacccggaccacaaagtgccgaggtcaagggcagtggaggacggcccgcagctatggaagcccacagagcccaccatcagcaacttgaacgcccacaccatgagtcagtgggagctgaaccctttgtggtccggaagcaccaaacagttctacaacacttacagaggcctcaaccagtcgttcacaaactacccctttcataaggaacgggttacaaagaggtgccacaaggcacagtgggacaaagttaaatttataacacttgtaaaaaggcgtaaaatggaaatagcacaaaaatgggtaaagaataattggtgtgatgtcaaaaagggttatataataaaagcgtgacaggtagtcagtttataacacatagaataataagctggttacgaaacaaagcaaagtagtgacattagcatgaatagaaggataaactcatgaagtatgagaataggagagcacataggggagagacaccacaagag

SEQ ID NO: 643604 - DNA, 511 bp, Homo sapiens
  misc_feature (11)..(11): n is a, c, g, or t
  misc_feature (38)..(38): n is a, c, g, or t
  misc_feature (41)..(41): n is a, c, g, or t
  misc_feature (77)..(77): n is a, c, g, or t
  misc_feature (96)..(96): n is a, c, g, or t
  misc_feature (123)..(123): n is a, c, g, or t
  misc_feature (149)..(149): n is a, c, g, or t
gggttgggccnaattaaggaaggaaaccaggctgcctnaancaacaaggggcaaacccggttgggtccctttccacnactggggaagcttttggtnctttcggtctttgcaattaattcttgntgctggtcacttctttgggtccacantgcctttatgaagctgtaacacttcaccgcgaaggttgcagcttcactcctgaagccagcgagccacgaacccaccaggaggaacaaacaactccagatgcgctgccttaagagctgtaacaccgcgaaggtctgcagcttcactcctgagccagcaagaccacaaacccaccagaaggaagaaactcaggaaaacagccgaacatcagaaggaataaactctggacacaccacctttaagaactgtgacactcgctgcgagcgtctgtggcttcattcttgaagtcagtgagaccaagaacccaccaattctggacacaattgcactctagcctgggcaacaagagtgaaactccatctcg

SEQ ID NO: 643605 - DNA, 122 bp, Homo sapiens
ccagaaataactgtttgagaactagctttgaataataatttttcccttgtacatgacctgctgaactttcgggtacagtgttttgggtagtaacttatttgtcatgcacataatgtatattt

SEQ ID NO: 643606 - DNA, 297 bp, Homo sapiens
  misc_feature (20)..(20): n is a, c, g, or t
  misc_feature (65)..(65): n is a, c, g, or t
  misc_feature (156)..(156): n is a, c, g, or t
  misc_feature (251)..(251): n is a, c, g, or t
aaaagcaaaacaagaagatncatcactttttcaattgaaaagaaaagtgtagagcatgactgaantgctcatcatcctgggagttccccatgtagtggctatgcagtgtggaaagtgagaaaaacccccattgtggtgaggagaatacttcaatgncccttgtccttgtcctcattaattcagctaaaggtggatttgaccaaaataatgcatggttaaatttgtagaaatgttgaaattggctgtgtttntaattttgcttgaatttttataaaatgtttaaccaaaaaaaaaaaa

SEQ ID NO: 643607 - DNA, 116 bp, Homo sapiens
catggatttgctggtgcagtacaactaggcttaataggattcaagcttctaacgttagaagccttgaattcgagggctcgaattcgagctcgaattcgaggtgttttccaaaaaaa

SEQ ID NO: 643608 - DNA, 194 bp, Homo sapiens
ccgcgctgtccccagtgacccaagctcagtgttacatgtactcccgtggtctctggtctgatctgatccgaaaatagcgatcatgagatctggatacggaggctggggtctgtcgcaggctgtagaaccggcgtggtgctgcctgtctttgcgtgctggtggcttgttccgttgccaggccttctgtgcccatc

SEQ ID NO: 643609 - DNA, 624 bp, Homo sapiens
  misc_feature (171)..(171): n is a, c, g, or t
  misc_feature (188)..(188): n is a, c, g, or t
  misc_feature (350)..(350): n is a, c, g, or t
gaaccaacaacacacaagcaaccaattggtgccagtttcccccagggttttgttaattatagcaaaagccttggccacccccaaacctagtctggttaggtgagcccctgtaaggcaggaacaggcagctcagcttaacaaccattggttgggggtggggggtggtttagnggggaccaccccaaatncagccaatgttttttgggaagaaaaagcctgatccatcaccatctgcttggatatgtaggttggattttcctttggacccatccccttcgatttgggtttaccttcatctattttgatccttttctggccaaaaatccttttggggccaaatgaacattgtnccatagttttttggaaaacaaacatgcttcctgctatgtaattgctaacattcaaattaaatgatgggctggaggttgattttccttagccccctgccccttaggcagtaggttttaggggggatcgtagggccctttgattaatttaaggatttaattttcattttccttttttgggtttatttggcctttcaaatgaactgaaattcctgttaaaaaaaattgatgttatttttttttgtaaaggaaactaataaagtgtgtgggcctttta

SEQ ID NO: 643610 - DNA, 394 bp, Homo sapiens
cttgttggagatactagttcataattttaaaatatgcaaaattaaggtgaaatttgcactttatagtaggatgagaatatactattatcaactagctgcaccatttgcatttggaagaaaagaacagataactggttcattcccaaccaacctattcatcccagacaaatgagatagaaattcctatttcagactacaatattgtaacaaacatgctttaaagttgcagagaattccattcttgatgtggtgatcaaaagtaccgtatacgtggcacatttatggaagcctaggtaaaatactgaattcttaacacacttctatataaaatgtttgattgtgtcatccacgcaataaatggtaaaatgttagagattcctgcaggtaaaataaa

SEQ ID NO: 643611 - DNA, 1507 bp, Homo sapiens
ggggtattcttttggtgctagatcacacaccaactggtgttgtcgcgtgccacacatcagcggcgtgtctccgcataagtgctccccccccctctgttttccgcgggttgtgagatgaccggggggcgcctgggtggtctttttgggggggcgccccgcctgtcttgcggcgactacgggggccccttatttatgagcggcgcccttttctacaccgggggcctccctctttgctggggatattcctacggggccccctgctgtagccgcgcgtttgttccccccgtggcgatgatgtagccccctcccggtgttcccccggggggcccccctccacacctcgggggggatatccccgcggggggtttgtgggaaccaccagcgattataagagttggtaagggtcccaacgagtgtaataaaggtacccccgcgggttataaaggtggcccccccacaccccgcccactagaagagggtgtcactctcacatctgtgaagggggacaacaacggagagggaccaacacgtgtgtcccacaaaaggtgagaacaccaaaacatggggggagagggatgaagcccacgccccctatagccgccccctcggaatggggagacacaaagcacattggggcccccacgcaaaaaagggagggcgcccctcttttggggaagtatttttccccgccgagatctcgtcgggaaattgggagataaagagagaacagcttttgaagttttgaagaaattcctccccggggaaaaatttttggtgagaaacccccccctgatgtttctccgcggagagggcggccgcgacccgcggtgaacacaaaccccggggagagacgtgtctacacaagggttgagagatttttccgcaccagggagcgcttttcgcacaatctggcgtcggtgacaccctcgggagacactctcatttggggtgtgcgcctctcatagagacttttccccaccagttattgccccaccctgttgtgtcgctctatgtctctctctgtgtgtgataccacacagccccacacagtttttctctgagagtgcacccacattccccctctgtctcgtcgtgggcctcatactctaacacaggggacacatagctgggtgcccacactttctattacagcacaacgtatagcactataatttccacacaccttataaatccaccgcacgagattcccactgtctccatcgccaccacagtgtatatttgcgctctgcgcacacttgaggcggtataacacaatttggcgcccacttgagaaggaggccattttcctcggtgctttgttcgggagaaaatatttttctttcacactgtttctgaagagcgctttcacgaggtctaccccactttctctcttctcgccactgtcctcccaaaaaaacgggtcccctggatggtgtggtcacgcccattttcccaataccagtttagaccgggtttaaataaaaaaaaacaatcatagaaaaccaca

SEQ ID NO: 643612 - DNA, 220 bp, Homo sapiens
agcataacactatttaataaccacgagtaatctctataatattggtacctacccttgtatataagataactaacttcaggtgacatcatgtcagccaagtatctggcatagtacctgtcatgtcaatgtccagttgaacagatatcgtcaaattttctggactcatgagcaatcaacattgattagggagcaataataagccacaggcttgccagctctg

SEQ ID NO: 643613 - DNA, 105 bp, Homo sapiens
cttctctggctccattctcaggcacctctctcttccctgatcatgcccctctggacactagatctttgcaatttcctccctcaaaacccgaccctagtcttcccc

SEQ ID NO: 643614 - DNA, 372 bp, Homo sapiens
gtgagcgttctagagggtcacaggtgcatgcgagagcagaattgagtgcaggaaaagggcggggtgtgggtaacatttgttctcgttaaacacaagtacacatattacaggctacacatgacacaagatttagcaaaataaaggttcatgatatgattgaaatacagaagtgtctcagctacataaatgattttaaattatacagtaagtgaacgggtgaaataaacaaagctatagcttatagaaagctcaaaaccgccctctgacatcgcttcgcgaaagacctttctttgcccagggcctcctcaccaaggcctaacagatggggatgtggttctgctaatttatcgactccgcaggtgaaatggaact

SEQ ID NO: 643615 - DNA, 310 bp, Homo sapiens
ctcgactgtctgtaccaagatatctcttcaactttttcttcactgtactgaattggtgactaaaaatcatatttttgtttttgctcaaaaagtcttgacttgtaaatttttcagtttctcctttatccacaggtaactctttcctcataaggcgaattgcttgcttccttgagttctgctctcaaagatacccttcattttctacctaatattaataactttaatcattcattattccattactatgctctatagtgtatacaatttctgttctttgtcatgttattaactaaattatttatttgttcca

SEQ ID NO: 643616 - DNA, 102 bp, Homo sapiens
gcatgtatatgagtgccgcctgtcaaacaattggtccttcatatataaacccattaaatacatttttatggtaacctatgttttacagtggaggtggtatag

SEQ ID NO: 643617 - DNA, 655 bp, Homo sapiens
  misc_feature (353)..(353): n is a, c, g, or t
  misc_feature (356)..(356): n is a, c, g, or t
  misc_feature (464)..(464): n is a, c, g, or t
  misc_feature (547)..(547): n is a, c, g, or t
agacgctacttccccgtatcatagaagagcttatcacctttcactgatcacgccctcataatcattttctcttatctgcttcctaggtcctgtatgcccttttcctaacactcacagatcatagaacgtacactatatatctaacatcttcagacgctcaggaaaatgagaaaccgtcgtgaactatcactgcccggccatcagtcctagctccgtcatcgcccatccctatcccttacgtcatccgtgtttacagtaagcagcacggagcgtcgacgtatcccctccctgtatcgcattcgaatacttcgaatgtgagccacgcgaagtgtgtgactgtgagacgctagcgngantgacaccgcagctacggcgggcgactgaatctgtcatatgtccttacgatactgtccgcccgattattccttaggagagcctagcgcgacccctggcgcatcgttccntttgtagcggtgtgtatccaaatctggaggtgaggtaactgcccggatgtgcaagaccgcgcgcacttcgggtagtaactaantgtgacgatccaccaagcacggtccttggcatcttcatgaagcctggtcacccgagcagttgagagtgcgttcaagaagagcagtaatggcataatatccccgggaac

SEQ ID NO: 643618 - DNA, 271 bp, Homo sapiens
gaattttgaaataaactctttatttaaactttcctttccacatttatagtttttggttataacgactgttgaaaatcatcttccatcacccaattttcttgcactgtttgatgtgcccttcaaatataatgtattgggttctaagatcgatcaaggcgcttctctttctaaattggatcccagaccctttttagtgctcttactgcatcctcccagccattatgtgatatcttcactgttatttcttcatcgtgaacctggggttctaagt

SEQ ID NO: 643619 - DNA, 256 bp, Homo sapiens
gggttttgggggggggccccatccctaagggagaaattcccccaccccaaggatttttttctttggtttaaaacgggccccccccttccccccccccccggccaggggggtttttggcagggccttttgttttgggggaaaaacaggggcccccggggtgccctttaaaaacaggtggggtagccttttggggtttgggttttttaagggtttttttgggccaaaaaaaaaaaagggaaactttggttttttttta

SEQ ID NO: 643620 - DNA, 185 bp, Homo sapiens
  misc_feature (79)..(79): n is a, c, g, or t
  misc_feature (180)..(180): n is a, c, g, or t
gtcgagaagccccagttgtccctgaagcctcccctcagtcgggccctcctcccgccagccgtcccgaacggggccgttntcaacttttaaagggagcggcccacgctccaagcgtggggagcgcccgaggtcctctcgccacgagctggacgctcttcaggacgtttcaccgccccctcnccccg

SEQ ID NO: 643621 - DNA, 110 bp, Homo sapiens
tcccagaggtagccgtgatggagggcaaggacagctaacttcactttacacccttgtggtactgcttgactttttgataaaagtctcttattttcataatttaaaacatg

SEQ ID NO: 643622 - DNA, 211 bp, Homo sapiens
atgagtaatcttggtcaatttggtttaagtctcttctatgccatcccagggaggaggatgaatctgggtatccagggctaagtgcgagctgcagtgcaggatgctgagtagtttggggcagcagaggagagggaaggagggagagtgaaacaataattcgtaagtgttcagtttctacacaactttatcatccgccaagatttactcatcg

SEQ ID NO: 643623 - DNA, 1706 bp, Homo sapiens
acccaagccaaagggtatccagctttataaaaaatacttccgcaataaacaactcatgggttattttcagggcaagggacatggggcagagacaactcggctaccaggctattaacaaacaacttttacaaactctccctttcttctcaaggtggactatcaccaaaaatctcaagaaacgccacataataaacacccaatggaatgtctctcaactcgtggagtgcctcgtgaacacagagggcaaaagagttatagaaggtggagggttgtgcacatattctccacatattgataggccagtgtgtgggttatcacacaaactttttctccacaagagcccgacaccccgtgaaacttatctcgagcgacagagcgtgcacacagtgaacacagaggtggacagagaacttaacctctgagaagagatctcgcacacaacctcataagaacatgtgagacacccacgggggcctctttgtggaaacaggggtgccacctctctcagcgggggacatctcacggggagaacagggtctccaagattgtggtcctgtgagcaccacgcggggtgtaacacccaagagtgccaccatagggggggcctagagggtgtctctcacaaacgagacagtgtctctgtgggggctcttatagagcgggggagattaaacagtctccatagtgcctgtggcacacagcaagttgggcaagagtggcgagaaaagagagggacaacatttataacacaccaaacattgggcgtggtttgttccattatataacaccaacgacagggggcctcttggggggtcgcccacaaggggtgcggcccacagtgtgggtgtgctccaaaagggctccagcggggaaaaatcgccccccttccctctaccgcggtgggggcaccgccccaacaggaaagggaaagagtgttcctccctcccaaaaacacctacagcaccggggacacacccgggcgggatataacctcccacacatttcaaatctccccaagctctctggggggagcggaccccttgtgcaataacagagggggacactattagtggcccccctgttctccccccccaaaaaaaataaccacaacaagctgggcagagggtggctcccgtggtggtgtgcctatacacaacaacacataatagcttttttctctaacacagacaaccaacgaacacagtggtctaccacacacaagcccatcgcgcgcattctttgtcataactaaccgactggtgagactaaaagaaatcgtattgagtagtatccacacacgttggtgttcagctgccccgacaaaaatatctacccaagggcgtatcatcaaaaagcggtcgacacaaccttgcacacgtgtggcaatcatccgaacaggccacttagacaaacttctggtgcccagagaccagtatggtagaacacactccaccatcacggaggagcgagaatatacccccgcctgctgcagacaatagaagtaccaccattaacccagtggggaaacgacgcacccatacagggagggcagcaaagcagtggcacgcctggtgagagcaacagcaaacaaaacggaatatatggtgcgacacacacagggaaacgacaccacaccaacaagcgagagacgggaagcacagacgtaggacgacgacgacgtaggggagcgtacatagacaacacca

SEQ ID NO: 643624 - DNA, 912 bp, Homo sapiens
  misc_feature (16)..(16): n is a, c, g, or t
  misc_feature (54)..(54): n is a, c, g, or t
ggagacctaggtaccngcgtccggagattcttcgggactgtgaagaacaccaantggagtctggctgctagaaaacgatggcacttcgttcagtgtggcgtgtgataggtgcttggcatggctgtggagggctacacacacatgtacccaggaaaccatggatctggtgttgtgtgtctcataggcaagctctagatatcaaagccttgtgaacaggacagcatgtatcctagagatggcacagtaaggcctagatgtacttgacatgtctggagagtgtggtcaagatgtccctcaaggtcgagtagatgatggtgcctacatcttgattggatgtcgaaagtgccgtaccgttctctattgccttgaacttccctggaagccaaacaggtattgcagatgggcaggtatagtctcgtggtcatacaagtacacaatcactcaagtggtgagccatggttgtgggggaaggacatgccatgtgtatcctcgcaggaaacttgatcgactgccatgtcatcttcgcctgatgtgttggaccttgctccatctggctctaggtctcagaagagaagcttgtttatgtctgcaagacctggtggccaagtactggcaagttctagggggcccagtgtctgggctgagcattgggacaggcagggcaatgctgggcacacgacaccatggaagtgactgtctaccatcgccggggatcccggagctatgtgcctcttgctcattccagctcaggcttcaccattactgaccaggtgcctttctccgtgagcgtgtcccagttgcggggccttggatggagggaacaagcacttcctgagaaatcaggctctgagctttgcgctccagctccatgacccagtggtatctggctgaagctgactctcctacacctgg

SEQ ID NO: 643625 - DNA, 386 bp, Homo sapiens
caccccaaaaaaaaagaggggaatggccaagtttttgtatgtataaagtcaggctcgatttcaggagagcagctgatcccaatttgcttcatgaatcaagggggggaaagggttataaatggattgatttagaaaatggttccccggccagtcaaaaaaaagaaaatgaaaaaaatcccccttaaagggagaaaccccacttcaaagatttttcagggatgagaatccccctttgtatttcaagataagggggtttaaaaaaaaaaaaaagaaaaaaacttgatgtaaattcccccttttccttggggttaatgaaaatcatttattcaggaaaaaatttttatatgttccccatgttaagaaaaaatggccattaaattttgtta

SEQ ID NO: 643626 - DNA, 200 bp, Homo sapiens
gcatattctaggtattatttggagttaggtcctcacttgggggacaacaaaaaagaaaagccaagcaaaccaatggtgatcctctatttggtgatgatgctgtgacaataagtttggaaccgtttttttttggaaacagccagtcccagtatattctcagaagcatgttgtcagagtgtggtcccggttaacctttctgg

SEQ ID NO: 643627 - DNA, 238 bp, Homo sapiens
atttcaggtgcagctcctccttgtccccccgtggtggctccgtagagactggaaacgaggacatgaagagctctgacagagacgcagcagaaactctgaaactgtttccagagggcctgcactgcttggaccagggccaccaccttctccttcacccaggcctagaacccgcgtgccaccgaggtctgcagccgctgaagcatggcctggaaccatctcatgacctttgtacacaaaa

SEQ ID NO: 643628 - DNA, 170 bp, Homo sapiens
  misc_feature (83)..(83): n is a, c, g, or t
agtaaataagtgggtatttggttttatgaagaataatgttgaggattagagatatagtatattagagataatatatagtatanaggttgatttaaatattttggtttggattaggtaattaaaatttttttggtaataggatatatgtttttatgtgttgttaagattta

SEQ ID NO: 643629 - DNA, 109 bp, Homo sapiens
cactcacttgactgtcacttgtctcctgccattggtccatcgcagtcatccctagccctctgctgggtcatctgcagtaggttccattgcagctgctgcgctgactgga

SEQ ID NO: 643630 - DNA, 107 bp, Homo sapiens
gatacgtccgcatcagtgggcacatgcgttcagccggtgagtccctgttgacttctagccgcagaacctgtcaggtccgatactggagtttatagccacttgctttg

SEQ ID NO: 643631 - DNA, 548 bp, Homo sapiens
ggagaaatcaccgttacggccactgtccaaatccccgcgtcgctgcacgccgcccgcccgctcccacgccacagccaccggcggcgaatagagactagagcggcagcgccggcagcgcggggccgttgcccagtgtttgcagttagagccccatctctctggcgtggttgttaatagactggaaagtctgtgtctgtgtcgctcactagtaaccgtgagtttttaccacttcgtcacctgtcggcggcggccgggagcaggttcccgcaggcggcgcggggggtcttccccgcgccccgccgccgccggcctcgcagacctgccctccagccccgccccgttcttgaccaaacatgacagactctgaacatgcagggcacgacaggtcgggaacccttcttgtctgtctttctgtcggatgagaggaggggtctggggcggcgggagcgggccggggccgggcgcctcctgcatgacctagacgtctctgtgtggctccgtcagttccatgacgcgcactcttatgtaaactgctggatcgcggccgc

SEQ ID NO: 643632 - DNA, 618 bp, Homo sapiens
  misc_feature (536)..(536): n is a, c, g, or t
  misc_feature (538)..(538): n is a, c, g, or t
  misc_feature (606)..(607): n is a, c, g, or t
ctgcaggtgtaggacagtgtttgctggtaacaactccaatgtgtattaataacttgaaaaggagcatttcactataaaagataatgaagtaggtaatgaaatcagtccttgaatgaaagcagtgcccttgagaagggatttttttttaaatatacagtaaaatatttcgtgggaacctaacactcacatagcatatggtttattaataatgcatatcctttctaatcacttcttcaattctttttgctgcagttctgtgctaaaatggggttgtggttaagtgaacgagaactctgcctacctaagaagttcattgtgttctaagtggaaggagagttactgaagggaatgtgaatttttaccgtttgtacttaagatacatttgttgtctaaaatggctctggataacatttttgggttaaaaaatgtaatttaaagccaccatagaaagtattttctgatttactgtccaaatgaattttgttgttaattgagaagtcaataaaatggattaaactgacagaaaaaaaacatananatatatcccaaggtgtaatttactcttttgtcaggataaaatcagaaaaatggctgattttagtaaannaaatttttagc

SEQ ID NO: 643633 - DNA, 938 bp, Homo sapiens
  misc_feature (546)..(546): n is a, c, g, or t
  misc_feature (726)..(726): n is a, c, g, or t
ggagaaatcaccgttacggccactgtccaaatccccgcgtcgctgcacgccgcccgcccgctcccacgccacagccaccggcggcgaatagagactagagcggcagcgccggcagcgcggggccgttgcccagtgtttgcagttagagccccatctctctggcgtggttgttaatagactggaaagtctgtgtctgtgtcgctcactagtaaccgtgagtttttaccacttcgtcacctgtcggcggcggccgggagcaggttcccgcaggcggcgcggggggtcttccccgcgccccgccgccgccggcctcgcagacctgccctccagccccgccccgttcttgaccaaacatgacagactctgaacatgcagggcacgacagagaagatggcgaattagaagatggtgaaatagacgatgcaggatttgaagaaatacaagaaaaagaagcaaaagagaatgaaaagcagaaaagtgagaaagcctacagaaaatcaagaaaaaaacataagaaagagagagagaagaaaaaatccaaaaggngaaaacgtgagaaacataagagaagatggcgaattagaagatggtgaaatagacgatgcaggatttgaagaaatacaagaaaaagaagcaaaagagaatgaaaagcagaaaagtgagaaagcctacagaaaatcaagaaaaaaacataagaaagagagagagaagaaaaatccaaaaggngaaaacgtgagaaacataagagaagatggcgaattagaagatggtgaaatagacgatgcaggatttgaagaaatacaagaaaaagaagcaaaagagaatgaaaagcagaaaagtgagaaagcctacagaaaatcaagaaaaaaacataagaaagagagagagaagaaaaaatcgcaaaaggcgaaaacgtgagaaacataagagaagatggc

SEQ ID NO: 643634 - DNA, 161 bp, Homo sapiens
gcaacacaggtggggctgctgctagcttaattattttagcagcttccctgtgtccaaaaactggtgaagacaaaatgaaatgctgatatgaacgtgtctttgggatgagtttgtcatcctctagagaaggcactttcttggaaaataatgccttgcttgtg

SEQ ID NO: 643635 - DNA, 896 bp, Homo sapiens
  misc_feature (504)..(504): n is a, c, g, or t
  misc_feature (684)..(684): n is a, c, g, or t
ggtcgacaactattggagtactttgggatagcactgtatttattcatgcattcattttgtgagaatcagcgattttaatctaagaggtttgcaaacttcggctgctgataatggttcttacattcttaaaggaatgttaaatgaagacgaattcgcaacagaaaccatatatggcctgcaaatgtaaaatatttactatctgggcctttatagaaaaatttttcaagtgcttgtctaaatgaatataacataaatccttggcatatgctttttttcttttgaaaatctttctgtaagatttgttttagaatgatatttgaaaattaaaattttccttctatagagaagatggcgaattagaagatggtgaaatagacgatgcaggatttgaagaaatacaagaaaaagaagcaaaagagaatgaaaagcagaaaagtgagaaagcctacagaaaatcaagaaaaaaacataagaaagagagagagaagaaaaaatccaaaaggngaaaacgtgagaaacataagagaagatggcgaattagaagatggtgaaatagacgatgcaggatttgaagaaatacaagaaaaagaagcaaaagagaatgaaaagcagaaaagtgagaaagcctacagaaaatcaagaaaaaaacataagaaagagagagagaagaaaaatccaaaaggngaaaacgtgagaaacataagagaagatggcgaattagaagatggtgaaatagacgatgcaggatttgaagaaatacaagaaaaagaagcaaaagagaatgaaaagcagaaaagtgagaaagcctacagaaaatcaagaaaaaaacataagaaagagagagagaagaaaaaatcgcaaaaggcgaaaacgtgagaaacataagagaagatggc

SEQ ID NO: 643636 - DNA, 107 bp, Homo sapiens
  misc_feature (10)..(10): n is a, c, g, or t
attgactcgnacccatggcggactccacatctgggcaccttcagaaggttatagcccagagttggggaaaccatagtattaaattgatggcatccgccgaagggtaa

SEQ ID NO: 643637 - DNA, 2095 bp, Homo sapiens
  misc_feature (1871)..(1871): n is a, c, g, or t
ggaaattgagagggaatggaagtggtcacataggctcttctgttggtggagcaaagtttgatttgcatcatgcaaatgctggcactaatgtcaaacacaaaagaggcgatgatgatgatgaagatacagaaagagaactgagagaaaaagctttcttaatacctttggatgcctcacctggcataatgctccaggatccaaggtcacaattgagacagttcagtcacattaaaatggacattactctaaccaaacccaactttgcaaaacacatcgtgtgggctcccgaagacttacttccagtacctttacctaaacctgatccagtgtcttcaatcaatttacctctgcccccacttatagctgaccagaggctaaatagattatggaatacaaaaagtgatcttcatcaaaacacagtgtccattgatccaaaattagcagccaaagccaaaattaacacaacaaacagagaaggctacctagaacaatttggagactcacacggttcaggagctaaattaggagatcctagactacaaaaaaattttgatcctaggcttcacagactgcccaatacagagtctcatcaagtggttatgaaggattcacatgcatcaaagggtgcccctcacttacccagatcaaaccctggttcatcacagccctcaggggcaggaactagcaattctggttccggggctctgcctccatatgcccctaaactctcttcctcagctggccttccactgggaacttccacttcagttcttagtggtattagtttgtatgaccctagggatcacggttcatcatccacatcagagctagcaacagcttcttcaggagaaaactcaaagaaccagaaaaaaagtggtggcttaaaaagtagtgacaaaactgaaccttctcctggagaagccatccttccacaaaaacccagtccaaacgtgggagtcactcttgaggggccagctgacccacaggcggacgttcccaggagttctggtaaggttcaggtcccagcagtgcacagccttcctgttcaggcattaacaggcttaattaggccacagtacagtgatccaaggcaggcaaggcagccaggacaggggagcccgaccccagataatgatcccggtagagaaacagatgacaaatctctgaaagaggtttttaaaacttttgatccaaccgcttcaccattttgttagctattgtgtaactgagcaattcttttcactcttgtgactatctcagtcctctgctgttttgtaactggtttacctctatagtttatttatttttaaattataaacacttttcagctgctagtatcagaaccacatgaagttatagcctctaaagcctgtggtattttatataatatttttataactttaagagactgtagtaattgacctaaaaacttatgttagcttcagtaaaagtacttttattgtaaataaacaatcatgaactcaacactctgcctgaatatatgccagttgtctttcataatcaatgtttagataaatgattgccactttttatatggttgtttagtttcaagcaatatgatgtacattacttttgagaaacagtattttgactaggacctctcttatttgtcagcacagaactgattaatatgtaatgctacctgctaattaaaatgtaaaatcaagtaaagaaaacattttaaaattacaattagcagagcagttcatgtttaagggcatcacttttattagtattggcaatattgtttgtgtaaatgtagcatttgaatgtcatatctttttaaagtattttattgtatactgtatcatagaagttggaggtatataaatagaacattttgctaaagngaaaaatttccaagttctctagcataactttttacatttaatttttcatatgaaatagcaattagttactgctgtgttacattgtgatgtttatgtatgtcaatgtttttgtctttaacagcataatttatattgctttttcaaatgatgtagctgcattaattgtgttcatcatgactttggcgatttttaacaaaatttttaaagacccagtgtggagagag

SEQ ID NO: 643638 - DNA, 321 bp, Homo sapiens
  misc_feature (59)..(59): n is a, c, g, or t
  misc_feature (83)..(83): n is a, c, g, or t
  misc_feature (107)..(107): n is a, c, g, or t
  misc_feature (132)..(132): n is a, c, g, or t
cccccaggacaacagctataccttcaaaaaaaaattaactcttccttcctagcaagcanacaagaaggtctgatagtgctganaccaccttatgttgtatagttgtncaccatttagaaaggactttatggnaccgcttcctttttggcttcaaaataaaattaactcttccttcctagcaagcaaacaagaaggtctgatagtgctgagaccaccttatgttgtatagttgttcaccatttagaaaggactttattggaaccgcttcctttttgcttcaagcatcagtatctaacaagcccctgtcatagctgcgtcctg

SEQ ID NO: 643639 - DNA, 1561 bp, Homo sapiens
  misc_feature (1169)..(1169): n is a, c, g, or t
  misc_feature (1349)..(1349): n is a, c, g, or t
ggaaattgagagggaatggaagtggtcacataggctcttctgttggtggagcaaagtttgatttgcatcatgcaaatgctggcactaatgtcaaacacaaaagaggcgatgatgatgatgaagatacagaaagagaactgagagaaaaagctttcttaatacctttggatgcctcacctggcataatgctccaggatccaaggtcacaattgagacagttcagtcacattaaaatggacattactctaaccaaacccaactttgcaaaacacatcgtgtgggctcccgaagacttacttccagtacctttacctaaacctgatccagtgtcttcaatcaatttacctctgcccccacttatagctgaccagaggctaaatagattatggaatacaaaaagtgatcttcatcaaaacacagtgtccattgatccaaaattagcagccaaagccaaaattaacacaacaaacagagaaggctacctagaacaatttggagactcacacggttcaggagctaaattaggagatcctagactacaaaaaaattttgatcctaggcttcacagactgcccaatacagagtctcatcaagtggttatgaaggattcacatgcatcaaagggtgcccctcacttacccagatcaaaccctggttcatcacagccctcaggggcaggaactagcaattctggttccggggctctgcctccatatgcccctaaactctcttcctcagctggccttccactgggaacttccacttcagttcttagtggtattagtttgtatgaccctagggatcacggttcatcatccacatcagagctagcaacagcttcttcaggagaaaactcaaagaaccagaaaaaaagtggtggcttaaaaagtagtgacaaaactgaaccttctcctggagaagccatccttccacaaaaacccagtccaaacgtgggagtcactcttgaggggccagctgacccacaggcggacgttcccaggagttctgagaagatggcgaattagaagatggtgaaatagacgatgcaggatttgaagaaatacaagaaaaagaagcaaaagagaatgaaaagcagaaaagtgagaaagcctacagaaaatcaagaaaaaaacataagaaagagagagagaagaaaaaatccaaaaggngaaaacgtgagaaacataagagaagatggcgaattagaagatggtgaaatagacgatgcaggatttgaagaaatacaagaaaaagaagcaaaagagaatgaaaagcagaaaagtgagaaagcctacagaaaatcaagaaaaaaacataagaaagagagagagaagaaaaatccaaaaggngaaaacgtgagaaacataagagaagatggcgaattagaagatggtgaaatagacgatgcaggatttgaagaaatacaagaaaaagaagcaaaagagaatgaaaagcagaaaagtgagaaagcctacagaaaatcaagaaaaaaacataagaaagagagagagaagaaaaaatcgcaaaaggcgaaaacgtgagaaacataagagaagatggc

SEQ ID NO: 643640 - DNA, 333 bp, Homo sapiens
  misc_feature (122)..(122): n is a, c, g, or t
tcgagtcggcccctgtgttagcacaataaggaagggtccccaggttggtgaagccccaagttgagaacaataatgaacaattattgaatgaacaattgttagagacagctaatcacaaacanacctgcgggcacaatgacctcattccacacgtagcaccctacagcaggaccctataaaactttcctccagcccttgcctctttgcaggtagccccttctctgctgagctgcccactgcaacatattttcacaatttctctaataaatctgcccttctttacctacaactatcttggtaaatggctttaccacctgcaaaactgaccctagg

SEQ ID NO: 643641 - DNA, 1375 bp, Homo sapiens
  misc_feature (1293)..(1293): n is a, c, g, or t
  misc_feature (1295)..(1295): n is a, c, g, or t
  misc_feature (1363)..(1364): n is a, c, g, or t
ggaaattgagagggaatggaagtggtcacataggctcttctgttggtggagcaaagtttgatttgcatcatgcaaatgctggcactaatgtcaaacacaaaagaggcgatgatgatgatgaagatacagaaagagaactgagagaaaaagctttcttaatacctttggatgcctcacctggcataatgctccaggatccaaggtcacaattgagacagttcagtcacattaaaatggacattactctaaccaaacccaactttgcaaaacacatcgtgtgggctcccgaagacttacttccagtacctttacctaaacctgatccagtgtcttcaatcaatttacctctgcccccacttatagctgaccagaggctaaatagattatggaatacaaaaagtgatcttcatcaaaacacagtgtccattgatccaaaattagcagccaaagccaaaattaacacaacaaacagagaaggctacctagaacaatttggagactcacacggttcaggagctaaattaggagatcctagactacaaaaaaattttgatcctaggcttcacagactgcccaatacagagtctcatcaagtggttatgaaggattcacatgcatcaaagggtgcccctcacttacccagatcaaaccctggttcatcacagccctcaggggcaggaactagcaattctggttccggggctctgcctccatatgcccctaaactctcttcctcagctggccttccactgggaacttccacttcagttcttagtggtattagtttgtatgaccctagggatcacggttcatcatccacatcagagctagcaacagcttcttcaggagaaaactcaaagaaccagaaaaaaagtggtggcttaaaaagtagtgacaaaactgaaccttctcctggagaagccatccttccacaaaaacccagtccaaacgtgggagtcactcttgaggggccagctgacccacaggcggacgttcccaggagttctggttctgtgctaaaatggggttgtggttaagtgaacgagaactctgcctacctaagaagttcattgtgttctaagtggaaggagagttactgaagggaatgtgaatttttaccgtttgtacttaagatacatttgttgtctaaaatggctctggataacatttttgggttaaaaaatgtaatttaaagccaccatagaaagtattttctgatttactgtccaaatgaattttgttgttaattgagaagtcaataaaatggattaaactgacagaaaaaaaacatananatatatcccaaggtgtaatttactcttttgtcaggataaaatcagaaaaatggctgattttagtaaannaaatttttagc

SEQ ID NO: 643642 - DNA, 351 bp, Homo sapiens
gaaggggaaaaggcccccatttgcaaacccccttttcccggggggtggggggtttttttaaacaagggggcccccaggtttttcccttggaaaaggggcggggggggcccccccatttatggggggtgggtccccctttggggccccccgggttttccctttttgttttcgggttgttttttgggggggatttttagggggtaaccatttttcccagggaacaccttttcccctgttttcccccaggttgaaatttcccccccctaaaggggaaaaaaagtgggggtccccccggggggggggcgcttttaaaaaagggggtccccccgggggcgggaatttgggccggga

SEQ ID NO: 643643 - DNA, 177 bp, Homo sapiens
  misc_feature (31)..(31): n is a, c, g, or t
agaggcaggaggagctcttcaggccaggagntgaaggtgcagtgagccatgatggaccaatgcacttcagccgggacaactaaagtgagaccctgtctctttaaaaagaaacaaacaaaaaactctatattctaattagctaaccaatccaattatcaaagtaacctctaacatttc

SEQ ID NO: 643644 - DNA, 288 bp, Homo sapiens
  misc_feature (9)..(10): n is a, c, g, or t
tggaacttnncggggtttctagcagcggaagggcccaatgcgagggcgtttttgtcgccgttataccgcacctttaatgtccattccacaaggttgattcgggatggttctggaattgcctctgaattttattcgaactatgtattcgctgggttagaataccagaatagacaattgctatggaatgcactattagaactcttttccaatacactacttacgaaaagaggactcttgacctttgttaaaaaaccaccaagccccggaagttccagggtaccgagctcg

SEQ ID NO: 643645 - DNA, 432 bp, Homo sapiens
aaaaccaatgctagacttagggaataaaatgataaattaaaaacagaaaggttttgcagttcaattatgagatgaaagacataaattacgtgttattcctctaacaatggcacaaaaagaacagtaagaaattaactaccagggaggctctcatgccagcatattgtatatgtacttatttctccagtctgggtgacttctggaaccataaaatttttatgctgaaaggttttcaccccttagaatagagttcaactttctcgtttcacagatgagatccagcaacattagctgacttgcttaaaatgatactgcatctccgtatctttactgtttactactaataaataatgctgtatcattaaggatgattctgatttttcacaatgaattctggacacttttttttttcatcgttatccttgaggacta

SEQ ID NO: 643646 - DNA, 134 bp, Homo sapiens
ggcaggctgacctggctacatccagcctgtggttcagatgcagacggcatgtgagccaccgctgcagcacagagcgtcttccccctgtagacgagggccgtagggagtacctgctgccccagctgactgtggcc

SEQ ID NO: 643647 - DNA, 168 bp, Homo sapiens
tatatgctaaccccttcccagtctctcatcagtgacagtacgtcgcagctgggacgtcagatgttgcgtcgagagaatccagaatgaaggccccattcttaatagatactctgagcttgaggttggaccagtaaatgccaggataacgcggggatccgtctagtagtc

SEQ ID NO: 643648 - DNA, 349 bp, Homo sapiens
  misc_feature (18)..(18): n is a, c, g, or t
  misc_feature (110)..(110): n is a, c, g, or t
ccgcgcgaggagatagangcatcacggcccaggccttaacagaggctgaagcccagggggtgcaaaggcaaggccatcacgcccttccagctggcccgcatcagggcccngacgggcggtcgcagcctggccaccaatatcgccctcgtgaagcacaacgccgtagtcggtgcgcgaatggcccgcgcgatgcagcgttagcgcgccgcaggtgtttcaccgtgccagcaatatgcgagcaaaacagtgcggataagctggcatgtttttctcgtcaatccccattacttttggcaggcccagcgtcatgcgcgtgacctttcccctgaacctctgtggcctcctcgtg

SEQ ID NO: 643649 - DNA, 268 bp, Homo sapiens
tgtttaatcgccaaaaacacactggccagtgtaccatacatatgtaccagaagagtcattatctatcttgttctccctttccagaaaacttattgtaaagggactgttttcatcccataaagacagggactacaattgtcagctttctattaccctggatatggaaggaaactattattactctgcatgttctgtgctatgcgtgatatttagcgcttggcattataatcagattcctcacccttgcttaggagtaaaacaaatatac

SEQ ID NO: 643650 - DNA, 115 bp, Homo sapiens
cctcttatatccccaaggtccttagctgatttttttatttttttgaacaggtctcactctgtcactcaggctggagtacagtggtataaatatggctcactacaccctcaactta

SEQ ID NO: 643651 - DNA, 113 bp, Homo sapiens
tacggaacaacttatgctggatatcgacgcaaacaactgctggaccatttggagacagggtcatctccagaaagcaatctgttccagtcgacttcagtgtgtaggcctctatt

SEQ ID NO: 643652 - DNA, 958 bp, Homo sapiens
ataccaggactgccgcatctgtcgcgctgtgtgttttcctcttgatcgggaactcctgattctccttgcctcgaaatggacccccaatgctccttgctcgcctgtggctcctgtgccttgtgccggtcctgcaaaatttgaaagagtgcaaattgcacacttccgtgcaaggaagagttgttgtcctgggtggccactttgtggggatggtggccaatggtgttgcccagggggtgcatctggcaaaaagggggagggtaaggaacaaaggtgaaggttgttgtgactggagtggccagggaccaaggtggtgcaatcagaatgttaaattaggaagaaaagtactaattcagcccgtggattcctggcgcactgaatgccacatctaggttgtccaacccccctatgaaccccggatgcggcaaaactctgactgcgccccacaattgcagcacagcgttgccgacacgggcgcaaaacaccttcccgccgacaacacctcgaagcacacaaccaacacaaccactccacgtgcgacagccgacctacacatcgtgcgacgccacacccgagcgcacccgcagacgaacagccgaccatcgcacacacacaccagctcagtaggcgcaccgagcaaaccggccacccaaaaagacaagaaaacaaaagcagctgcacaccccgcggcgtacgcatacacaggaaacagaaacgtggagaccaccagcagcgagagagagggaccgtcagtcaacggagaaaaaacagcaggcgcgaggggcaacgaccagagagcgagacaggaacaaaaacgcagcgaggtgagatcaatgaagaaaaaactgtgctcacgcgcaaagatgagaaacagagcacggaggcaacagcaacgacgccgccgcggggaaaacaacaaagacgaaaccagaaggcaagcaagcccgcaccacagacgcag

SEQ ID NO: 643653 - DNA, 317 bp, Homo sapiens
ggatcccctcatcttccgtgccccctctgcggatgtttcactgcatttatcagtgtctgctttttctccgtgcgtatccaattccaactcagtggtgaacacctggtgagagactgcatcccattgctacccttgtctcctccgtcccatgatcctgccatcgccagccttacctcctttttcccgtaatctctttactcgcggcttctcctacgcacttcaatctgttataggccgcgagttagatcattcggcaggcggtactttgtgttgcctgatccctttctttcggacgtccagacaccttccttccaggt

SEQ ID NO: 643654 - DNA, 139 bp, Homo sapiens
ggtcgacacttgcaagagtgccagatggagccacggaacacttcccagcgcagatttcaggcaagtgtgtaagtaagtcctacgtatgtgaatatctcatgccaatcctgatctagtcaaatcctaaacatagtcgacg

SEQ ID NO: 643655 - DNA, 900 bp, Homo sapiens
  misc_feature (819)..(819): n is a, c, g, or t
aatggtggtcttccgaagaatcccgagttgcgccgggtcctgtcaaggtgcagttcttgccattactgcaatagccacgagtctgtggtgtcgacggcccgaccctgtcagccagcgttcaatcatgtccctccatggcctcatggggaagggtggacgttcctcagtcggtcgggattgtggccactgtgtctctggagcacgctaggcattcctggcggccgatcatgttgtcaaaccatcgcttggcatgcgctggtgggtcagccggtcctcagtaccgctatcggtgtgatatacatctcgacatctatagcaccttcgttcccatgggtgacctgggccagcctctgtttctgggcaatgcgcgacgcgcacagataacgcgattctactccggagcgcaggattgtcccataaccacacggccactgtggtccatcagggctttctctgggcccgacgacttgggaatagcctgacaaaccctctccgatcgtcgtgcaggatcgttcatttgtgacagaattccccccacaggccaatggctccaatcgtgtaccccacggtaacaggcttgcgcccgtctggacccctaaggtccacttctccgctttgtttctacaccgaagttcctgcacagtgtgcgagtctcattttacaagaaccggcctccttcctacgcaatgattcgcgcagaaaccacttaaaggggccttgtcctgggcacgagaaaacgttgacgtgaccacgactgcccttgcccggggacaggcccatctactccgtaagacaggccgcgcgtctgcgacactcctntatgggacaaacagcacggactaacgacatacccgaaacgaccgtgtggcacagactgcaacgcgattgggcctattaccc

SEQ ID NO: 643656 - DNA, 150 bp, Homo sapiens
gtatacaggcgtcacacgcgactggcctttcctggctgcgtatactcactcaccctgcagaaaacacagagaccaggcagcgtgcgctgctgggttctgaagagagttcgatggagggtgggtgaaggaaccaggagcgaaggccaaacg

SEQ ID NO: 643657 - DNA, 448 bp, Homo sapiens
aaatcagtcggtacccccgctggcctatggcacccagtcctgcagaactatcagacggcaaagggaagctggctcgacacaggcttcttccagcgctgaacaggggaaggcaggtggccatgcgtggagccagctctacacagaggcgctggccaagtcatgctggctcattctgtgttctcaagtgctgtcctctcgtactctgtacagattccttgtcttcaaggagtaagtgccaaggcttccagactcaggtttgaagtcaggtcctgttgaaggtcgtcatgctgtagtgatagcgtataggtccttcattagtccttccaggtgggccatctctttggtcagctcatctggttcatagctactctcggagtcttccaatatccttgtggtctcctgcactatcaggggcactgggaacaaccactgccattgcgccagcgcg

SEQ ID NO: 643658 - DNA, 308 bp, Homo sapiens
ataagctgttatctcatgactgctcattacttacctagggaaaactagcttattgttctgtttccaagtataccagcagagaatataaaactggtttttgagcctatgcactaagtatagtgtgatgtcttttccgttctgtagtcctcctgggagaaataataataatgacaacaatagagaataagtcggctgggagccgtggcttatgcctgtgatcccagcactttgggaggctgaggcgggtggatcacgaggtcaagagatccagaacatcctggctaacatggtgaaaccctgtctctact

SEQ ID NO: 643659 - DNA, 156 bp, Homo sapiens
tacctcttgacggactccacttatgactccctaaagcccatgtctaatccctcatcgttgggtctatagtacttgccgcagtactcttaaaactagcgcggctatggtataatacgcctcatactcatttctcaaccccctgcaagattgcttgtt

SEQ ID NO: 643660 - DNA, 452 bp, Homo sapiens
  misc_feature (84)..(84): n is a, c, g, or t
ttgaggacccccgcccattcatcatcctgctattcatatcctgctcatccgtgacgcttttcaggacttccacccagacagggngaaggcacgtgggcttggattggagaagacaggtcccgcccgtcaacaagccagcagagttcacagtggatgccaagcacggtggcaaggccccacttcgggtccaagtccaggacaatgaaggctgccctgtggaggcgttggtcaaggacaacggcaatggcacttacagctgctcctacgtgcccaggaagccggtgaagcacacagccatggtgtcctggggaggcgtcagcatccccaacagccccttcagggtgaatgtgggagctggcagccaccccaacaaggtcaaagtatacggccccggagtagccaagacagggctcaaggcccacgagcccacctacttcactgtggactgcgcc

SEQ ID NO: 643661 - DNA, 105 bp, Homo sapiens
atgatgaaggaaagaagcatctcacagctcctattctacgtcctgtctacacctacatatggaacgacaaacacctagaccatacacacagtcacctacgaatct

SEQ ID NO: 643662 - DNA, 844 bp, Homo sapiens
  misc_feature (349)..(349): n is a, c, g, or t
  misc_feature (351)..(351): n is a, c, g, or t
  misc_feature (370)..(370): n is a, c, g, or t
  misc_feature (380)..(380): n is a, c, g, or t
  misc_feature (404)..(404): n is a, c, g, or t
gcctgcccgacgtgtcttccggtggcggagcggggattagccttcgcgggcaaaatggagctcgaggccatgagcagatataccagcccagtgaacccagtgtcttcccccatctgaccgtggtgctttgggccattggcatgttcttcaccgcctgttcttcgtttacgagggtcacctctaccaagtacacctcgtgatatctataaagagctcctcatctccttagtggcctcactcttcatgggcttggagtcctcttcctgctgctctgggtgggcatctacgtgtgagcacccaagggttaacaaccagatggcttcacgttgaaacccgtgctttgtgtaanantacttttttttcactgtgngctggaaggngtcccacctggtgctcattaatanaagtgcagatgtataagacaacaaaaaaaaaaaacaaggaacaaatgaacacacaacacacacgcgacagtacaaaacagaacacacaacaaaacaacacaaaaggttgggggggggcgtcgggggcccgagcaagaagcgagatcgattgagaccacacaacaagctgatgaggggagcgggacgcgacacaactagtgaggaacgaaaggaccgacgagtcagcacacgagtgtgcacgaacaagaaggaaacgccgagcgcacagagcacacagagggcggagggaggtatccaccaaacaaagaaaaagaacgcgccggggggcaccgacagcgtgttgaggaaaacaacaccaagagagcgacattgggtcgcacaagcgcgtcactacaaaagacgagacgagcggtaataaaaccgcgccgcggtaggggagc

SEQ ID NO: 643663 - DNA, 203 bp, Homo sapiens
  misc_feature (45)..(45): n is a, c, g, or t
  misc_feature (78)..(78): n is a, c, g, or t
  misc_feature (84)..(84): n is a, c, g, or t
  misc_feature (141)..(141): n is a, c, g, or t
atcctggtcggcgtgggactggaggcgaccccctctccaggtgtntccagcgccatcttcttcgtgccgggcttcctnttgttngtgcctggagtctatcacgtgatcttaatctactgcgcggtcaagggccaccggggnttccagttcttctacctgccctacttcgagaagtgatcgcggcgcacgtgggaccccttacg

SEQ ID NO: 643664 - DNA, 103 bp, Homo sapiens
ggtcgggtcccatccggcccatcgtgcgctgccccacggttcggtaccacaaggaggtgcgcgccggccgggctttcaacctgtggaggagctcaaggtggcc

SEQ ID NO: 643665 - DNA, 301 bp, Homo sapiens
  misc_feature (48)..(48): n is a, c, g, or t
  misc_feature (147)..(147): n is a, c, g, or t
ttagagtatcccccccggcttatgtcttacgcttcattgtgtaatacncttcatattttatagccagtctccctggtcattcctcaaagacctcctgtgcaatgtgaaacaaaagcattggctggcacttatggtggattgtctgcnataagcagaaaagagagcaaacaaaaaagattctctaacttctgtcttaagcactgcatgagtagaggtgccctgtattcagtggttaaaaatcacttcccacactgtggatgggaaagcagcaacatggataatccgtaagacataaccgcgg

SEQ ID NO: 643666 - DNA, 158 bp, Homo sapiens
gtcggtaccatgcgcacgcgttcatcgatactggtctactgagagttcgagcatgaaggggtgtcgaataatatggaaggccttatctgcgctcatatggagataataatgtggtctttgctcatcgggtctgtttagtgtgattcgcttatgtcgag

SEQ ID NO: 643667 - DNA, 102 bp, Homo sapiens
tgatccagattttcctctgctcataggtccactgctgcccttagctgtcttccacatcgttgatccagcggtcatcccagtccactcggaggcccaacaggt

SEQ ID NO: 643668 - DNA, 905 bp, Homo sapiens
  misc_feature (531)..(531): n is a, c, g, or t
  misc_feature (667)..(667): n is a, c, g, or t
tccaggctcccgggtcttaaatgggggcgggggctggggggcagttcatccaaaggtggttccaaagctgaggtcaaccttgggggtgggctctgcagggcaaaggggatggtaagcgggcccgtcaggctgggggggactcttgaaacgggggaaggaagagccccagtgggtggcacgccacagcttcaacagttgaggagaggagctccctgtggcccatgtccccgaagagcttacaaccacagcgcaggggccgtggtggcccatggcaagaagccttgacttggccctcgtggtgtggcctccttgtggcagggacgcgggtttccccaagtgttggccgtgtggacgcccatggacgcttgtgctggtggccgcacctgtggaattccctgtgccacagcccctgtgtgccgtgggcctctggagaccaccgtgggtaccgacaccgccttatctccaggggcctttcaccagagggcctctgtgaggccttcgatctcgggatctggagatctcttgcccggngtgggcctctgtcagtttgtccccaccaagtctccgccttggggcctttctcccaatgttggcctttgtgttgggcccccgtgtgtccaactattgtccacgcgtcaggcgcctctttggcgccacacaattgtgnaccgaaaaagtcggagtacactggcgatggaacccgttgctcacacaagtattgtgcaggtggtgccagcctctgaatgccccaggaccatgccccgtgccgagaacctgaaagtggtgggcacttgggccgccagaatgccaaaggctccgggtcagtgtgggcacttccactgccgaatttggcccgttgaaagaccccttggtgggacacggcacgtggaaggacatctggttag

SEQ ID NO: 643669 - DNA, 282 bp, Homo sapiens
gatcagctcggtaccaggacacagctatacaacaagagtcattgctagtgaactagcgatatgccacaactgcaagaaatacatgaagaatgtcatgccattttgtagccatgattaaggaaaatctggagaagatggggcctcgtattctggatttgcaattagaatttgatgaacaggctgtgcttatggagaatatattctatctgacttattcgcttgagctagagacacttatgagtcatgtttgcctccgaagcataagatcatatcagggaagag

SEQ ID NO: 643670 - DNA, 170 bp, Homo sapiens
atgatacaatcacatgtattgcagtccagaatgtgcctcgtatgacatggtcagttgatgcagacatcttctgtccatgagattgatactgaaagcgatcctcaaagatatgggcgtctagcagttagcattgctcagaaagatgacaaatccagtagggctatcagcac

SEQ ID NO: 643671 - DNA, 507 bp, Homo sapiens
acagtttcgtctctggccaatcaagagctcttctagtacccttcataaaaacaataataaatcccattttcttaaaggatagaaaaaaccttattaaccaggaaatactgaagcggactttcacaacgactggtgacagaggcagaaatttgtctaaaatgagaaactttcttgggaagtaaggctagtggcacccttctctctctctctcttaccctcaagagtgaagaataccaagggaaaaaaaccctcagaactttcggaggaaaccagctaagggatcaaatgtgagggggtaaagaagtcttcagaaacggtggagaacaagcttgctctgcggtgaaatgtcccatttatccagggaagaagcagctggcacgcgctgtatccccggagtaaatgaaaagtagaacggtgagagccacttagaagggaacaaattggttaaaagttaaaggttgacacattgaggtagatatattagattgatacattaatggggatcct

SEQ ID NO: 643672 - DNA, 784 bp, Homo sapiens
  misc_feature (280)..(280): n is a, c, g, or t
  misc_feature (357)..(357): n is a, c, g, or t
  misc_feature (441)..(441): n is a, c, g, or t
ctgccttcttgctctacagcatcagaatgagggcctgctgacatttggccggatcatggccgagggatgcgtgtcggagtctatcagtgtcgtataaatcagtgccaggggatcttaagatggagtgaagatttgatagttgaaggttcaaaagactcgtggcttggcttagttgagtgaggcctagaagctaatgatgagtctacttgtgaatttcgcttgacactatcatatgaagtagcaccctcaacagccaagtatcaatatggacctttagagnagtcatagataatcctcgaatatggtgtagcccatctcatcacttaggtctcatccgatggcacgctgttgaatagnacttgtcttgcttcagactatatgtgcccagctagtcgctggtaggacatgacacgagatagtccccccttctatcgaacctgncttagatgtggactcgttgaaggttataatgagaagtagtcgttttctgttttcgtgatcgttcggggtccccatgtcttaaggaagcttccgaagaactgtatcttagctcccttgactccgagcatatgaagtgcaccctggactatctcatcattcgagtctgaatagaatatttcgattaggcggttgagcgaatgggaacgagacggataagaggggcaaaactgtatagtgatgggcgcaagaagattggaagcaagggaagacatcgacaggtcaaatcagggtgtgcattggcttgggagagatgtgggcaatgggattattctaaatgggaaca

SEQ ID NO: 643673 - DNA, 139 bp, Homo sapiens
gttagatttgatcagttcttgaggccagtgcagcagtgcagtagtagacatgtttcagtgcagcctagggtgttgtgcagtgtccacattcagtgcgatgcagtaggggcacagggagcctactagggtgtagaatagg

SEQ ID NO: 643674 - DNA, 154 bp, Homo sapiens
ttcccaggctgttcgaactcctgggctcagcaatacacctgcctcagcctcccaaaattctgagattacaggtgtgagccgctgcacctggccaaagtgttcttatttttgcttatttcaagcgccacatcatacctggtagcatcctcgtttc

SEQ ID NO: 643675 - DNA, 180 bp, Homo sapiens
cggcatggggtctgtagaccagatcctcagacccagaggcgccgtacgcgctcctcagagcctccgcagccatggccgcagtggcccactcccacatctgccgccctgtgttagtagtgaggaagactccatgggcattgacaggccggacagtcacagagaaggccacaggatgtctgt

SEQ ID NO: 643676 - DNA, 103 bp, Homo sapiens
acgcatgatgaaccgcgatccctgggaacccagctgcctaacaaccgcccacaaactcactctcactactttcagcgcatcctcaggcccctagcgccacccg

SEQ ID NO: 643677 - DNA, 200 bp, Homo sapiens
tctagcaggatcccagaacggtcgaccaggttggaatgcatctggcgtgattctcatgctgcattgtaaaacctacattcccagtgttcatagcgacttctctctgcctcagcgctcctaggtatctggagattacagtgtctgtgacaccatggcccggcgtcatttctatttgtactttttatgtagactacggggtt

SEQ ID NO: 643678 - DNA, 126 bp, Homo sapiens
gctgacgccatgggcacatgctgaggcaggacccatgagccgttgttgtgcaggacgcagcagctgggagatgggggtgagggtcatccccaacaacgaagcaccctccagaagtgcgcctgggtg

SEQ ID NO: 643679 - DNA, 245 bp, Homo sapiens
  misc_feature (5)..(5): n is a, c, g, or t
  misc_feature (50)..(50): n is a, c, g, or t
  misc_feature (109)..(109): n is a, c, g, or t
cgggnggcggggtgggcagatcattgaagccccggagttcaaaaccagcntgggcaacacggtaagaccttatccctacattaattagttaataagccaggcgtggtgncatgtgcctgtatgtaatcccagctactcagaaggctgaggtgggaggttcacttgagcctggatagaggctgcagtgagctatgatcactccattgcatttcagcctgctcagtagagtgagaccccgtctctat

SEQ ID NO: 643680 - DNA, 240 bp, Homo sapiens
ggggtttttttttttcccccccttggcccccccatgaaggggtacccgttttatggggttttgccccccaacaaaccctctcggggggaaggtcccccggtttttttttccccccggcccggggctttgggtaattgggctacccccctgggaaaggtggacccaagaatttttttttttctgccccctgttgtttttttttttttcctttttttttaaagggggggggcccagggggga

SEQ ID NO: 643681 - DNA, 755 bp, Homo sapiens
tggacatgaaaaaaagtctttaatttggttcttgaaccccgcacgggggcaaaacagggtaagactggaggccgactgaggagggtgggggctctgtaagcacactttccccttcagtacgttgaggctgctccgtgcacattggttcctccaggcccctcgagtgaccttcgagtgccattgtggtggcctagggtcccagcactcccgcgaggtttcaccaggtttcgtgaaaaaccctcgaatctgtgggctcagccggttgtgctacgtgcatatcacgtggaggaaactgttacaggttttggatgaagccgacataccagggtctctgaaagatattagaaaaattttgggtatattacccccaaaaacacacaaacttctcacagggtgggtttaagggggttcgaataatttatcacgatatgcaccggcatggcggttaagaatctcccgagcatcataggacactctgtgtaagtagcagtgtataagatgggcataaaagttctccctcaaattttaaccaggatatatatattgtggtctgaaccccacaaaaaaaaaaggttattcttcacaggagtacgtgtgttcacaacgtggtgtcaaaaccccctatatcgaagtgtttctcacccaggcaagaatttaacaaggaaaactattcttagagaatctccgagcctcattgtaaagcggcctctccaaatttcatcaagtctttcttgaacccgggggttgcacgaaaa

SEQ ID NO: 643682 - DNA, 115 bp, Homo sapiens
tataactggttatgttagggttgtacggtcaactgctattattcatcctatgtgggtgattcacggagtatgctaggattttgcgcttctcaggttaggtttaatccaccctcat

SEQ ID NO: 643683 - DNA, 297 bp, Homo sapiens
tcccccagacttgaatgcaggggcccaatctcaattcactgtatcctgtgccttctaagatcaagctattctcctgcctaaaccttctgaattgctgggattacaggcgcctgacaccaaacccggttaatttttgtatttttagtacaaatggggtttaaccatgttaggcaggctggtattgaacttctgacctcatgtgatctgtccatctcgacctgccaaaggggtgggattacatgcatgagccaccgcatccggccagatgtcaggtgcttttaaaaagtaacctgaaat

SEQ ID NO: 643684 - DNA, 943 bp, Homo sapiens
  misc_feature (181)..(181): n is a, c, g, or t
tttttttttttgcgtggcgggagaggcgcagtccgacgacgagggccgtgctgtggagctgtatcggagccccagtgcgccatgcttttcgcgtacttcatatgaagggtccctgctggcaccgagggcgcgctgccgcaccgaggtggtgccgcccgaggaagccttcttctcaattggnacgtgggaacccttgggcccccgccgagcacccgcatgctttaattagtccttttaaaaagggaggactccttatttcaagggctgattaaggactcaaggacgtaccaggcccggtgaccaactgtgtgaccttggcaattttaccagcggcacttagcctcagggttccttagctgtgaaatgaggatagtaagaactacctcgtagtgatattgcgaaggttagaagaaacggcctggcataattacttggtagactattgttagatctgggaggtgtgaaaatggtagcctgtttggtccctgttcttcaccacctatcaatatgggaggaatccaaagaggcttaccaatataaacactgctttggtgaatttttgtgtagaaagagaaaaaatgtagaggggcgccatataagcactggaagaaaattcccccgccctatgtagccagttaaggaaattacgccaaacacggagtttctgctcctcttgagtgggtctcattgggaacaccacaggtgcactttctccacaacgtgtcgccccaaggtgaactaggttcaagagacactttgcttttggtggccccaccaacatgttccttttgagggcccctagatgaatattaaaattttctggaccatggtggctcaagcctgtgaatccccagccactttcagaggctgagcgtgggccagattgcttgaactgaggagtttgagacccacctgggccaacatagccagatccccttcccct

SEQ ID NO: 643685 - DNA, 918 bp, Homo sapiens
  misc_feature (121)..(121): n is a, c, g, or t
  misc_feature (128)..(128): n is a, c, g, or t
  misc_feature (149)..(149): n is a, c, g, or t
  misc_feature (167)..(167): n is a, c, g, or t
  misc_feature (177)..(177): n is a, c, g, or t
  misc_feature (215)..(215): n is a, c, g, or t
  misc_feature (237)..(237): n is a, c, g, or t
  misc_feature (253)..(253): n is a, c, g, or t
  misc_feature (259)..(259): n is a, c, g, or t
  misc_feature (270)..(270): n is a, c, g, or t
  misc_feature (280)..(280): n is a, c, g, or t
  misc_feature (291)..(291): n is a, c, g, or t
  misc_feature (298)..(298): n is a, c, g, or t
  misc_feature (300)..(300): n is a, c, g, or t
  misc_feature (307)..(307): n is a, c, g, or t
  misc_feature (314)..(314): n is a, c, g, or t
  misc_feature (316)..(316): n is a, c, g, or t
  misc_feature (320)..(321): n is a, c, g, or t
  misc_feature (328)..(328): n is a, c, g, or t
  misc_feature (336)..(336): n is a, c, g, or t
  misc_feature (341)..(344): n is a, c, g, or t
  misc_feature (360)..(360): n is a, c, g, or t
  misc_feature (401)..(401): n is a, c, g, or t
  misc_feature (407)..(407): n is a, c, g, or t
  misc_feature (414)..(414): n is a, c, g, or t
  misc_feature (420)..(420): n is a, c, g, or t
  misc_feature (425)..(425): n is a, c, g, or t
  misc_feature (430)..(430): n is a, c, g, or t
  misc_feature (443)..(443): n is a, c, g, or t
  misc_feature (464)..(464): n is a, c, g, or t
  misc_feature (475)..(475): n is a, c, g, or t
  misc_feature (481)..(481): n is a, c, g, or t
  misc_feature (489)..(489): n is a, c, g, or t
  misc_feature (496)..(496): n is a, c, g, or t
  misc_feature (500)..(501): n is a, c, g, or t
  misc_feature (511)..(511): n is a, c, g, or t
  misc_feature (516)..(516): n is a, c, g, or t
  misc_feature (525)..(525): n is a, c, g, or t
  misc_feature (531)..(531): n is a, c, g, or t
  misc_feature (760)..(760): n is a, c, g, or t
  misc_feature (848)..(848): n is a, c, g, or t
  misc_feature (898)..(898): n is a, c, g, or t
tgaggcggttaaggtctgagggtcttgtggggccacgggctgatcaccaggtgttggcttggtcggttcttatttctcgcctggcaatggcgacgtacacctgcataacttgccgggtggngttccgngacgcgacatgcagcgggccnactataagatggactggnaccgctacancctgcggcggaaggtggccagcatggcccagtgaccgncgagggcttccaggagcgagtncgggcgcatgggccgntgcggnggaggagagcnagggctcggncacctactgcnccgtttncngttagangtttgcntntttnnacgcctnctataacnacctnnnnttccggcgttacgttnagctggagaagaaggccgttcaggcagttaattggaaagtngagatnatgaatnataatnacttngaganaggactgggcgtngacagtgtggacaaggatgcnatgaacgcggncatccngcaggccntcaaggnccanncgtccatgtntccangaaggcgcncccagngcctgcaaaggaggccaggaatgtcgtggccgtgggtactggtggccgtgggacccacgaccgagacccgagtgagataccaccccggctccagtggtttgaacagcaggcgaagaagttggcaaagcagcaggaggaggacagcgaggaggaggaagaggacctggatggagacgattgggaagatattgattctgatgaagaattggaatgtgaggatactgaagcnatggacgatgtggtggagcaggatgcagaggaggaagaggctgaggaaggcccaccccttggtgccatccctatcacggactgcttgnttttgttcccatcattccagctcgctgatgaagatgtggctcaatgaacnaagacacagtgtctttattc

SEQ ID NO: 643686 - DNA, 423 bp, Homo sapiens
gaggatcagaaaacatacctgctgtggtgctatgggtagtacctcaggcacaaaataatctgcacaccaaacccccgtgagcacaattttagcttgtattagcaaacccacatgtagtaccccgataacataaattaaagctaaaatgaagaaaaaaaaatcccatggtgggatagtgcattgtaggtcaaaggactgatttttgctacagatagtggtcccagtgtggctgtactgatttattcctgtgtgcttgcttgcagattcacgattctgaacaggtggtccagaaccctagtttggtagagaaaacaggttgctgcagcagatttacagtctgaggggatgtaccaggagacttgttttttggcagaaaacacttcgatcacaaacgccatggtgaagttcctgaggggggtgcct

SEQ ID NO: 643687 - DNA, 940 bp, Homo sapiens
  misc_feature (121)..(121): n is a, c, g, or t
  misc_feature (128)..(128): n is a, c, g, or t
  misc_feature (149)..(149): n is a, c, g, or t
  misc_feature (167)..(167): n is a, c, g, or t
  misc_feature (177)..(177): n is a, c, g, or t
  misc_feature (215)..(215): n is a, c, g, or t
  misc_feature (237)..(237): n is a, c, g, or t
  misc_feature (253)..(253): n is a, c, g, or t
  misc_feature (259)..(259): n is a, c, g, or t
  misc_feature (270)..(270): n is a, c, g, or t
  misc_feature (280)..(280): n is a, c, g, or t
  misc_feature (465)..(465): n is a, c, g, or t
  misc_feature (486)..(486): n is a, c, g, or t
  misc_feature (497)..(497): n is a, c, g, or t
  misc_feature (503)..(503): n is a, c, g, or t
  misc_feature (511)..(511): n is a, c, g, or t
  misc_feature (518)..(518): n is a, c, g, or t
  misc_feature (522)..(523): n is a, c, g, or t
  misc_feature (533)..(533): n is a, c, g, or t
  misc_feature (538)..(538): n is a, c, g, or t
  misc_feature (547)..(547): n is a, c, g, or t
  misc_feature (553)..(553): n is a, c, g, or t
  misc_feature (782)..(782): n is a, c, g, or t
  misc_feature (870)..(870): n is a, c, g, or t
  misc_feature (920)..(920): n is a, c, g, or t
tgaggcggttaaggtctgagggtcttgtggggccacgggctgatcaccaggtgttggcttggtcggttcttatttctcgcctggcaatggcgacgtacacctgcataacttgccgggtggngttccgngacgcgacatgcagcgggccnactataagatggactggnaccgctacancctgcggcggaaggtggccagcatggcccagtgaccgncgagggcttccaggagcgagtncgggcgcatgggccgntgcggnggaggagagcnagggctcggncacagtgctacgtgcaccggtgttgcagttaagaagtttgcctctttcatgcgcctacgagaaccgcctcaagtacccggtgtcacgtggagctggagaacgaacggccgggcagggctgttgagatcggctaacgtgcagatgatgaactgggatagaactgggaggaagatggactgggcgtngacagtgtggacaaggatgcnatgaacgcggncatccngcaggccntcaaggnccanncgtccatgtntccangaaggcgcncccagngcctgcaaaggaggccaggaatgtcgtggccgtgggtactggtggccgtgggacccacgaccgagacccgagtgagataccaccccggctccagtggtttgaacagcaggcgaagaagttggcaaagcagcaggaggaggacagcgaggaggaggaagaggacctggatggagacgattgggaagatattgattctgatgaagaattggaatgtgaggatactgaagcnatggacgatgtggtggagcaggatgcagaggaggaagaggctgaggaaggcccaccccttggtgccatccctatcacggactgcttgnttttgttcccatcattccagctcgctgatgaagatgtggctcaatgaacnaagacacagtgtctttattc

SEQ ID NO: 643688 - DNA, 229 bp, Homo sapiens
aacagtacctactactaatcaccgcccctaatcatacaaagcccccggacaataggatcctcccgcatcaaaccctgacccctctccaatcataaattatacagcttcctacactattaacgtttaacaccaccaccaacccatcatactctttcacccacagcaccaatcctacctccatcgctaaccccactaaaacactcaccaagacctcgacccctgaccccca

SEQ ID NO: 643689 - DNA, 778 bp, Homo sapiens
gggcggacgcgtgggttctggctccaggaactggaagtggccccaagccaatgctcaggcaggcccaggtcagccccaggccccagccccagcaaaccaggaaggcaaagggtgaaccaggcggcttgcgtctagggatctggcagcttgctgagtgtgagacaggcccagaccacaacatatcgttgtgaaacttccctcttcaacacctgcttatcaggtgggcaaagaataattacttaacaccaaagaatgtgtcaggctaatttggggtaaagattcgcacgtttgatttgccaacgccaaggcgggctcaatcgatgctctcttgggctggccccattttccggtcccttagattgctccaacagggcttcctgtgcaaggccaaaccaaggattctggttacaattttcaaatttattaagaagcccattggctccataactttgtcaagccctttgtaagctttacttttcgtctaacattcagacttgggaacaataaacgcagtgaaactggcttcatattttataaaagccggcaaacggcattccaaggaataaatttctgacatgggcctacccccattacagcaggcaacatacataaggttccagtgcttgaacaccttttgcacaacaaactttcttaagaacccgttcgcattccttacaaagttcttccaacaagcgccgcacatacaccccaagagtgccaaaagttctttgaaccaaaaaccctttgattggctttggacagacgctctggaagggaa

SEQ ID NO: 643690 - DNA, 1097 bp, Homo sapiens
  misc_feature (537)..(537): n is a, c, g, or t
acaggtgtcgtgaaaactacccctaaaagccaaaactgggaaaggaaatagactcatatcaacattgtcgtcattggacacgattgaattcgggcaagctccaccacatagctggccatctgcatctattaaatgccggtggtcactcgatcgaatagaaccagttgacataaacattttgagaaaggagcgctgcttgatgtctgggaaacgggctccgttcaagttatagcctgaggtccttggactaacatctgaagagcgtgagcggtgtaacactggtattcaccagttgattatctccgttgatggaaattttcgaagaccaagcgaagtagctatgtcgacttatcattagactgtccccaggcacagcagtacgtactttatcagaaaaacatgacttcacatgggcacagtctctagggtctgaactgtagctgtcctgcattagtatgctgctggtgttgtgtgaatcttgaaggcttggtagtctccaatgaactgggcagacccgaacatggcatgcccttctgngcttacacactgtggtgtgtagagacaactaattagtcggtgttagacaaagagtgtgattcctagcatgagacctaccctactacgtccatgaagagattatgaggaacagttgtcaaggaatgtcaggcacttaacattagagatcaattggttacaaccccgacatgagtagcatttgtgccaacttgtctggttggacatggtgacgactatgctggagccaagtgctaacatgaccttgggttcacggatggaaagtcacccgtaaaggatgggcactgccggtggaagcacgctgctttgaggctctgggactggatcctatccacatattcgtccaacttgacaagcccttgggctggcgatctccagggatgttcacaaaaaatgtggggggatgtgtcctcgtcccggattggacaaaatgacagaaggtcggtttcaaaaacccggaatgtaggtcacctatgttcaaaacaacagttaaccggagaataacctttaaaagaccaaaaagattgaggtaacccctctggaaagagtggtacacacaaact

SEQ ID NO: 643691 - DNA, 87 bp, Homo sapiens
ttgctctcactggcttccaggtgtgttgttcggggacagccaccggcttgagtctggccaaggaggtgattaaacagctcagcttct

SEQ ID NO: 643692 - DNA, 431 bp, Homo sapiens
  misc_feature (39)..(39): n is a, c, g, or t
ctgctgccagggcctgcagggagcctactctttgcccgntgcccaaagcagccggccagatcctgcacttgttcacccacgcgttcctcgcaagaagagcttgagcatggcgggccgagtgaacagggcacgcctatcgcaagtctgatgaaggggtggagaaaaactcctgcatcaaagagccattatatatgtaacttaaatagttgagaaaaaagttgtctctgtgtgtgtgtgtgtgtatgtgtgtgtgtgtgtgtttcaagagagggagagagagagagaggagagaggagaaatgataaagcaaatgagatgaacatattaacaacaggtgagtctaggtaaaggatgtactggtacactatttttattcttgcaacttttctgtaagtttgaaactatttccaaataaaaaggtattttttttt

SEQ ID NO: 643693 - DNA, 747 bp, Homo sapiens
  misc_feature (614)..(614): n is a, c, g, or t
  misc_feature (678)..(678): n is a, c, g, or t
cagatctatgagcttgttgagctccttgaagggatgtctacaaagctgcagcttattcacatcccaacgtgtaggtgcactgagccatatagcccagagtatgcatgtgtgagtgtgttgatgcacacacacactctctctcttgaccatctgtctctctctcactctttcttactactctcttcaggacactagacactgggtgttctagtagaagctcactcgccatctctcaggggggttccggattacatacatcacactcccactactggagtcgcggggaactggagggagcagaacactgatttgtcactggtcaagatagattgagactagttcacctctagctagatctctgagaaccaatacactgaaaacttgtgtgcttagagcgatgactcaatgactaatatgccaaaagctcaacacctatattggagtacttatatccatatagacgtgctataatatatggtcatgctctggatatttcaaggatctgtatctattcatccaagagtactcctgagctcttatcagcgacactaatttatcaaatttgcagcactttgaaaagatgagatcgcttcctaccactatagatgtgtgtntctatgtgatataccatacaaaaactcttttagtgtaaagattctagcactaaatacaattggnacacacattataaggatgatgtttttatgtgcctgataccagaattcctttacgtagtgccgcgtctgt

SEQ ID NO: 643694 - DNA, 165 bp, Homo sapiens
gcccacgtttattagaaaaaaaagtgtagtatactaggcaaaaggacccagagatgagcttttcccagtacttattttagaggtgaggacatcgcatcgcttatttgtaacaaaaccaggactagaacccagagatcctgactgccagtgaagcttggctatttt

SEQ ID NO: 643695 - DNA, 255 bp, Homo sapiens
  misc_feature (69)..(69): n is a, c, g, or t
  misc_feature (81)..(81): n is a, c, g, or t
  misc_feature (140)..(140): n is a, c, g, or t
  misc_feature (208)..(208): n is a, c, g, or t
  misc_feature (243)..(243): n is a, c, g, or t
gcagagacgagactcagtgagtgagcaggtgttttggacaatggactggttgagcccatccctattatnaaaatgtctccngacctgtgatacaaaagatcttccgggggctgcacctgcctgcctttgcctaaggcggntttgaatctctttctctcccttcaaccgctggttcctgacgggcatgactgtggccggcgtggttctnctgggctcactcttcagtcggaaatgaccagacantgaccattcact

SEQ ID NO: 643696 - DNA, 148 bp, Homo sapiens
  misc_feature (69)..(69): n is a, c, g, or t
gcagagacgagactcagtgagtgagcaggtgttttggacaatggactggttgagcccatccctattatnaaaacggtctcaggagcaagcaggcagcatggtggttgacatttctctcctacaaagctttcccagaataggatacagg

SEQ ID NO: 643697 - DNA, 254 bp, Homo sapiens
tgggaaacagagcctggttttgccgcccagcctggagggcaggggcccaatctaagttaattgaaggtttggcctccggggttaacgcaattttcttgcttaagcctccggagaggcgggaactacgggcccccgccaccatgccgggaaaatttttggtattttaagaaacacggggtttaaccgggtaagccacaagggtctgaatttccggacctaatgacccgcccgcctaagcctccaaaagttatggg

SEQ ID NO: 643698 - DNA, 848 bp, Homo sapiens
gactggaaggagtcatggcggatggtcaggtggcggaactgctgctccggcggtggaggcgtctgatggcggctggacagcgccgagttggcggtgagctgggcatggagcaccaggcggtgtgtgggcgccgtgaagagccttcaggcgctgggcgaggtcatcgaggctgaacttcgggtccaccaatggactatgtccagcgggtcaagcggacccactctcagggcggctacggctcacaggggtacaagtataactggaagctggacgaggcccggaaaaaaacctattggaaccccaaccaaatcagccagcgcccgtgcgcctctacctgctgtgcccagaaagaagcccttcactccgggtcaagtactttctccatcgaccggtattccggaatgagacccctggacgccaacgcacctggctgagtccaccagatcgaggggcgtggtggcggatcatggtctcacctgtggccaacctcatgggcgtctgcggggagttcttcacaagctgggtatcacggcaactccgttcaaggccagctagaaaccataaaagaggccagcatggagggtgttcagtaaccaccaggggcctgaaaaagtggggtggggtcggaaaactcgggggtcttcagtcagaagatgctgctgccatggggttccgagaaagtgttggtcatgctgggctctcctgggagcccacggtgactatttggttaccattccggctggggcccaagtgctgcgtgtgttgagccctggcgcgttggacggccctcaagggggtgtgcccataagagatccagctttgctttcccgctttttgtgtgccctttc

SEQ ID NO: 643699 - DNA, 310 bp, Homo sapiens
aatcactctaggattcttgctttatcttaccagaatatcccattatcaataacccagaaagtattatatgaaatatttgaatctcagattcaatttaacaaatgtgatcaccaagacttgcagaggcagagaactaaaaacaaaccttttctttttttttttttgggtgggcaaccaaaataacataatattccgggctctctctgattgagaaaggcggggcttctattatattttctgaaagccaggacagctccaagacaggtttacattacgggaccgcctttgcactccggccggataccgagct

SEQ ID NO: 643700 - DNA, 204 bp, Homo sapiens
gtgtggatggatcagactctcagcccccctacccatcgatgccttggtgagccgttacctcaccaactaactaatggaacgcatgcctatctcttagcaataaatctttccttaataactcatgcgagaaattaagaatatgcggtattagtccggatttctccgggttatcccccactaagaggcaagttgcatacgcgttac

SEQ ID NO: 643701 - DNA, 243 bp, Homo sapiens
  misc_feature (83)..(83): n is a, c, g, or t
aggcagaagggacgctactgacttaagccaaaccctgattggtggataaagtattcagttgttccattcatgcctatcctttntacagctctcgcgactataacaaacaactgataaaatagcatcagtccctccaccaggttgccctcaaggaagccatgtttgtgacgatccgaccagtccctgacgatctctctagaccaccctgacctcgccgagagtgctgaaggagctatctaacca

SEQ ID NO: 643702 - DNA, 297 bp, Homo sapiens
cccccccccccagcttttttgggtttgcatcccagggggcctcaaacacggccctcccccctgtcagatttgggtgagcaaacccagtggggctgttaggtcctccagttccaaaccagtttagggacccccctcccctgtttttgggaattcccaccccaaagaagcaaaaagggaaaaagtttcccccaatttttcccatgagcaagaccccctttaaagggggcaaatatttttccagattttttctaggcataagaatatttgtttaaaaacttataaaggggattatcccca

SEQ ID NO: 643703 - DNA, 399 bp, Homo sapiens
  misc_feature (13)..(13): n is a, c, g, or t
tccgggggccctnagggggttgggaagctcttttactctgatcccctccctggggcgggccccgtagaagtttcccggaaaaacccttaatttttgggggccgtggcggggaaagccctgccgggattcccccaaaagcccccgggggggttaaatgtggatgtttcttttgcccccccgggggggttttggtcccgcccccccccagattaggtgccgcccccccaagagggctttggccgtcccccaggaaaccgggccccgcctcccgggccccaaattcggccagcctctccccggtttgggtcccgcccttttacccccggctttgctggtcctggggagaaccaaattggtcccgcccgcccctaattccataaaactgttttgtgggccgga

SEQ ID NO: 643704 - DNA, 99 bp, Homo sapiens
tatgaatgatggtgtttatggttcttttgcaagtaaactgtctgaggacttaaataccattccagaggttcacaagaaatataaggaagatgagcctct

SEQ ID NO: 643705 - DNA, 135 bp, Homo sapiens
  misc_feature (88)..(88): n is a, c, g, or t
  misc_feature (91)..(91): n is a, c, g, or t
gagtcagtggccaactcctggctcagtggggattgtgctcgtcccctccgttcccctccagtcttcctcccgataccggaacgcgtcntgngcttgtttggctgaggaggagcaaagaatgcaggattatttaga

SEQ ID NO: 643706 - DNA, 137 bp, Homo sapiens
gccttgaattgtgaaaaataatttattaatgatcagatatttaaaagaaataaaatgatagaatataataaatatgttgaaataatttagaaaaataaaatattttaagaaataaaattaaagatatattaaagaaa

SEQ ID NO: 643707 - DNA, 146 bp, Homo sapiens
attggttccaagacgcgtaggcgagattgtctgaaagcccccggtatcattcctcgaatttcagtgcgggaaccaatgcagacttgcattaaggcctgtggatagcttggtgcccaatttgtcgttgtcaccgtaacctattattt

SEQ ID NO: 643708 - DNA, 165 bp, Homo sapiens
  misc_feature (17)..(17): n is a, c, g, or t
  misc_feature (58)..(58): n is a, c, g, or t
  misc_feature (62)..(62): n is a, c, g, or t
ggccaacttggacgctntccctgtacgaaggctggatgaacttcaggccggacactanctcncggtaaacccggaaagagaccctaatccggtactccacaccccccttcagcacaaacgactgcttctggaagctctccaggtcgcccgtcaggtccagcttcc

SEQ ID NO: 643709 - DNA, 991 bp, Homo sapiens
  misc_feature (120)..(120): n is a, c, g, or t
  misc_feature (344)..(344): n is a, c, g, or t
ctgatgctcgcttgtagtgcctcgttgcggagcgtacctgattacctacttttgtgcaagcgagtggctgtaggtagtacatcacgttcgcttcggcgcaatggcctgagtgtaaatatngccacaaatggaaagaggacgtcgaaagtactggtatgcaacacatcgtagtacattacttacactataaggagatgggttgcgccggggagtcaagggcagtggtgtatctcgctcgtgattgccatgatctctatcgaatttcacagtacgcgtcagtaaactgcctcagttgagcttatgaccttaaatggcccagtccttagtgttgtgaaagcgtagtnggagtagtatgtcaacccgatgcgacttggatcatgtacttcaccgtattggcggacagagggacaatagcaacaattccagattcgaaaacaaccgaagtaccaacaaacgcatggccaatcattgctttcgcgaggagatggagcaggggattagaagcgcactcatcgaagattggaataagttgtttgccaaagacaaaggcacgcatctgagcgagagggttcgttcccttatcggggggaggaccgggtggggaacctctagaggctttccttgtgtttaaccttcacaagtacaccatgctggctaactttttggaatgggcatcgccaatagaaatcttatcccagttggcttcgatacttttaggaaaagagagcctcgtcagagtatatcgggttttcgcacccaatatttcccttggaatctgaacgtaacccggtggtaaggttctaaggcatcattaatttctattgcaatttttccccccacgcatttctccaccattagccgccgttctattggtttagccagttaaaaacgtggaaccgttgggtgtaattcctgtggtgccccacaagagaccattattgcgctgcatgtcacacccattcttgggcaggacaatccttacagggaagcc

SEQ ID NO: 643710 - DNA, 107 bp, Homo sapiens
tcatacactcctatgaaaaaattctaccactcaccctagcattacttatatgacatgtctccatacccattacaatctccagcattccccctttggcccttatcgag

SEQ ID NO: 643711 - DNA, 270 bp, Homo sapiens
aatgtaattgttagaatggccgcagcgcggtccagcaaacctctcaggggacgcttcgcaatgtcgtgactggaaaacctctcgggggagaagtcgaggacgtgctgctgtgggtgctgcgagtccccggggcggcaggcgctgcaggaaggtccgcctacaatttgtccaggaaggttgtccagggcaggggtgccttctttcaggcccttgcgcttgcgggtctccgccaccacctggctggggcggctgccgttgttcttcgacgaa

SEQ ID NO: 643712 - DNA, 167 bp, Homo sapiens
gtcctctatcgtgtaacatctaggaccactcttgatagcttcctaagtggtctttctgtagtttccttgctctgtcctgttctccgcagaggaaccacagtaatcctttgaaacatgaatcatgtcactcttcttttcaaaaccctccaatggtttagcatcacact

SEQ ID NO: 643713 - DNA, 102 bp, Homo sapiens
caggcaaggggcagaaggggcatcagctccctgggtgggcccagcctactgcagtctcagtgcctctattagaggtgcatgggctgtcgggctagtcggggg

SEQ ID NO: 643714 - DNA, 646 bp, Homo sapiens
ccccaatcacactaccttactagattatagagatgacatgtggaagattacagggacaattgaagtgtttaactcaggaggaaaacttctcaggagaatatgggaagtttcagtcgaacaacagtctactgtaggtcctataacatcactttggttaggacactactctcctgtcattcacaatgtattggcgaaagatgtcttcgtggtactccggaagacaaaattctgaaatcagccgtgatgacctggtttttttttttctctccgttctgggtgtttacagggagggtgtttgacccgaaaaaaccctgtggagtccaggacccggaaaacaaaaggtcctgcacgcgaatcactcacctgcaaggtgagacacactgaccttttaaactcatttcccattggctacacagcttattctgaccatcagttcgcattactttatttggccttgtgtgctttattttccttgataccagggaaagctacatttgaagtctcatttaaatgtgtttttatggccctctaatgccacttctctttgttattatattgtgtgtgtcccagactcactccctgatccaccgacgggccgtcccaggcaggcagaaagaattaggggcgttaaaaggtaccgagctca

SEQ ID NO: 643715 - DNA, 421 bp, Homo sapiens
gttgtcacgatgtataatggttcaggtgcggacttccaacatccatgcggagtcctgcaacgggacatatcttcatactcttctggtggctgcattcagtgtataccttctctggaggattgcagagacaggccgaggcccttggccagcgccttcctgtccttccccagcaggctgtcgtagggagtcaagtacctgccgcagcccccgctagtttgcgatttccccccagcacggtccgaaaacttgaagggcgacttcaacttgtcctgcttggtgggggagagggccttgtcgagcttgcgttgccaactgctcctggtcgctggccatcttcttcttcttaatctttagctgactgatgaagtcggacgaggcctcatgttcatcccaagtctggttcctccagagaaggtaaaca

SEQ ID NO: 643716 - DNA, 346 bp, Homo sapiens
atattaaaattcgccgggtgtggtggtacacgcctatcatcccagctactcgggaggctgaggcaggagaccggcttgaacccaggaggtggaggttgcggtgagccgagatcgcgccattttactccagcctgggtgacaagaacgaaactccatctcaaagaaaataataataataataataggtagggtccaagcttcttgagtggattagacaaagcagacttcgtgttcatcatatatcatatgatgaacagttcaattgcacccacaggagagaggtcttcttggagaatgcttgtatatagaatcttctgtaaaatagagtaggctacttctaatgata

SEQ ID NO: 643717 - DNA, 415 bp, Homo sapiens
  misc_feature (4)..(4): n is a, c, g, or t
  misc_feature (49)..(49): n is a, c, g, or t
atgnaaactggagacattacaacccaatggcccacagaacgccaatagntccatttgagactacctattaacacccccctatgcatatcaactagaaaaccctcgaggaaatggataaattcccggaaacatacaaccctccctagattaaatccggaagaaatagaaaccctgagcagacccaataacaagcagcaagattaaatccagtaataaaaaaaattgcccaacaaagaaaaagcccagggctagatagattcacagctgaattctaccagatattcaaagatgaactggtatcaatcttactgcaactattgcaaaagattgagaaagagggaattctctctgaatcattctttgaagccggtattaccctgataccaaaactcagaaaggacataacaaaaaaaaa

SEQ ID NO: 643718 - DNA, 117 bp, Homo sapiens
gctttggatggaaagtcctagggtgattctatttctggcggtgattaatctagctgaaagctcagctgggggtggtgcaagctagggacccattcctgtgtaatacaaggtctgcac

SEQ ID NO: 643719 - DNA, 136 bp, Homo sapiens
ctcggcgagtgttatcagttctacaaatattgtcagtagaatgtagacatctgcacaccagaaaaaaagggtacttacattaaatggacaaattcctagaagcatacaatctgccaaaaatgaaccattaagaaat

SEQ ID NO: 643720 - DNA, 295 bp, Homo sapiens
  misc_feature (70)..(70): n is a, c, g, or t
ggatgtacgacaaggctgtggccaaggtcatccctgagctgaagggaaagctcactgggcatggcctttntgtgtccccaactgccaaggtgtcagtgttggacctgacctggcggtctagaaaaaacctgccaaattatgatgacatcaagaagggtgttagaagcaaggcgtcgggagggcccccttcaggggcattccggggcatacacgtgaccaccaggttggtctccttcgtgatttcaacagcgaacacccacttcttcaaccgtgccttatctgcggggtacggagc

SEQ ID NO: 643721 - DNA, 444 bp, Homo sapiens
  misc_feature (168)..(168): n is a, c, g, or t
agaaagtgagcacaagaagcattcttcacagatgtgaaacaacaggaattgcttgagaaatgtcagttctgaatcatcagggaagggggagaataattttaaaatgctaaaatggctttcagatgcctgttccactgtttgtgtgtttgcatcctgtgtcaataatancttggctctaacagaaacacctgggccccagccatcgtcaacacacattggggcccttctccaaaacacaggaggctgagtcctctcctgccctggtgagaggcgcctgccacagaggggtgggagacagggaaggggaagttctttcctgaggctgaagctctcgagcttggaattgcgctgtttgcaacatggccagggaatgacagtgaccctagaaggcttttctccttgtcaccacccggctgcttacagctcccctggcggccggcctgc

SEQ ID NO: 643722 - DNA, 642 bp, Homo sapiens
ccattttcttcttttgtccttctcccaggcttttgacacctgctagaggcagctacacacccactttggcatagccttcatttcttacggcacttttgctgaatccttctgttcatcccctaatgttactcatgttgacattccttctggtggctaagtctagtttctactcagtagccagagtcttttttaaactttaattggattatgtcaccacctgagtaagcccaccatgaatactgcattggaattagcattaataccagcctctacactgcggtctccccactcctgatctagccctggccttatttcaaacaccgccttcccacgacggtgctccagccatgccagccttccttaaagtgccatgccctttcctggtgcagggcccaggcctatgctgttcctcctcttcccatggtggtttccttttcaaacttaaaggctcaacttaatagtccctcttcccagaggccttctctcactaccctttataaagtaggtctcttctgttagttagtttctccaccctgtatattttcttcagtaacaaaacaccatttgtaattatttaataattacagtttattatctgtctttgtcaccaggctgtacatgtcatgaggtcaaggaccttgt

SEQ ID NO: 643723 - DNA, 414 bp, Homo sapiens
tttcctctccctactgtatcctacaaagcacttattcattttacagtctcatatgaagattgcattctagtcaagggaccaagtctatcatcaagctgtggggccaaagtcagtaactatctcaaccacacaaatattcatagaatgcccagacattcaaataagaagagaggaagtcaaactatccctgtttgaagatgacatgatcctatatctagaaaaccccatcatctcagcccaaaagcttcttaagctcattagcaacttcagcaaagtctcaggatacaaaatcaacgtgcaaaaatcgctagcattcctatataccaacaacaggcaagcagagagccaattcatgaacgaactcccattcactattgccacaaaaagaataaactacctaggatacagtaggga

SEQ ID NO: 643724 - DNA, 1114 bp, Homo sapiens
caatctttctggatgagctatggaaaggagccgctgtacagggcaactgatcctcgtcgtgaaggtgctgaaggttcgagacatggagtacaaggaagagacagtggacttcaattgaaagagtgtccccggctcaggattttcatcgcactccaaatgtgctcccagttgctagtgtgcctgccatgtctccacctgctcctcatcctactctcatcacacactggatgccatatggaatccctctacaatgtactacatgaaggcaccaatattcgtcgtggaccagagccaggctgtagaagttatgctatcaggacacatggacaaggggacataggaccttcctacacacactcacagcccctcatcccactgacatgctctcaatagccgtagctgtcaatgattgatgacggacatgactgcccgaattagcatggctgatgctcacgttctctttccaatgtcctgggtcgcatgtatgcacccgtgcctgaggtagacccccgaacgcatctgcaccacacgacgcctgcaccacacaaaccagacgctacagcagactatgtggcaggttctgcaggcagcttcagtacggaaactggtgacaaggtcgagtgaacgcatttggctctgaccctctccaatcatagcagcattggaaattgcactgctggcacatgaacatggccattccggccctaacaacccacacacgttctctccctcatgtgagaacacgctcaatgcactcttctggcctgtcaaccacactccccacgtacaatacacccccaccatatacactatacttctaccataaccttatcacacacttcagtcacaaactagactcaacgcccatgtcgacactcaccatatttctcaactgccccgcgatcttcccctccactcccaccctcttctactcacccaccccccctctccaccccccttccccctcactccctcctcacgatccatcacccactcacccacaccccccccaccccgcctaccgccccatcatctatccaccaccaacaccatcaccacccaccacccaccgcacacccacaccacaacctaccaccacctctccccaccctcc

SEQ ID NO: 643725 - DNA, 89 bp, Homo sapiens
gatcacctttgaccaccacctcggtccctccgccgaaaggattatcaccataagcactacattgacaatagtaagtggcagcatcggca

SEQ ID NO: 643726 - DNA, 82 bp, Homo sapiens
gctgagcgggccacccgggccgagtgcttcttcatgatgagtcggccgcctgcaggagcttccgccgatcgcctacatcttg

SEQ ID NO: 643727 - DNA, 129 bp, Homo sapiens
cagagttcttcacccccgaaacccatgaagcccttctgagcgcttgccggtttaagtggacgcgtatcagcgtctcgatcttgggcagcatgttccagttggtgaaatccaaagaggccagacgggcgg

SEQ ID NO: 643728 - DNA, 1061 bp, Homo sapiens
  misc_feature (128)..(128): n is a, c, g, or t
  misc_feature (131)..(131): n is a, c, g, or t
ctacctatgaagggtagtggtccgcaagagtgcattgtatacccgctagaatcccctaatgaagtattcaatccatagtcatatccgtactgacgtgccgcatctatgacgtgtcaacatcgagcctngantcgtcacgctataggtcatagatatgaaaagggaagtctgaaagaatctaaagtaatatcataagcaatcgtgcctttattaaccatatttattactggagagtcgtcatatttctcaaccacatcgcttacgagaggcgaatcaagaagcactttccgaggtcatgccacgtttcgagtcaaattgaccgctgatccgaggtatgcttacagtgctactatatccgattatttttgagtaagacccgtcaagagcatttcacaaccgggatctatacatcagtccaatctgaatgtaagggctttactaggcatatttaccataccatcattatgccattgctgtactagtacacgtgagcaaatctgtaaactgtatttatccaactatttgacaatgccgcacaaaacagattccaactttttttgcatgtcatatcggaaacacgaccgccaagtgccggacccgtagaataaacttagagcgatgtctaacgtagaacaatgggttgcgatgttgagtacatttcaatattccattggtttattaggttcctactccaacttctttacttattgcatttgaaatgcggggtaccgtctcacaccataccatattgaccaaaggggcccaaaaacagggggacaaaacaacgcaaaggttctcgaggacgaacagaacggacgacgagcactttgggtttaaccaaaccgcccaactggtattaaacccaaaactgacatcgccggacattcggataggagaaccctattcttcggggacaaaggaaatttgggcttccgccctttttgacacacaccaacacttcccttgcgtttgggttaacaatgccccaagtatatttgcggtgtgtacaacacttaggttaccccgagtttcttcagaacccaaacaagttggcacacacg

SEQ ID NO: 643729 - DNA, 429 bp, Homo sapiens
  misc_feature (230)..(230): n is a, c, g, or t
  misc_feature (237)..(237): n is a, c, g, or t
  misc_feature (298)..(298): n is a, c, g, or t
  misc_feature (331)..(331): n is a, c, g, or t
  misc_feature (373)..(373): n is a, c, g, or t
  misc_feature (403)..(403): n is a, c, g, or t
aaacaaacttggtgctgttgtggggtgcatggtgggagtgacagtggccttttgggttgtgtggaagctgggtgatgcctgtaattgctggctttcccccacttccctgaccaacctgcatgacacagcagaggcagccataatcttcctgggaacataactccattggcctgggaaccacacccccatcccccatagcagctgcagcaactcctgccaaggagagtcanagctcanacgtgcctagccttgcccaacctgatggtccttctggctcactctagtagctgaagacaanaggcatatactcttgggagttctaggccccatncactgctgatgctcctatattaccacagctgatgctctcttnaaagcgccacctctggaggaggccatcagnactagttcattcacccaacttggcct

SEQ ID NO: 643730 - DNA, 157 bp, Homo sapiens; identical to SEQ ID NO: 480870

SEQ ID NO: 643731 - DNA, 1041 bp, Homo sapiens
gagactatcaggatccggagacggaaatgtccgaacggccgcacgtacttgaccctgtacttttgggacgtcgaacggacgaatggaacacctgcacacgtggaacatcttggaacaacggtaatggacgaagaaacgcactgaaacacgacacaccacgaagttgacaaaaacagaaacggtcacgcagttcaaacaggtgcttgcaggtatggctcaagcacgtggactatctggttctggcggcatgccaatcttcacacaggaatagatttcttatcgagcaacagcatcaacaaaatctagcagatggaatatgttagatatatcactcacttgtgtcttcatcaaccaccactgaaacacaattgacctcactgatggcgaaagtcactctagcccagcagccatagagaaagttccagctcagtagcacacagcaagactcctgggacagggcacccagaaaatcccgggaagcgacaacaccaccccatcatgaggaggacacaacaacccaacaggagatagacgagactagacaccggcacacgaagatcatgataggaaagtaacatatcccaacagacactagtccacccaccaagagcataggaattagcaacagaaacaaatagaaggaacaaactagaagcagacacaaagaacgaatacatataacagtaatacaccagcacataaaaacgggaagactcggaagactccaaacagcaaatatacgcaaccaaggcgacatcaggaacgcaccagcaaccagagccagcaaaccaacaaaagagcaactaaaaaaccaacaccaccccagcaaaacaggccccaacgcaacaccaggacaatctccataaccaccagcgaacaataacccaggtcccacgccccaaacgcagcggcacgaccacacaaaaaaacacgacgacaacgggagagccagaaaacgcggatggagagaacaaaaccaacaacaacagaaaggcggaacgacacccagaataacaacaaacaaagaacaccaaaaagagg

SEQ ID NO: 643732 - DNA, 125 bp, Homo sapiens
actttactctgtgggggcgcagtcttgatctgtactgtgcagagccccaccacaaggtcagcaatagaatgtgtcctcagtctccccagagacggtggctcaccatcacacccccagccattaga

SEQ ID NO: 643733 - DNA, 518 bp, Homo sapiens
cccccccccccccccccaaaataatttttttttgggggcccgccgggaaaaaaaaaaaaaaaatttttctttggggggggggtggggggggggataacattttcttttttggggggccaattttttttggggggggggggtttttgttttccgccccccacaacttctgggggaggaaattttttggggggggggggagcccaacacaccttgtttggttttataaagggcggcccccccccccaaaaaaaaaaggttttttttcgcgcgctttaaaaaacacacaccccctctttgaaaaaaaggggggttttccccgggtttttcccccccccgaagaaaatcccgtgggtgtcccccaagaggcccccccccctttttttaaacaaaaaatcggggggaaaaaaaacccggggggggtggggtttttcccggaaaaagggggcttgaaagcccgtgggtgggaatccctgagcaaggccgcctccttccaaaagcaccacattcttcttgtatga

SEQ ID NO: 643734 - DNA, 257 bp, Homo sapiens
  misc_feature (49)..(49): n is a, c, g, or t
  misc_feature (167)..(167): n is a, c, g, or t
tggctcttcatcttcctctactcagtttctattatagccggcgctccancatgtctgtggcagtacagacagtagagatcttcggctactccttactcactggttatgttttcttcctcatgctgggcaccatctcctttttttcttcccctaaagttcatccgcgnatatctatgttaacctcacagatggactgagttcttgtatgtgcagaactattttcagtatctcttgtagctgtcgaggctagtccgcgg

SEQ ID NO: 643735 - DNA, 1366 bp, Homo sapiens
acaggatgtcgtgaagagactacccctaaaagccaaaatgggaactggaaaagactcatatcaacattgtcgtcattggacactgtagattcgggccaagtccaccgactactggccatctgatctataaatgcggtggcatcgcaccacaaagaaccattagcaacacaatttgagcaaggcaggctgcatgagaatgggcaaagaggctccttcaaagctatgcctgtggtcattgcgcatcacaactgcacacagctgcagcgtgcaacgtggtatcaccacttgatactctccttgctggaacatttgagaccagcaagctactatgatgacctagtcattgatgaccccaggaccacagacgacttttatcaaaaaccatgactcacacgtggaacatatctaccagggctggacctgcctgctgctaccatgaactttgatatcgcctcggcctcgggatgatacgcgttgacacttccggacacgcctgggcttactacttccacacgacactggggtgtccacgatcaccccggacgtaagcccaattggccccccattttccctcgggccactttcaaccaccacacatggagcagcactggattgcacaaacaaccacaaccacataaacgctattgctccggagctgggatatatcaacgaaatcaacactggcgaacatttacccaacattgaagagcaccaaacacccaacttaacaaagcccccaacggcaaaacggaaagacacatcaacctagcaccgcggacaacaacagctcgggatcacacacgagcgcacacaggctcacacgggaccacacatgagtaacccacctttcgacaccggcacacaacaacctctgccgaccctataaccaaacaccccacccacggcaacgacaccacagcctaacgaccacaaatgcgtagcgtcaggacacaacacatcacacatccctggcgccaccacacggcaaaccctgcgtcgctagaaaccaaacaaccaaattcggccattgagaacgaaccccaaaacgcatgagcacacacaaacccagtgaaccccactactagagaaacacacaaaacgggaggaacttggtcaagcaacatggactaaccacccccggataaacagtcgaacatttgtgcataaaaccatgacaccaagataaggacacacaccccataagcgacataccttatatgcaaccggcctcatggagcacaacgacgacattctcattacacccacacaaaaactactctcgctcccaaccttgaacacaatcgtcaccaatagtacaccagaacatatctataccaagagcagcatctaaatacaactaaatatg

SEQ ID NO: 643736 - DNA, 405 bp, Homo sapiens
aaagactctccttttcccattgcgtgttattgatgcctttgtcaaagataaggtggctgtaaatgcgtggatttatacctgagttctctcatctgtttcactgatccatgtgtctgtttttatgccagtaccatgctgttttgattactatagctttgtcataaattctgaagtcaggtagtgtgatgcctccagctacattctttttgctcaggattgctttggctattcatagtcttgcggttccatgtaaattttaggttattctttgtttattttgtttacctatttctgtgaagaatgttattggtatttggatacagtattgttaggaatctgaaaattgctttgggtagtcttgtcatttaaaatctctggaattagtcttctaatccatgaacattt

SEQ ID NO: 643737 - DNA, 890 bp, Homo sapiens
gtgagaacggatccgccatgagtaacggcgactccatgactcaagcactggaagacaaaagtagtgttacatgcactgccgagttttgtggatactctgggtatagcttccacccttcgctagggacgaagtttgtagctggcagagtgctgctcgtacattgatgaggcagtgtgaacagatgccgcgagataacctgccctatgagtcgcaacattgttgaccactagtgttgatacgcaggaagttgacgagattgacgagtgagtggagttggcaatgtaccaggagaagagagactcacgtacaagcggggctcgtgtgaaggtggtgagtgacggatcgtaattatgcgggtgatacataggctgatgggtgaatcgttagacgactggagaccgtgtggcgtgtgttgacatcgtgagacacatggccacgaaaaggaacacttcaagcagaagcatggagatgctggagaagatagcttgggtagcgaatctcatacatttacttgcggctggggaacgtggtggacttgtggatgacatggtgaacgtgacacttaatacgctgaatgtgagagtgatgatcgtggcaaatgttgttattcctcaggtttgaacaggcagagcacttcatgggagaactgttgggagtgagacacattggaaatcgagaccgggatgggagattaaatggtgcgttgggtagaaagattgcctaatttgtcaattttacccaaactttcaaaccaatttaccaagagttggtaggactgatctttaaataaaataaactttgggtttgaaacggttagtaagtggccttgtaggggtttaagccaagaatatgaggtgtaaggccaattatctgacttcagggaggaatgt

SEQ ID NO: 643738 - DNA, 433 bp, Homo sapiens
cgtacatatgtgtaccatcattttacacaagtctcggatgggaagtctcttatccagcacctgggtcctcgataatctctaggacactgcctaccccaaatgcaggcgcctccctccgggaaattctcgttatgaacaagtatccaattccaaccccaaatcctgtctcttctgttacctcatttctctccttatccccttagccccaagtcccagggtgccctcttttcagaaaaactccacaaactctggacgccagaatcccttctacttactccttaacctttccagtccccccatttcccagtcctactagaaagctgccctgaggcctggtgcagtgattcacgcctgtaatcccagcacttcaggaggccgaggtgagatcacctgaacccaggagttcaagaccaccctgggcaacattatggag

SEQ ID NO: 643739 - DNA, 308 bp, Homo sapiens
ttttttttgttttgttttgtttttgggggggggggggggtggccccgggaaaagtggaacccaacctgtttttaaatccctattggaaataaaaatggtttgagggccagggatattctccccgaatggacttattttcccccggcagggccgggggtccccccggttttggatatgttgctagaatttagattggaaaaaagggaaattttaatgggttcctttgtttttaagggaaatatgtcttgccccgattttttggtttaaataaaccccccctgggggttggggcttttcctttttcttta

SEQ ID NO: 643740 - DNA, 660 bp, Homo sapiens
  misc_feature (67)..(67): n is a, c, g, or t
tggggctctaaagggggtaaagggggtgctaaggggtaaataggggccctatttacaaaaattttanggggaaattaattctgaggacgaagtgggctatgaaagcgtggtggttggcctccacgagaatttcagaagcatgtgaccgtagttataccccgcggtcggtgtagcgggtgaaaggtggttgggttaaaacggtctccggggaattgtgcatctctgtggttttataagcctataatgtggtggggaccaagctctcagtgaagtgtgcaaaagcgttcttgggtgagtgttaatttattataatacgaaaggggggctttcaactggggagttacatacctcgaagtggtgtcaccggttcagaggagatctcgacagggtctcgccgtgggtctcttaggaaatataaaggggggaaagtatagtgtttaggcagtttgaaagacatttagctccgcccgtataactcgggggttcaccccaagagggtctcacgacacccatgtgtgggggcgccaagtggagttgagggggggaaagcggggaggggggactcgatgagaacccatcggccgggtacactgctaaaaggggaatcgcaaacggggaattgcgaaaggcccgaaagacgcgccttacaaaaataaaatg

SEQ ID NO: 643741 - DNA, 218 bp, Homo sapiens
cctctagagtatcccctgctcatccctccttggtcagacattttatttgaattcttttattttttatttttttgaaatggagtctctgtcacccaggctggggtgcagtggcgcgatctcagctcactctaacctccgccttctgggatcaatcaattctcctgcctcagtctcctgagtagcagggactacaggtgtgcgccaaggagggatgagca

SEQ ID NO: 643742 - DNA, 554 bp, Homo sapiens
  misc_feature (35)..(35): n is a, c, g, or t
  misc_feature (120)..(120): n is a, c, g, or t
  misc_feature (188)..(188): n is a, c, g, or t
  misc_feature (280)..(280): n is a, c, g, or t
  misc_feature (310)..(310): n is a, c, g, or t
  misc_feature (339)..(339): n is a, c, g, or t
  misc_feature (396)..(396): n is a, c, g, or t
  misc_feature (484)..(484): n is a, c, g, or t
  misc_feature (521)..(521): n is a, c, g, or t
tggagtcgatatttgcagtcaatggagcatccagntaggaaactggattggaccatttgaagagtgagtaaaagtgaggacgaggttaaggttgactgttttgagtagagagcttcaggnaaggattgttctctgggttcagggagccagctgaacctaaaggaaaaggctaaagaagctgaagaganggaggaggacctgtgaaccagagatgctcagtcattattagcgaggaaatacggagagcccctgtgtgcagtggtgactactcatgcaaaantgtcacacagccaatatttaacacagccangtatttcacacagccaatatttattagtnacatagcatataccagttattactctaggtcatgagaatggagtgataaataaaatnaatccagtcgccatcactatatgccatggtaacattttgcaatgactgtggatcaggcctatgaaatttcagtattcaatttcaatantgatcctgttggtatctgtggttatttaaaacatatncatctctggaatctaaaatttgagaggttataa

SEQ ID NO: 643743 - DNA, 448 bp, Homo sapiens
ggcttttcctaccctaagagtttaaaaatatttgtatgtaatttttttgttacatttcttacagtaaaatttttaatccttctggaatttcttttgttttagcgtaagatggagttttattttttatatactaaatttccattcaaaccatctgtttgataacttatctagggcaaatttcctttgattcttcctttttgtttgtttgttttatagagacaaagggtcttactctgtctcccacgctggagtttggtgatgcaatcaccactcactgcagccttgaacctatgggttcaaagattctctcacttcagtctctcaagtagctagaacagacacgtgctgccacacccagcttactcttctttttaatactcttcttggctattattgcatatttattctcctaggaaaactttggaaaatcgttaagtaaaatgtaaaa

SEQ ID NO: 643744 - DNA, 165 bp, Homo sapiens
  misc_feature (1)..(1): n is a, c, g, or t
  misc_feature (70)..(70): n is a, c, g, or t
  misc_feature (106)..(106): n is a, c, g, or t
  misc_feature (117)..(117): n is a, c, g, or t
  misc_feature (149)..(149): n is a, c, g, or t
nattcggcacgacggaacaagctagaagaaatgatcaatgagctagcagtggcgattgacagctgtaaanaccgaacaggaatacatggaagtccgggagagaatncacagagccancaccgacaccccaacagcagagtggtcctttngtccctctttgaagct

SEQ ID NO: 643745 - DNA, 915 bp, Homo sapiens
tgctgttcgctgtgtgaaggttgactgtgtgtgtgaggagtgccccgtcgccggcggatcgtgtccatgcataactgtatcttcttggccgacggtgtgagaaagtatggcaatgaaccctggacggctcgagtttccggtgtcaggctcaataagtcgaagcaagacagtgagtttaccatgtgtgaatcatgggctgtgcgtaaattataaagtcagcgatgcgaatcgcaagtggaggacttttgattattcatgatgtttaagctcagatcctatggatggtgtatattgtcatggcttgtaggagaatatagtacaaaaaaagaaagcctaggagtgatgaacgctaatgtagatgagtcatggattgacatctgccgtgtggactagggaagagaaactggcagcactagaggccaaaattctttaatgcccatagaagctcgatgatgtcctccagggaggtagcagcctgcaaccatgggaccctcggggcaattgggaatctccgagtagtagaccaaattcagaagaaggctagcgggcaccagataggggggcatccaggcgtcagagggtccacaggtcgcccacgctgttaaaccggattgaatggaacgtacgcgaagaatgtagaggcacgcacaggaggaagacaggcgcgggggactctactcaacgctaccgacggagtgcgacccgacggctcgctgtggaaaccacacggaatcaacccggggacgggccaggatataggcgcacggcaagaaagcaccaacgcacggcagcgctgcgctggagagacacaacccccggggagaacagacagaacacccgagcaaaaacagggccgcgcacaacggacacaccatgctaccaccgccacacgggacaacacacaccccacaccag

SEQ ID NO: 643746 - DNA, 262 bp, Homo sapiens
ctctagcaggatccccgattccgaggggagatgaagatatacttacctctcaaggtcagaatgtgtatctcttcattactgccttcaagcactatagttctttaaattgctttcccattgaaggatggaacattttggtggcatattattcattactccagaatgaagagatctcaggcccttattctaggggacagacattagagaaatgtgaactgtgcacattggcctgttattttacagtatccacccacgtggaaat

SEQ ID NO: 643747 - DNA, 507 bp, Homo sapiens
  misc_feature (80)..(80): n is a, c, g, or t
  misc_feature (98)..(98): n is a, c, g, or t
  misc_feature (118)..(118): n is a, c, g, or t
  misc_feature (125)..(126): n is a, c, g, or t
  misc_feature (129)..(129): n is a, c, g, or t
  misc_feature (131)..(132): n is a, c, g, or t
  misc_feature (135)..(135): n is a, c, g, or t
  misc_feature (142)..(142): n is a, c, g, or t
  misc_feature (144)..(145): n is a, c, g, or t
  misc_feature (152)..(152): n is a, c, g, or t
  misc_feature (179)..(179): n is a, c, g, or t
  misc_feature (183)..(183): n is a, c, g, or t
  misc_feature (185)..(185): n is a, c, g, or t
  misc_feature (198)..(198): n is a, c, g, or t
  misc_feature (210)..(210): n is a, c, g, or t
  misc_feature (242)..(242): n is a, c, g, or t
  misc_feature (245)..(245): n is a, c, g, or t
  misc_feature (247)..(247): n is a, c, g, or t
  misc_feature (255)..(256): n is a, c, g, or t
  misc_feature (266)..(266): n is a, c, g, or t
  misc_feature (271)..(271): n is a, c, g, or t
  misc_feature (275)..(275): n is a, c, g, or t
  misc_feature (277)..(277): n is a, c, g, or t
  misc_feature (307)..(307): n is a, c, g, or t
  misc_feature (326)..(326): n is a, c, g, or t
  misc_feature (330)..(330): n is a, c, g, or t
  misc_feature (337)..(337): n is a, c, g, or t
  misc_feature (340)..(340): n is a, c, g, or t
  misc_feature (346)..(346): n is a, c, g, or t
  misc_feature (361)..(361): n is a, c, g, or t
  misc_feature (387)..(387): n is a, c, g, or t
  misc_feature (389)..(389): n is a, c, g, or t
  misc_feature (412)..(412): n is a, c, g, or t
  misc_feature (424)..(424): n is a, c, g, or t
  misc_feature (502)..(502): n is a, c, g, or t
gctgagcgttgggctgtaggtcgctgtgctgtgtgatcccccagagccatgcccgagatagtggatacctgttcgttggnctcttcggcttccgtctnccggaccaagaaacttcacntcccctnnacncnncangggaagncnnccaacantaaacctgaagcagcagattaatcttnactntnacctccaaaagancacaacatctcntttccataaaaaccaaattaaaatacaaaaantantnataatatnnaaatacaacnaaaanatcntnttccacaaacaaaaacttaaaacccatacnaaattcaaatatttatttntatnctttttnccnaaaatnaacaaattcttatanaaatttcttttcacaaatattaaaanantttcctcttaactccctaaatantcaaaacaattntcccaaccaacacccatatctctttactcactcccaccccatccactccacaccaatccttccttctcaccacactcnttctc

SEQ ID NO: 643748 - DNA, 179 bp, Homo sapiens
agtagaaaataagttcaaaattttagaaatactggctttatactcgcccatgtatttacattcacagagatctttatttatttacaagcgctttgagttactgtatagttttttttaacaaaaaagcgtggggggctccctttagcattccccataggataggtaatgaactttttgtt

SEQ ID NO: 643749 - DNA, 385 bp, Homo sapiens
  misc_feature (80)..(80): n is a, c, g, or t
  misc_feature (98)..(98): n is a, c, g, or t
gctgagcgttgggctgtaggtcgctgtgctgtgtgatcccccagagccatgcccgagatagtggatacctgttcgttggnctcttcggcttccgtctnccggaccaagaaacttcaacttcggtgtcagggtcggactttaattggcggacggtgaaccggaaatctgtctctcaaggggcacatctcaaggggggcaaactgcgcaaaccctggtttgagacacaggggccctcacaatagaaagtagttttctcaatacacaagatgaaatatactctctagagaagacacagccacagggtcatcgactagagattctctcctcctatcgtttagcagcaaaaatcaagatattttattaaaatttctttgagactctccaa

SEQ ID NO: 643750 - DNA, 127 bp, Homo sapiens
atagcggtagcttcagtattgtacgtcggtaccgttggagcactatatgtactctcaggactacttaggacagaagtaggtacttgaatgtaacaagataagtcaacttgagttgtactatatttag

SEQ ID NO: 643751 - DNA, 795 bp, Homo sapiens
ttatgcgaggtagatacacaggatacaccatagggcatggaatatagacccttacaaacccctatgataggacataggaattgaatagaatataacataacgagtagaatagacaggggtagtatatagtataactagatatcaacagaggtaaggaggtaactataataatctaatagcaactagacaatccatactatgtaagccatacaccataccactattaatatattaacctacataacggaatgtagtaggtaaaaagaagtagctaggctactagagaagccaagatagacccataggtacaaactataccatactgcaacatgggtaacctgatggctacggaaataaccgtaaatacataggtacataaggctaagaataaccaggaaaaagaaggataagaagaaaaagaaaaagaatagcaaagggaagaaaaaaagagcgtagaacacacgagagaggaggcaaggaagagcaggggagaaagggcacgagaaacgagaggagagcagcaagcaccagaaccgcacagccgaagacggacaagaggcacagcacaggaacaggagaaagggaacaaacacagacaagagcagaatggacccgggcgatggaaggaaacaagacaagaagaagaggtgagggcaaagagacggagagcaaagcagaagaaacacacggacaagaagaccaagagaaaactgaagacagaaaaccagacaaggacgaaagaaaggcagaaagagcctaagccgaaaggaagaaagcgacaacaaaacgtagtaa

SEQ ID NO: 643752 - DNA, 356 bp, Homo sapiens
ttggtagcaagattctctgtgtacggattcatgcatgttataaatccagtatcttaattactatttgccttgggtactccatatgcctgattttaattccatgctgattaactgtcagagaaggaaaggacgggctgaggtgagagtttccaagcctggctgaccaggaagacagcaggcagactcttggagactggacctcatcgattatacagagaaaaatcccctgtaagttacaaaagaaaatagcacaaagaaaacactctggtcggcatctaccattaaagccgtctcctttccacgaaaacgtttcccaccgaaacaggacagacccaggcgtgccccctttaggcacc

SEQ ID NO: 643753 - DNA, 828 bp, Homo sapiens
ttcgtgtacaaagaagagcatccgttcgagaagcgccgatctgagggcgagaagatcctgaaagaaatacccggaccgggtgccggtgcaggggtcgaaacggctcccacaagctcggataggagacctggacaacacgaaatacctggtagacttctgatctcacagttggctcagttctacttcttgatccggaagcgaattcatctccgcagctgaggatgccttggtctaactttgtacaacaatgtcattccacccaccagctgcccataactgggtcagctgtaccaggacacacccatgcaccaacgacttcttatctcctaccttgcctacacgctgacgaacagtgtctacgcccctgatgacgctgactgcccactgacgcctggacgggggacgtctcacttctacaaagagagaaggtggccccaccttacttgaacctcatccatcacttcaagctacaaacacccaacttcccttatacacggcaccgagccactacctacaaatgatctgattggcatcatcatacatacacgaccatcatcatacagaactcggctaaaggcgctggcacatagcgcaatctataggcacccgacctcactatacatcctttaccattcacccgatacctcactggccacccagccaatgaaccacacgaccaagagcaacgatacacacaacagttgaaaccagcaacacatcatagacgacacacaccatcccaacatgcaccggcaaccgggaaatatagtccccccttaccaaggaactaggcccacaggtggctttccaagaaacgccccgaggaaa

SEQ ID NO: 643754 - DNA, 933 bp, Homo sapiens
  misc_feature (1)..(1): n is a, c, g, or t
  misc_feature (278)..(278): n is a, c, g, or t
  misc_feature (524)..(524): n is a, c, g, or t
ntgtaccaaagggtgcgagtgtgatgaaacagggtgtacgctagaccgcaggtgttatgggaagaaatttgcccgccggtgtgcgttaaaagcccgatggttcccaggcagagcgtgacaaccgccgctttcttaaagaattaagggggacacacctccgcttgtgaaagtggttgcctgcgtaacgtcagtatggtgtagtggaatgtgggcgccctgtgaagagccacccccgtgttaggctaataagcgggacaacataacacggcctctcttgnacaagggcaccaacatgtggtggtccgggggccaccacagtgggcgccagacaaaccctaccatggagcccccccacccccttgtgggacacgccacacgcatgggcggagagatccaccttcggccgccacaagtaatgtgtctgggtccctcgccccgggggaccactatatacgtggagaccccttcttcttctagacagaatagagcagttgcgaattgattataaacggagtctgtcattnctgtcaccgcggctgattatttacataaagaggcaccacgtggttaacaaaagagcgaggctccacgcgagattctgtcagagaatatacactagtggcgggtacacaccgttatgaagagtggtaacaagacaggagattgttcacaacgtgtgttgttttgcacacgaggaaatcatcatcctcgtcagctccacaatttggagcgtcagaaaaattgagtgctagcacttgtacatgcagacacttccttctgttcatggtttcttaggtgattctcttcctatcccccgctctttctgaggccagacagggagtagcatgccccacttctatctgatggcgggcgtgattatattcagtagtggctgcagtagagatgttgaatttaaaaaacagcaaacaaaac

SEQ ID NO: 643755 - DNA, 130 bp, Homo sapiens
  misc_feature (6)..(6): n is a, c, g, or t
  misc_feature (79)..(79): n is a, c, g, or t
  misc_feature (81)..(81): n is a, c, g, or t
acatanggaagcatttatttgaggtttaacatgaaatgatacaaataaaatgtgtataaacaaatccacattgcgtcantncacagtttgtaaaggacaaagctcctcaccgaaaactaattggcagcta

SEQ ID NO: 643756 - DNA, 278 bp, Homo sapiens
gagaaagttagccaggtgcggtggctcatgcctgtaatcccagaactttgggaggccgaagtgggtggatcacctcgaggtcgggagtttgagatcagcctgaccgacatggagaaacaccgtctctactaaaattacaaatcagccaggtgtggtggcacatgcctgtaatcccagttactcaggaggctgaggcaggagactcgcttgacccaggaggtggaggtgcgtgagcgagatcgatcgtgcactcagctagcaacagagcaacctccatc

SEQ ID NO: 643757 - DNA, 345 bp, Homo sapiens
tcgtctctgcaggatcccccgtgtatcgaggctacattaatttcttgaaacacagatctatcagctagtaggaggaagcgcgagaggcaggtcggctgttgccgtgtcgcacggtttctggtcctggcccttcctgctcctgaggccccttcctatcggtgccagcggacttctttctagggtggcctttcccactgtggggtggcagagcccagaagtgggggatcacacatagaaatgtgatgccagtgatttggaggggtctttcaaagtgcaggagacgtagctgagcacttgctccaggcgcctggactggatcggccaatccaggcagggcaggataga

SEQ ID NO: 643758 - DNA, 384 bp, Homo sapiens
tagaagaaaacaagtgtagaaataagagaagaataccagatacaatcatctagacatatagctatccagattatcccggcatcatattattgagcagaaaatagtttccccatcgctagtattattacaggtttatcgaagatcagataattgtaggtgtgaggtcttatttactgggtttactatactgttcctttggtctatttgtctgtttttagtagagacagggtttcaccatgttggtcgggctggtctcgggctcctgacctcttgatccgcctgccttggcctcccaaagtgatgggattacagatgtgagccaccgtgcctagccaaggatgagatttttaaagtatgtctcagttctgtgtcatggttgtatcg

SEQ ID NO: 643759 - DNA, 144 bp, Homo sapiens
cgcgcagccggtttcgtccaagggcggcgctccataccagtagtccctatacctatggccatagtcctgaataaggtctgcacacgatcttaacaagagtatttatatcttttgacatgatacaagatggttatacatttaaat

SEQ ID NO: 643760 - DNA, 440 bp, Homo sapiens
ttgtgaactttggacatactgcttccacccctgatgactgctccaagtgcatcattcctgaggtacagtgtctggaaactaagatgaggaggactttggaaagaaattttgaagacagcagcagcacatgtcataaatgcgacaaactcatggcatggccctgtatcctatccatccatccacctatcatcgatcatctatctattttagaattaggatatttgagagttgccaaaagcatgctgagaaatgtcagtctgcaaggaagagccctttctccacattttcattgtttcactaaatgataaagagctaccacttggcaattctccacttttttgtaaacctgagctcaccagtagcctgtgcttcccctctactttgcagttgtctattgaaaagtttgtatcttttcatgggcttatgagttaattagaaaa

SEQ ID NO: 643761 - DNA, 1892 bp, Homo sapiens
  misc_feature (900)..(900): n is a, c, g, or t
ggacgcgtgggtcgagccacgcgtacgctatacgtccctgcaggatgccatgtgcgagactatggagcagcagctactacctcggaaccctgactcggaccctgactagaggatggcagctcttctgctcccccatcagtgactaggtgctgcattccagcagactatccttgtgggtatgcaagcctggggaagccacatcccactggatccaaaaccctgcaccccacttactaccatacttacgaaaccccttactctatgactacccgtactctgttcatagatctgcctactgagtaccagtataactacatcttctaggacctgcaaacgagacttaacataagtagctaagcaactacaggcctcagcccctcggaaatgaccacacacacaccgaaacgatacctctcccaactacgctcatgcgaccacagagagattgttgattccacgacaggtctgactggcccttggagaggccagtggaacctaacttgagcgcaacaccagcaaccacgccattactagaccactgtgacaacgggcgctaacagcgccatgataggcgagatgcacccacacacaccgccacagactacaccatctcatggtcgacattagcgcacccactatgatacgaggcaacccagtatgtgtggttacggcgagctacgtgctaggctatacaactatccacccacatgccaccacacacacccctggcacactatcacaatccttctttcccgcagctataacagcacgatcaaatcagttccaggcaaccacaccacaaaccgcagtacatgacccaaaaggagctagattagataagattagcaaccactagaatccagtcaacctatgtgtaactccgaggttcatttccgagcnctagcaagcagccatagagggccaagggaaggcagcccacgcacactcaacacacccacatgcactactcccgctaggggaccacgttcggtgaatccaggcggtaggtcacacacaccgatgcggataccgcaaatatctcctctatgcatgcgacccagcacgctatcgatccgacatacggcggtctcatgcgtggcgcaaacaaactacaagtgccacaccgcatgtaccacactgtggctactgccgtgaattctaccacgaattaacgcaaccaagaggacaaacacactgggccgcgagatggatggttgtaccgccgcttcacatggatgcctagttaatcccctccaccaatactctcaaactgcttaccccagcaacgccgatcagcgctccccctatcgcacataaacgacagagaccttcgcgtcgcacacccatacacacaaacgagcggatagcctcatctgacagacaacatgcatcacgagggagcactagcatcacagacacgtccacccctgcatttgtccaccatgcttccctcccactcgcagacccatatcatcgcacgattgcacgccccatacacacagccacagctcccacgacgagcccaagccacgacgcgcccagcgcctctcggcgctaagctcgacccgccgctcccagcgcacgcatacacacagccgtagcagccctcgtgccgagctatcgccactcactcaccgtcgaccgtcatcacctctcctgcaccctcatcacatcaccacacaagtagcacacctccgcgcgacgactcagcacgtatcgcgttcaccctactcatcctcgctagccctgctgcgcgctcgtctctcgcacgagctcactccgaactacatccacgctgaggccacgcagtacatcacacatggcttcgtccatcgatcgcttcagctccgctccacgctcacgctgctctcgcgccctcacaagcgctaccc

SEQ ID NO: 643762 - DNA, 92 bp, Homo sapiens
ggcccttcctccccctccttgggggcttaataaattgggttggtgcccccccctcaatgaggaaataatatattggattgatgacaccagca

SEQ ID NO: 643763 - DNA, 282 bp, Homo sapiens
agcgattatcacactgcacacgcgaacgtcatactaaacgaaactggaataagccttcgaaacgaaatgtcctgaagctgtatctgatatcagcactggatgtagaacttgtgctgattttgaccttgtatagaagttaactgttccccatggtataagtataataccctgtacatatcttggagttcaacctttaatacgtgtggctaggtcacttcggggctaaggtaagacacgtgcttgtggaagacaagtctgtggtatgggtactcggcgtgtgca

SEQ ID NO: 643764 - DNA, 204 bp, Homo sapiens
tacgatatattgcttgtgagctcggtctctgggatgcttaagagacagagtctgactgatcctgttggacaggacagctctgctctcaggcggggaggccgaggggatgtagggaggccggcgcatatgatctagccagacctctatagaggcccggaaccaggctgccctgcttctcttccctgcaccattagaagttcgggt

SEQ ID NO: 643765 - DNA, 1059 bp, Homo sapiens
ggacgcgtggggttctagatcgcgagcggcgccctttgtttttttttttcccatggaggtgggcttaattaaggtgactgttgaggcaagggaggttctagggctggtggactgattggggggcaaggggtattctcctgtgctttaggaaattaagtgcatgtggccataaacggtaaagatgtgtagaagaactagcctgcagaattgacgagagagaggaaaacgagacaggtcatagacagggaccatttccctgtgggccagaaccaggatagtggggacttggggttggacagggagggatactctgtcacataggagactccaccagtggttcaccattgtgataccaggtttcccttaaggcccatctgtgcgcactcatccacagttacagtgccccaagatgccagcccgtgtaagctccctcaaactatccactgggagaaaagagggacggagagcgaggagatgagaacaggatgataccgcattttggccacttcaagatttcccttgtcccagaaattggcgtcgcatctggcttgcccgtaaatttccgcaggccaggatcaggagggtcagagaagaccgggggcagcagagcacgggggcaaacaagtggtggtgtccccataacacaccgctcatttcacatattcgtgccctactcttaacgccctcaaaattgagggttgccagatatgtggggatccgaatcctttggatgataatctcgccataaaatatccccccggggatcctgggcaccgatcctgtgaaaaaggtagaccgcggaaaatcgcagagaataacccccagaaggatagagacaagtatcggcgacaaacgtcgcctttgtgggccaagctggacccaatagggagcggccacttggtaaggccacagtgggacgaacaatcccttaaatgttgtgcgctacaagaggaacccggggagaggaagcagcctacatattaggtgaacaacagggcccacaactgtgtattggccacaaataaagttaccgcgtgacccaatgatttaaaggggaga

SEQ ID NO: 643766 - DNA, 261 bp, Homo sapiens
gatgacggcgacgcgcttggtctcaccgggttcgacgcccggggtagtgcgctcaggcttgggagggatgtcaggcgaactccaagccgcggcataactgtcgttccagccgaccaagaaccattcgtgcactgccatacccgaggagctgggcaggctgacatcctggaccgtgacgggagtattgccgttgttggtgatgatctgggtcgagatcatctcgcgtccctccgggccgggacctacgggtccgcacgttct

SEQ ID NO: 643767 - DNA, 636 bp, Homo sapiens
gcccttccctggtacctctgtcccacagccaccccctccccggcgtcggtcctcccggcccgctttctgccccccccgtagtgtgtgggttcttccttccccccctcaagatcgctctctctcccctccccaggtgtcgtttgcccctctcgcacggaccgaccatcattcggccgcgggcagcattatcttccctgggcttgggtgggctcgtggcgacccacctctttcttttttctccgcggcggtctcacgccacgcagaggctctgcccgcgcactgaggggtgagcgcccccacctggctcacctctctgggaacacaggagagcggtgaccgcctcggcggagctcacagcgccccgggcacgacaccgctggggcgtcccccgctcccgcacacgtcctctctgacagcacactagagagaagaaatccgacacggacaggcgcactgacaacagcataaaaacacggatgatgtaccacgacctcactccgaggtttttatcccggatagaaatctttttgtcaatatgagaatattctaattcatcctcgcgcaccccccttgggacaaagtctcgagcgcccatcaatacagtcttattttctgtctaaacaaatagacaaacaa

SEQ ID NO: 643768 - DNA, 252 bp, Homo sapiens
  misc_feature (228)..(228): n is a, c, g, or t
ttctctggtaattttggatttttccgaagatgcaaaagcattcctgcagggccagcacgtggaagtggcaaaagccatgttgagcgtaggtgtgcagatggcagggcgcctggctgagggcgagccggagaaggaagacggcccacggattcttcactgagtccgtttgtcggcttttttgtaagctttattcgtgcagatcggcttctcaagcctgaagaagcctcncgtcatggcggatcctgacagagt

SEQ ID NO: 643769 - DNA, 112 bp, Homo sapiens
gtcagtggtgtgatcttgctcatgcagctcacttcccaggttcaagctgatccttcatcctcagctccccaagtagctgggactgcaggaactgtaccacccacacccagct

SEQ ID NO: 643770 - DNA, 406 bp, Homo sapiens
actagtggatccaaagaattcggcacgaggtttgatttttatccacaagaattgaatctgattcagaatgcttttctcagctgacatacagagcactaaatattttaaggcaagtccatagggcttgaatctcttaaggaattctcgggcctctgtggggatttaggggaggcattataaatgccattaatcccctataggcaattctgtgccctaggattttgccagggaccagttcacttactggggaaggcactccattttaaattcagcattagtgcattgggaagggatctttactgctttgtgcttggcatgtcataatttccattgacatgagggccctctcaaaatgaatgtggggagttgctttcactacaagactctcctctttccactaaactct

SEQ ID NO: 643771 - DNA, 199 bp, Homo sapiens
cattgctacaccaatcataagattatccatgattaaaagcgaaagatatgaacagagaggaaaactaaatgacagaaataaaaattaaaagcacaatatactctatattccaatatccatgtagcactgatcccaataattacagtctgccatatacagtagtgtagacaattgaatcgggtacctgagctctgaattc

SEQ ID NO: 643772 - DNA, 302 bp, Homo sapiens
ctgccttcatgaaactcagtctttaatggaaaagactagtgaagaactgggactacaaacccatgtgagagtaagagtaaagcacatagtattattttaacagaaagctggagcagtaaattaacacttgagggtaaagggtgattctgaaacctaattctcagggcataactgagctgggtcctaaagggagacgaagaagtaatccgacaataaagagggagttgggcaggggaagtgtggtgcaaggcctaaagactgatccaggcacagccggacacacccgtaatcccaggactttg

SEQ ID NO: 643773 - DNA, 771 bp, Homo sapiens
  misc_feature (612)..(612): n is a, c, g, or t
tgccctcatttacataaatatatactagcatttaccatctcacttctaggaatactagtatatcgtcacacctcatatcctccctatatgcctagaaggaataatactatcgtgtcattatagctactctcataaccctcaaacccatccctcttagccaatatgtgtgcctatttgccatactagtcttgtgccgcctgagaagacaggggtgggcctagcccctattagtctcaatctccaacacatatgcgctagactacgtacataacctaaaactactccaagtgctaaaactaatcgtcccaacaattatattactaccactgacatgaatttccaaaaaacacataattgtgaatcaacacaaccacccacagctaattattagcatcatccctctatatttttaaccaaatcaaaacaactattagttgttcccaacttttcctccgaacctaaaaaccccctctaaatataaattacctgatcctacccctcacaatcatggaaagcaaccgcaattatccagtgaccatattcacgaaaaaactctacctctctatataaatcatatttatatcttcttcgaaacacacttatcccacttgntattatcaccgatgaggcaccgccagaagctgacgcggcatatgctatttaacctagagggtccttccctacatgcgggttacaccaaacacttgtcccaacattatacctcccgcgcagaattattcggcacctttttgtcctccccacgttgaaccc

SEQ ID NO: 643774 - DNA, 844 bp, Homo sapiens
  misc_feature (86)..(86): n is a, c, g, or t
  misc_feature (330)..(330): n is a, c, g, or t
cctctcgcggtgggttatacacccccccctccccctcccacggggtgtttctccagtcagatgctgcccccgcaccccgcgcggangggttcgcccctcgtgtgctgttcgtaagacgcaccaccagctgtggggcaaataagtgtgcaccagctagggtggttagtccacaactactcctcttgcgagcgagccgacacaacgtgaggtgggtgacacacacaaaagaagcggttgtctcctcaccgcggtggtagcatccaccgctgaaagtgagagctcatgaaatagagttcgtaaattaaggtcgctcgccatcactctctctgntagagagatagacagactataataagtctgttaatctctctctccgtgagtaggagtcaccccagccacatattcattctctatccccctcacatactatatataatcagtacgagctaagaactctctccttataaaatagagattatctgttctttctctccactacacacaggcgatataatagaataaataaatataatataagagatacaccacacatcttggatctattatgtaaaaattcatgtaataatacacaataaagcgactcacacacaagatgaggtttattaccacataggagacaaattctttcttgtattactcataatttactccgggcgcgccgctcttacaccacgtatttttaagacgtcggataatggtcacccctatctatatatcctttaatcatgtgttgaaagaaaataaaatatttcattgaaatccccacatcgatagtacctcctaataatggattaaagataaactcttccaacaatagatcaga

SEQ ID NO: 643775 - DNA, 423 bp, Homo sapiens
ctctaaggatccttttgctggagaactaccaatctgaagatatacaactctgagactgagaactacgagtgataaacgtctcactagtgaagaggagcgaagtgcactggcgggcttagttgcagaagaaatgcagtccggaaagacctgagcactcgtcagagaaaaaatgctgaggaacatgcgatcgatacaaacaagaaacagagcagctggtatcaaatctgaaggaagaaaatactttgctgaagcaagaaaaagaagccctcaatcaccgcatcgggcagcaggctaaggagatgacagaaactatggagaagaagttagtagaagaaacgaaacaactggaactcgaccttaatgatgaaaggctgagatatcagaaccttctgaatgagttcagtcgcctggaagaaagatatg

SEQ ID NO: 643776 - DNA, 158 bp, Homo sapiens
ggacaacagaaatttattgtctcaaaactctggaggccagaagtttgaaatcaaggtgccaggagggttggtgcctcttgggggctgtgagggaagggtctgttccaggcctcttcttggtctgttgatggtgctcttcccccttctgtcgtcttctc

SEQ ID NO: 643777 - DNA, 883 bp, Homo sapiens
agcggagtaccggtagctcagctccagatggaggaagatgcgaccgtgcagacgtgcattcgctgcggaacgagggatacactggtggcgctgcggcctagcaggtccggcgtcttgagatattcgcctcaggacgcgtgtgtgcatcccgccgggcagtctgcaccaaggtcgtctcaggacatccattgggatggatcataaacagacacaccgatcgcaggagtcactctgcatgttgcggcaaacaacccttgcgaagcaaaagaacgatacggtttctatcgctggtcttggcggtcgtagcgtcgagaatcgagcacattcgcacttgacttcctggtgttccagtggtcctaaccccttcttccagccccctgcagtgcctgtcacgccgagtctagcaatgcttcatgagatgggggacaggaggcgcctcctagccactggggtatcctgtcgaatggccgtatcgatcgaagcactccgtgcgaggcaagactgggtagtcgactggctccatcctacccgaggggttccatggtctcgaaaatacccttcagcccgtctatctactgggccagtggtttattgtacacctagtttaaattcgacgcgtcgagcccctgggaatcgttgttgtacgcatgaactatcgctgcgcgaaggattaacaccaccggcaaaacatcgacctggcgcttgggcttaaggtggcgcgtcaccctcgtcctcgttgcttgtgcccgaagaccccagtcgccaggatgctccccattaaagtgtacgtcatccccatggcttccctgacttgagtgcaaccgcaggcgggctgatgaggaactgggcctgcgtcccgggggtgcgggggcgaaccccagga

SEQ ID NO: 643778 - DNA, 310 bp, Homo sapiens
cgccacagcataatatggtgcttggttaaagggcagcgcaatgaaactaaagtacttatgccggagccaaaactacgtgttagacgtattaagacttcagacaaaccttatttaactttacagcctaaaaataaacagtaccaagcaatacaccgtagttagatagctgctaaaccgaatccgaaagaagatggctttggtgaaggtatttatagtggtaacagtgatggggctgaaccacagaaaattgagctatataaactaaccaataagaaagttctggaatggttagcgtaatagtttatgctgt

SEQ ID NO: 643779 - DNA, 224 bp, Homo sapiens
ctcggtaccgccgctgatgcggcgctgcgcgcggatgagaatcccgctccccggccagcgccgcttcatcgccccggcaacgcgcaaaaccgcctcattcggctgcgcctgctcgcgttcccgtcccatgatttcggcgtaatgggcaatcaacgccccgatcacatcgcacgccacttcgtagcgcacaccggcccggtcaaagagacccgccgaaggcgcgg

SEQ ID NO: 643780 - DNA, 107 bp, Homo sapiens
atttgttttttcccaggctcctttttcttttgttctgccggcccctccgtcccccttccggggagttagccccttgaattgggttccattgttacgccattttccca

SEQ ID NO: 643781 - DNA, 156 bp, Homo sapiens
cccggagagcgatagaatggacagctggtgcgcgcgatgggcttggagcataacgtggtcaaaaagcctggataacgaaaacggttatggacaggcaccagaccatcttgaagccatgggcagagcagagcaagggcaaaacgccagtgagcagtg

SEQ ID NO: 643782 - DNA, 439 bp, Homo sapiens
acatgggcactcctgtgaacagtttttcacttttgatgaaacggggaaccaagaggaacttacttgtgtaactgacaaatttttgcagaaaatcccccttcctctaaattcccttttactccactgaggagctaaatcagaactgcacactcttcccctgatgatagagaaagtgaaagtccctttagaatggtgatactgggggaccgggtagtgctggggagaaatatttttttaatgtttattcggaagaatttggagaaatgattgaaccttttccaggccttgggaaccaattggaccccatattattttccttaaaaaataattttttccaaaatggaaaggaaatgttttatgttgttcaggctaggagtatattggtttgaaatcccagggaccaaaattaaaattaaaaatttaaggaaatattggttaa

SEQ ID NO: 643783 - DNA, 1011 bp, Homo sapiens
  misc_feature (469)..(470): n is a, c, g, or t
  misc_feature (671)..(671): n is a, c, g, or t
  misc_feature (923)..(923): n is a, c, g, or t
  misc_feature (934)..(934): n is a, c, g, or t
  misc_feature (937)..(937): n is a, c, g, or t
  misc_feature (946)..(946): n is a, c, g, or t
  misc_feature (1011)..(1011): n is a, c, g, or t
tccagaagggcttcaactacacggtgtttgactgtaagtgggtgccctgcagcgccaaatttgtgaccatgggcaacttcgcacggggcaccggcgtcattcagctgtacgagatccagcacggggacctgaagctgcttcgggagattgaaaaggccaaacctattaaatgtggaacatttggtgcaatatctctgctgtaaagatgttgcaccaaatgttccacatttaataggtttggccttttcagcagagatatttagctactggagattttggtggaaaccttcatatatggaatttagaagctccagagatgccagtatattctgtaaagggccataaagaaattataaatgccatagatggcataggtggactaggaattggagaaggagcacctgaaattgtgactggcagccgagatggaactgtgaaggtgtgggacccaaggcaaaaagatgatccnnttgctaatatggaacctgtacaaggagaaaacaagagagactgttggactgtggcatttggcaatgcttataatcaagaagaacgtgttgtttgtgctggctatgacaatggggatatcaaactatttgatctcagaaatatggcattacggtgggagacaaacatcaaaaatggggtgtgtagcttggagtttgacaganaagacataagtatgaataagttagtagccacatctctggaaggaaagttccatgtttttgacgtgagaacacagcatccaaccaaaggttttgcctctgtttcagaaaaggctcataaatctactgtgtggcaggtccgacacctgccgcagaacagggagctctttctgacagctggaggcgccggcggccttcacctctggaagtatgaataccctattcagcggtcaaagaaagattctgagggaatanaaatgggagtngcngttctgtanccttctgcagatgttacgttgtcacccagccatttcaagttggattgagtcagataaaggggttn

SEQ ID NO: 643784 - DNA, 169 bp, Homo sapiens
ctagtttaacacgtgtcaaagctattacttctgtaaagtggataactcccgggtcatagtcaggtgccaaattctatgcttttagtcaaaccattccatatcagaattttccttggttaactatagatatttggcttaaagtggtagtaggtgttttttaatgtacaat

SEQ ID NO: 643785 - DNA, 285 bp, Homo sapiens
tccaaacagtgccttatgttcatattagtttccatacatcgtctgtcccagagtgaggacaagttgatctccttcccacatccaccacatgctgcgtgatggaagccagcctccccacaacttgatccttctgcagccctgcccccctcaattaaaacaatgctttcttttttcttttctttttttttgagacggactcttgctgtgtcacccaagctggactgcagtgccgcgatcttggctcaccatagattcaaatgatcctcccacctgagagacccgagt

SEQ ID NO: 643786 - DNA, 191 bp, Homo sapiens
ctgtattatattagagatccatctttttgtctaatgtgttctggatattccgaatgctcccagtatacatgagtagagttggggtgagtgagtgggccagtgtgatacaaaggaagcagctgtcttatatcactttggattgcactttcatggtttgtttctatctgttggggttgggtggaaagggatat

SEQ ID NO: 643787 - DNA, 640 bp, Homo sapiens
ttgccccaaaacaaaaaaaaaggggggcgggttatgcatgttttttagcgcaagtacgcccttgggtaaaagggaaggcgggggtttaaagcctttagttgaaaaggcagtcttggatgggacccacttcgaacacggttatatgggtgggatggaatcgtgggaattcagcattctcaactctgttaatcagggaggatttcagagactgaacggccacacaggcagtgggtgtacgtgggacccaaatcagtggggcggtctctaatagctatagattacaaagaatccacccagcaagccaatgtgggcaacacgttcacggggtttgtttaagccttgaaggggcccttgtagaacccacggttggggtttcctatgtgccccatgttagcccggcagccagggtaatctttttttgggcggttcctagcatagttggcatgttctgtgcccacggccgtgaattcaatctgtgggtcaagagggtaacaaagatcgtgaggatggatttaacccacaaggcaatcagagactgttcgggaactccactcaggggccaagtggtaaaaatggtttatgtccctgtctttgaaattcaaaaaaggagaatcgggggaagatattccctggggcggaa

SEQ ID NO: 643788 - DNA, 335 bp, Homo sapiens
  misc_feature (15)..(15): n is a, c, g, or t
  misc_feature (67)..(67): n is a, c, g, or t
  misc_feature (191)..(191): n is a, c, g, or t
aaatttatttatttngagacagactcttgctctgttgcccaggctggagtgcagtgacatgatctcngctcactgcaacctccacctctcgggttcaagcgattctcctgtctcagccttccgagtagctgggattacaggtgtctgccaccatgcccagccaatgtatttttagtagagatggcgtttcnccatgttggtcaggctgatcttgaactcctgacctcaagcagtccgcctgccttggcctcccaaagtgctgggattacaggtgtgagccaccatggctggccaaagatattatttttaataaaagcaaaacttttttaaaaact

SEQ ID NO: 643789 - DNA, 898 bp, Homo sapiens
gtcgccgtcaccatcaccgcatagatacactctcatcctacgggccatgcactgggccttgctgcaggaagcttcggccccgacagactcgtgttgctggggtgctcaggtttctttacctccagcaaccgaagaatatgggccccttgaattctggaacgttccgattgaagagtctgaaagttagggacttaatttcaaattttggacagtggcgtagtcgaggcgcaacaagagccaacggcccaaatactggcaaataaaaatatgccagttcaaactagtacttctgggagagtccgctgtctggcaaactcaacgcctagtgcttcgtctgtgaaccggccaattccatgaacttccaagagagtaccattggggctgcttttgctaaacccaaactgtattgtcttgatgacacctacagtcacgaccgtctgcaactagtgggatacagcgtggtcaagaacgattaccatagcctaggcaccaatgtactacagaggagcacaaagcagccatagttgtctatgatatcaccaaatgagggagtccttgtgcaacgcagcacaaaaattgggttaaagaacttcagaggcagcaagtcctaacatgtaatagctttatcgggacaccaggcgacctagccagattaacagaggcagtcggattctcagggacgcacagtcctttgccgatgacactagttattattcctcgggacatcggtagacctcctgactgttctgcaatcttctgccattgtaaaattgcccgatgccccaatcccgggcaatttggcccggcacggttaaccttctgggcccaacccccggatctgggtcgacacccttggtcccggaaagctctgtctccaagtgacccggggggcacaccc

SEQ ID NO: 643790 - DNA, 772 bp, Homo sapiens
  misc_feature (367)..(367): n is a, c, g, or t
  misc_feature (407)..(407): n is a, c, g, or t
gtgggcagttgtactatccagcccgccatcactggactctctcccctatatgtaacctcctaataaaaccccatgtctatctgttggctctgagtgtcttcttcagctcttgaacctggtgcctttcctattgaggttaataggggttcagcatgacagcacctccacctcccatggcacagcatatgtacccaataagcagtccttacaataccaatagtttctatctgttggcactgccaattagccaggcatgtcaaatggaagatctcacttaatcttgccaaaaaaaaatgtttgttcgttgttgttccttctattacagaggaaaaaccaaaggcagatggaggttacattatttgcctanagttacacagctagaaaggagcagagttaagaatcaaacnccggccatccagctccagaaccgagcttgtgaccctggcatgggtatttccggagctctcatttaatatccatacagccccctaaattggagattactactgttacacaaatgaggaaactgatcttggagagggccagtcagctgccaaggtcacagagccagggagtgggggtggcttgcccaaggccaggtctgtccctccaggtgaaggtaatgattaagaacacaggtctggagtgggtttgaatcactgtgtgttcagccgctcactggggacctggcctcagccctctgattactgcagggctttattactttctgagttctctttgctatctcactcgccctttcctcccatttctc

SEQ ID NO: 643791 - DNA, 107 bp, Homo sapiens
  misc_feature (83)..(83): n is a, c, g, or t
gtggaccctactacatgatcacataaagtcgagtcttcaaatccaattctaaagtgaaacattgcatgatttgaatgtacacngcatgattaatagtatcagtgaaa

SEQ ID NO: 643792 - DNA, 833 bp, Homo sapiens
  misc_feature (389)..(390): n is a, c, g, or t
  misc_feature (404)..(404): n is a, c, g, or t
  misc_feature (421)..(421): n is a, c, g, or t
  misc_feature (425)..(425): n is a, c, g, or t
agcggagtctgggcatgtgggtcctgcctgtgacgcgcggcggcggtcggtcctgcctgtaactggctgatcggcggctgctgctccagacacctgcggcgtgcggctggtgaccccgttggctgggcgcggacgatgtggcccctggtagctggctgctgtttgcttggtgctcgtgctgtgcttgcggatcagctcagctactatttaataaaacaaaatctgtagaattcacgttcttgtaagtgacactgtcgtcattccatgctttgttactaatatggaggcacaaaacactactgaagtatacgtaaagtggaaatttaaaggaagagatatttacacctttgatggagctctaaacaagtccactgtccccactgactttnntagtgcaaaattgnagtctcacaattataanaggngatgcctctttgacgatggataagagtgatgctgtctcacacacaggaaactacacttgtgaagtaccagaattaacccagagacaggtgacaccgatcatcgagctaaaatatcgtgttgtccatggttttctccaaatgacaatattcttatcgtattttcccaatttttgctatactcctgttctgcgggacagttttggtattacaacacttacactatagatccggtggtatggcttgcgacacacaattgctttcccttgttgctggactagttgatcactgttcattggccatttgctggaaggccattcttttccgtcccagggtgaaatcttccattcaacgaattgctacctggccctgggttcaacttcgtcacttcctaaccagggatattcatat

SEQ ID NO: 643793 - DNA, 1088 bp, Homo sapiens
gtacatcccgcgcttctggaccttcgaaacaggctgcaccgtgtgtgacgaaggcttgcgcagcctcaagggcattggggatgaagctctgcccacggtcctggtcggctgtgttcatcgaacagcccactgccgttagtagtccctgttcttccagctggctcctgctggtccactacccccagaaacacatgcgacttttcatccacaaccacgatgcagcgaccacaaggctcaggtggacgacgttcctgtgcacagcaatgttccgcgacctaccagctctgtgaacgctgctgggccctgcaggtgcggatgcgcgaatgcagactgccaggaaccatggtgcgcacgacctgtgccggcacggaccgcagctgcacctactaccttcagctgtgcgactgctgacgtggccctgaccgagcccaacagacatgcggcctgctgcatccaacagcaacaagaatgtcattgccccgctgcatgacccgccctgggaggctgtggtcgaacttctgcccgcgctctcagctgcacatgtgctactatgcccagtccagaggacataccgtggaacctttgtcgcagggcgcgcacgatgttgggctgtcctggcacatgtgccctaatctttcaacacaatctacgttggaatcactggcgcatgtgcccttgctgtggctgacgcttgccagaccgtcagcaaccgctcttacccacaccacaacgcaaccctcggcacacccagaaccatggcgcatcccaggtgccaacaaaatccaggccagcaggcacgtgcgccaccgtcacctgaagcaaccggggagcacccgatggcgcatcatggacacccgtagaacaggcaacgcacacaaccaaccggcacaaaccgacccacggcaaaagggagacaaacaaccccccagggacgggccacccagaacaacacaccacagaaacccacgccacggccctgccacgcagcacaggcgccactcccggcccggaggcacccgggccacgatcataacggcggacgcgcaccaccgcagcgaccacgcacacagtccagcgacctgcgcacc

SEQ ID NO: 643794 - DNA, 1237 bp, Homo sapiens
  misc_feature (791)..(791): n is a, c, g, or t
gctggctcataattcacctggtgcaacgcttcaacgcccaccaaggaggacaccaacggtggcgtacacctttgactgctgtgcgtccgcaatgccagtatcttcacccctgcgagcgacgcacctgtgcgctgaggtttgtgtgctgctgtgttggtcccggatttcccgctcgatggtctctaactcgccggatagacaggcgttgatctttgacggggctcgcagggtgacggccaggcccctcctctcatccatgacgctatcactagccttggcagctaggcctacttggaacgccagactccccgggcttgggggctcgaactacagtcgacttcgtcgactcaagggctcggggagcccatcgtaccgtcatcagttcccttgggggagttgagcgccgctgtctgtccgccaaccgtccgctgcgggttcctcgttgcagctggcgcttgtgctgagaagcccagcgttgcccttgagcgttggtgctcgagtccgtggcacgcggcatttgcgctgcgttgtgcctcagcggtggttggccctcgccctgagagctacgggatgccagagagatagttggcttggggccctcgagcctgagaccatccgttggggacattcgtggagtcgttgtagggtgtatccagccttcgggcccacaccatagcggtccgacctatggcgtttgcggctttcctgttggaggcgggccgtcacattgccggactcccgtcgcatggggtcgtcaagcgtcgaagccgtccctcgacggagccctagcntggccaaagttcggcccggctcttgcgttgcgacccatcgttagctattggacggaagatttggcgagttaagcctaggggccgcgtccttggggtgagagcctccgaggcattagagacccatacgggaatcgcaaaaagcaccgggccgttccgaggggttgtgaagcttgcagaaccaaaagcttggttgcgcatgagtagcatcaagttgcgtcccttcccgaggaggaaaaactttcgcatgggaggggacaggattggctttccctaccccaagaacgggggacacgccggggaaaaaggggaggtcccggtcggttggctttggggagagacaaggggatcgcttttgaggagccttccggggaaatgcgccccaatgttttgccacccgtgattaggtgggcttgtgcgaaattgtttctgtccaggaatgagaaacg

SEQ ID NO: 643795 - DNA, 113 bp, Homo sapiens
  misc_feature (69)..(69): n is a, c, g, or t
aatttaaatccactttttattctttcacagattttaacaattatacacaacttttaacataaaggtagngaatttctattgataaggttgcaatatatatggcctcttctatt

SEQ ID NO: 643796 - DNA, 347 bp, Homo sapiens
cacccgcgtccatccccctttgtaggcagagaaaaatgggtattctcagcatgtggttaaaattagagggttaaaatatactatactgtgtgtgtaccctacacatatgggaaggtgtgggatatgtgcgaaaacctgggagataatgacaataatcctctgacatgttaagggtactaacatttcacgtgccagaaccaccaaaagctgttagacaaaaagccctggcttcctatgtcagagggaaccccgagagggaaatttcaacttccgggaacctggagtttgagcccaacactttcaaagctgcagtggctcacccgaggttagcccccctgagtgccagg

SEQ ID NO: 643797 - DNA, 115 bp, Homo sapiens
caggatgtggtggtccacgcctgtagtcccagctacttgggaggctgaggcgggaagatcacttgagcctgggaagtgaagacttcagtggagtcttgatcacaccacttgcact

SEQ ID NO: 643798 - DNA, 176 bp, Homo sapiens
  misc_feature (13)..(13): n is a, c, g, or t
  misc_feature (22)..(22): n is a, c, g, or t
  misc_feature (71)..(71): n is a, c, g, or t
  misc_feature (89)..(89): n is a, c, g, or t
  misc_feature (97)..(97): n is a, c, g, or t
  misc_feature (100)..(100): n is a, c, g, or t
  misc_feature (105)..(105): n is a, c, g, or t
gccagcgccgacncccagagantacagtacttaggggttacacacaacagccgtaactggcggctatctgntcataacaaacaaaccanagcatatntanaccgnatcacatcgagtgattatagaaatccatacacacaccgattgcataaaatctttttttaggaaaaaaacac

SEQ ID NO: 643799 - DNA, 386 bp, Homo sapiens
  misc_feature (386)..(386): n is a, c, g, or t
ccgagtgcactgaatatggcggatgctgtcagacggctgctccgagcgtcggatgcaccgacatgatgagcgccagttcttgcagcattgctgccactgaagccctcagacctgctgcatgtgaacgaacgagcttgacagatctattgagctctgggtacaatcaagcactattattcagcaccagttgcttatgccatgcacctgctgacacccacaatgcaccctattttaaggagactagcgctgtcaatggagagttcaaagacctatgccgtgatgaccttagggggaaatattcgatgcttgtcttctatcctttgaaatgccctttgagaggcctacacttggagatattagtgactgaggtcgattaccacgcgccn

SEQ ID NO: 643800 - DNA, 483 bp, Homo sapiens
  misc_feature (8)..(8): n is a, c, g, or t
  misc_feature (19)..(19): n is a, c, g, or t
  misc_feature (21)..(22): n is a, c, g, or t
  misc_feature (45)..(45): n is a, c, g, or t
  misc_feature (50)..(50): n is a, c, g, or t
  misc_feature (54)..(54): n is a, c, g, or t
  misc_feature (58)..(58): n is a, c, g, or t
  misc_feature (88)..(88): n is a, c, g, or t
  misc_feature (166)..(166): n is a, c, g, or t
  misc_feature (181)..(181): n is a, c, g, or t
  misc_feature (203)..(203): n is a, c, g, or t
  misc_feature (216)..(216): n is a, c, g, or t
cacgaggnctcgtgccggnannttcatgatagtgaactgccgtgncggcnagancaanattctgcaccagcaggctcagtatcacaangaccgcgagcgccgctttcagtggccacgccaggataggaacggagcgcatagcagttctcattttaatgcatccggntcctcggggcttganctgcatcaaacctctgtctganttccaccattgantgcgccaaccggcggctgaatgccccgccggtgcaactccatcggttggaacatctctgcggcccatgagtttcactttacactttgcggtcaggccgctcttgatctacatcaaagggatcgcggatcgataacgggggaaagccatcggcctgctgccgccggccttcgggatagaaggctactcgatgtcgtgcgcccaccacgggccgaagcgcttgagctgctccttttgttccttggggaggactccttcgagcttgtcgt

SEQ ID NO: 643801 - DNA, 95 bp, Homo sapiens
gttaggttccgctgttgctgctcgtgttggatctaggaccgtaggcaggcatggggctgggggcggacaaagatgcttacccgatcccgagagtc

SEQ ID NO: 643802 - DNA, 826 bp, Homo sapiens
tacccgggtttcattaaaatctttcccgatattaccagcgaggaaaacaaaagcaatctccccacagcccacccccaaaattgtgacaaccaaattaatcactttggcaccaaaattgggataatacgaggggtggctggccacagatttttagggaacatgataaagtcttcctcccttctggcagagagctgatatggagaccatcttcgccagggggatcctagtggggcaatggaatgagccctgccctgaccacggtcccacgccgggtatgtccggtcacgcggctaactggacctgggcggggtctaagggaaagtcaacttccaggaagaaccgacacggggcactcttagaggccagtcattctccgttcttgaaaggtgtgtgtgtaaaattatagcatgtgtctatatgccacatgccagtggatacctgcaggtgaatactgcgtggcgtaaagctacatataacacaaatgagctcatatacatctccggagccacacaggcacgagtcacaggaggcgtgggcggaacacctactggccaaacgcgggaagcaccatcgacgcccctggacatcaggaacgggctaaaacacccacgctcgccaaaccaagaaagaaacaaaaaaaaccaatgtcagcagcaccagcgaaaaacctgcaactcccagagggcacgaggaccggaccaacaattccaacgccgcataactcccactaaacaacaggacacacagtcagcccagagacaaaacaccatcgaaccaggcacaactgacagacccacaacagcgaccaaccaccgcagaggcacac

SEQ ID NO: 643803 - DNA, 390 bp, Homo sapiens
  misc_feature (214)..(214): n is a, c, g, or t
  misc_feature (217)..(217): n is a, c, g, or t
  misc_feature (313)..(313): n is a, c, g, or t
cttttacccctggcacacgggccgcgactaccagcaactgtgcagccaacaggacctggccattctgccctgggtgcgggagttcaacaagtttgacctttacaccaagtgcccggacctgccggacgtggacaaacttcggccctactaccagggggtcatttacaagtactgccctggcatcctgaggtggtgaccctcctgccacccaaantgntgctggacctaggcctggccctccgcctgcctggaaaggcctggccctgggcaaacaaccgccatcagggtttacctcggtgggggacccccctcncccccttagggttgccccccctcccggcaacttgtgcctggggtcaataaaaacctggaaggatgttgtgcttttta

SEQ ID NO: 643804 - DNA, 455 bp, Homo sapiens
  misc_feature (329)..(329): n is a, c, g, or t
cccatactgcacggaatgatttattccaggaaaaagatggcacaaaaccaagaaaaggaatacatagaatagatgaaataggagatctaatataggagaaaggtaaagggaaatattctgggatagaaagggtatcctaggagtacagggccactggttgatataggagcaaatcaggtactccaggagaattttcttcctgaagatgaaattgatgggaataaacatcttgaaaggagatgtggacaaatggcagtaaatctgaggttaaattacattaagtacaaagaaaactaaggaacaacaataacaaaaacttattaatctgngaaaaacagaaagactcaggaaaataaaagtaacatgtctctaacgctctagtagcatttgtagtcataaaaaatgtaactctgaatcgatttaaccaaaattaaaattaaattacatcaagaaaa

SEQ ID NO: 643805 - DNA, 363 bp, Homo sapiens
tacaggatctttatgcctgaagagtattgggctgtgatagtatgttgagtctgtagtaggagagtgatatttgatcaggagaacgtgttactagcaagagagtctccagtaggtaatagtgggggtaggcgaggtagcgaggttgtagaagtcatcaaaaagctattagtggagtagagtttgaggtcttgagagaggattatgatgcgaactgtaagtggttcggtagtttgggttttgctaggcagaatagtaattgaggatgtaggcccgtggggcgattattgataaatgacttgtcctgtgttgaagcttcaggggggttttggagtgagaaattggcttgttaactctctctgggca

SEQ ID NO: 643806 - DNA, 464 bp, Homo sapiens
  misc_feature (12)..(12): n is a, c, g, or t
  misc_feature (43)..(43): n is a, c, g, or t
ttccctgttatncaaacttcaggaacctcatggatgattgttnagcagtccttgaaaattgaaaagttagccctctgtctctctaaaccagtaaacatatcttaccaaattaaaatgacttttaggctgggtgcagtggctcacacctgtaatcccagcactttgggagggcaaggcgagcggatcatgaggtcagaagatctagaacagcctggtcaacatggtgaaaccccgtctctactaaaaatacaaaaattagccaggcttagtggcgggcatctgtagtcccagctactcaggaggctgaggcaggagaatcacttgaaccctggaggtggaggttgcagtgagccgagatcatgccactgcactgcactccagcctgggtgacaaagcaagactgtgtctcaaaataaataaataaaataaaataaaatgacgtacagagattctatattctaaaa

SEQ ID NO: 643807 - DNA, 186 bp, Homo sapiens
atctgtcttctgctgctgctcatctcctcctgaagggttgtgtggcttcttgggactctggcccgcccctgccgggcacgaggacacacggcaacagctactgtagtcactgcagctatgcaggctctgtgctagccctgggcaggcctggacgttcaggtctgctgtgccgggggtaggccccag

SEQ ID NO: 643808 - DNA, 305 bp, Homo sapiens
tagagaggtttgactaaatttgggtcaatatttttggcaaaaatacttcatagaggccaggtgcgctggctcatgtctgtaatcccagcactttgagaggctgaggcagatggattgctagagcccaggagttcaagaccagcctggacaatttggcaaaaccctgtctctattttaaaaaaagaaaaaaaaatgctgggtttggtggcctgcgcctgtagtcccagctacttgggaggttgagacaggaggatggcttgagccagagaggtggaggctgcagtgagccgacatcctgctgctgt

SEQ ID NO: 643809 - DNA, 1085 bp, Homo sapiens
atctccctgtgacgaactcatcaggaagcgcggggcggtggggatagtgacggcttaatgcctagaccgggagttggcaggtgtccgatctctgagttgggatccgagcaaggccttctcagccagtcaatacgcgacagacgaccttccaggcagcagatttgattgccctgtgtgcgaagatttgggctctcagcatgcccgtgctcaaactggggagtcaatgtgatgccctgggagggaagctttagtgcgagagaagatgccctgatttcagaatcacaaggtgcaaagttgcagggatgcccatgagcagcatgtatgagagctctctgccaatgcagccagtaccagctggtggcccacagaaggcccctgccatggtttgcttgattgcccggtgtgaagaatggatcagctatgacagagcgcagttccaccttgcgtgcctttcgataaagcccagccgatatggggacaatgtgaccgccgtggctctgaaagctacagcaaagaccagtccaggttaccacgagcagaacagccatggcacgcacttgatcggccatccttgccggaagtggcgaactcaatgtaggtcaataaaccaccagggccaaaccagaactttatatgaccctggcatgaccgattgatgactggcactacgccttcctgatactactacacccaggatagaaggtaggggcgggccatcaggtgcgggcatttcctcgcaccacaaatgagcatggcgctaacgcgagctcccacaggggtacccaatgtaccaaaggagacctatcacatcataaccaaacgatgcgctcccgaacatgcatgcgtacaccagcatcatgaagggtacaccgatgcgtaataatcagcgacagaaagaaggttttgactgaccatggttcccggaacaccggttgtgtaaccacgcgggaaaatcgtccgcgctaataggtgtgcacctttccgtagcccagtttactagcacccactgttaaagacacacaaaatgaaaggaggtagaatagttctcacctacaggatctatctcggtggacatgatagagaca

SEQ ID NO: 643810 - DNA, 617 bp, Homo sapiens
aaagggaaaggagcaagccaggaagccagacaacaacagcatcaaaacaaggctgtttctgtgtgtgaggaactttgcctgggagataaaattagacctagagctttctgacagggagtctgaagcgtgggacatggaccgttcactgggatggcaagggaattctgtccctgaggacaggactgaagctgggatcaagcgtttcctggaggacaacaacgatgaatgaaaacctaaccaggtcctgaaaggattcttaaggaatgccaacttgcaaccaacaaaaggttaaaacttgggattcaaggcccaaattcccgaagccaaggcccaaggcccgggacctttatgatgatgacctgaagttagcccttttaagccaatctgccaggccccgaagcccatggggcaagctagatccctatgattcctctgaggatgacatggagtatgtgggctttgcaaccttccccaaccaagtccaccgaaagtccgtgaagagaggctttgactttaccctcatggtgccagggagagtctgccctgggcatatccacacttgtcaatagcctcttccttactgatctgtaccgggacccggaaacttttttggtgct

SEQ ID NO: 643811 - DNA, 120 bp, Homo sapiens
gaaggcagcaggcataccacaaccacgaagagccagtcaaggacgatgagctcagcgtaggcctcatggttccccgggaggtcggggctgagaccacggagcagtaatacacaccacggt

SEQ ID NO: 643812 - DNA, 772 bp, Homo sapiens
ttccacgcccaaaaacgaaatctcccgtgtctccgcagggcgttcgatccctagagggaggagcctgtccaaacggacgctaacggcctacctccccctcaggaatgacatactataccaaagacactgtgtcgcacaaggatttggcattttgggaggggcccattaacgtccgtactccaccaacacccacagggaaaaattttcccagatttcgattaactttaccattacaccaagggaacttggaggcacattttccgccatacgtgctaagaccgctgccagtgcacaaggacttttggggcaaacccggggggattaacaaaaagcaatgatcgtcccgcgtcccaaagaccagaggagcagcgctaagcctgccgaaaacagggatttttgccccgaagacagccaagtacgccccaagctcgaagccggaacgctgagtcagatttgcccggaattttagatatcccccagagggaagaggagggggaagcccccccaccatttgagggacatggactaggtggcattccacacaccaccgaatgttgatgagattcccccgacaggggacacaatattgaggagacgagcgcgcgagggaagggggggatttatcacaaccgacccagacacaagttattcccctgaggagaaggcgggtgcacagggaaacacccacagcccacacccgagtttttgtgggacacaaaagagcgcccaaagaacacaacagggaacgaccagccacgtgcgagaatacatc

SEQ ID NO: 643813 - DNA, 225 bp, Homo sapiens
cagcatgcccccccccacggaaagaggaagaccgccagaaaacagaaaatgttccaacgcgcgcaagagctgcggcggcgagcagaggactaccacaaaggcaaaacccccccttcggcaagaaaggctctgggcaacggggccaaaagggcggcagcggagcaccgtcatccctcaggagggccctacgggccctacctcacagcggaaactttaaaaaacagg

SEQ ID NO: 643814 - DNA, 398 bp, Homo sapiens
  misc_feature (31)..(31): n is a, c, g, or t
  misc_feature (35)..(35): n is a, c, g, or t
  misc_feature (51)..(51): n is a, c, g, or t
  misc_feature (68)..(68): n is a, c, g, or t
  misc_feature (102)..(102): n is a, c, g, or t
  misc_feature (123)..(123): n is a, c, g, or t
  misc_feature (155)..(155): n is a, c, g, or t
  misc_feature (157)..(157): n is a, c, g, or t
  misc_feature (177)..(177): n is a, c, g, or t
  misc_feature (185)..(185): n is a, c, g, or t
  misc_feature (218)..(219): n is a, c, g, or t
  misc_feature (238)..(238): n is a, c, g, or t
  misc_feature (246)..(246): n is a, c, g, or t
  misc_feature (255)..(255): n is a, c, g, or t
  misc_feature (258)..(258): n is a, c, g, or t
  misc_feature (277)..(277): n is a, c, g, or t
  misc_feature (281)..(281): n is a, c, g, or t
  misc_feature (284)..(284): n is a, c, g, or t
  misc_feature (287)..(287): n is a, c, g, or t
  misc_feature (289)..(289): n is a, c, g, or t
  misc_feature (295)..(295): n is a, c, g, or t
  misc_feature (301)..(301): n is a, c, g, or t
  misc_feature (307)..(307): n is a, c, g, or t
  misc_feature (332)..(332): n is a, c, g, or t
  misc_feature (334)..(334): n is a, c, g, or t
  misc_feature (341)..(341): n is a, c, g, or t
  misc_feature (343)..(343): n is a, c, g, or t
  misc_feature (359)..(359): n is a, c, g, or t
  misc_feature (372)..(372): n is a, c, g, or t
  misc_feature (374)..(374): n is a, c, g, or t
  misc_feature (380)..(380): n is a, c, g, or t
  misc_feature (397)..(397): n is a, c, g, or t
tctattggtttgtttttttcgcaggggttgnactnggcggggaggtgggcngctagtggtcaccagcnggtagtggtttaggagcttgaagttgttcgggtncatccgaagcttgtgtgcgtncaggttgttcagggtggacagcgcgttgggcntntcgtccacgtgcgctacggngttggtcngcgctttggtcacctttttgccgtggtccttannctgggtagagccgtggttnaggtcgangtgcgggangtnggttttggtggtggggaangatnggnatntncttttnagggcntccgcnccatactcgccagcgtgcgcgccgncnttatccnangtgggtttgaggtttnttttgttgggagnanatagtnccatggtgggttctttnt

SEQ ID NO: 643815 - DNA, 628 bp, Homo sapiens
  misc_feature (56)..(56): n is a, c, g, or t
  misc_feature (66)..(66): n is a, c, g, or t
  misc_feature (81)..(81): n is a, c, g, or t
  misc_feature (143)..(143): n is a, c, g, or t
  misc_feature (628)..(628): n is a, c, g, or t
cgtgtgtcagccgatggcaccgggtggtcagtgagggacacactttggagaactgntgctaccagngtaagagtgcggggntatgcaggctcctgggtgtccatctgcacctgctctgggctcagaggcttggtggtcctgancccagagagaagctatatcctggagcagcggcctggggaccttcaggggtcctcccattatttcgcgaatccaagatctccacctgtgcagggcacacctgtgtccctgtagcgtggggggaatctgtgtcacactcagacagccaccagagacaccccctgggacagcgccacattctgccggaggcgggatgttggtaaccgagacccagactgtgggagttggtgatatgtggggtgatccactcggatgcccagaaattaccgggactttccagcacctggtaaaacggacactggaagttgggcctctttgcttggacacatctcttcccgggccccttgaattgtgaccgaagttggccactaagttggggcgcttggaaaggcgcttggaaccccaagccgttgaaccttggttgggagagtcaaagcgccaaaaaaccaaaggcttgttcaaacccttccgaaaaaaactttttctn

SEQ ID NO: 643816 - DNA, 448 bp, Homo sapiens
aacgttcgacagagctctaattctagcaaccaacgcagtgccaagagaaaacacagaggactgtgttaatacgcaccttgggaaatgcaatcagcaaagttcaaacgagggaagttatggaacaaacaagcggctttggtcaacaaataaactgcagtatttaggccgggcgcagtggctcatgtctgtaatcccagcactttgggaggccgaggcaggaggatcacttgaggtcaggagtttgagaccagcctggggaacatggtgaaatcccatctctactaaaaatagaaaagattagccaggtgtggtggcacgcacctataatcccagctactcaggaggctgaggcaggagagtcgcttgaaccaggaggtggaggttgcagcgagctgagattgtgccactgcactgcagcctgggcaacagagtgagactccatctcaag

SEQ ID NO: 643817 - DNA, 149 bp, Homo sapiens
aacgggtgcggttcttgacgttactttttttgtttgtgtgtttttttgtttttcggtttttgttttcagacagcgcctcactctgtcgcccaggctggagtgcagtggtgcgatcttggctcactgcaaccgcatcacccgttcgggta

SEQ ID NO: 643818 - DNA, 260 bp, Homo sapiens
  misc_feature (56)..(56): n is a, c, g, or t
  misc_feature (66)..(66): n is a, c, g, or t
  misc_feature (81)..(81): n is a, c, g, or t
  misc_feature (143)..(143): n is a, c, g, or t
cgtgtgtcagccgatggcaccgggtggtcagtgagggacacactttggagaactgntgctaccagngtaagagtgcggggntatgcaggctcctgggtgtccatctgcacctgctctgggctcagaggcttggtggtcctgancccagagagaagctatacccggggagggggaggcagacagattactagaccccaggagtttgagaccagcctgggcaacacggtgagatcccgtctctgctaaaaatacaaaattag

SEQ ID NO: 643819 - DNA, 734 bp, Homo sapiens
  misc_feature (724)..(724): n is a, c, g, or t
  misc_feature (727)..(727): n is a, c, g, or t
ttttttttactttacattctttttaataaaacaaacttgtgccacagctccaatatatgacccgcatgtcagtctttccgcaggggaacagtttcctccctgatgccctctttggtcacgatgcagatcctgagagcatctccagtatacacatccctctcggctgcagaaatgaagacatctttcaccagcctcatggctctgtccagcgtcagggggacgtgctctacattctgcatatttttgaagccaacctggttgtcgagcagaggctgcagcatggcacttgctgagcctcccgccttgaaagagtctctctgggtaagagcccactgggtcaaagctgtacacagctccctttccttcttcatcaagtcctccaatgatgttgtaaacatagtaagggaagaagcgccgtgagtacaggatggtagacagcattgcagcaatcgcccccgttgtcatggccttgttattggaatgcttgtacatctttaatcttgcttcaataatctttgtcaaagtgagacaatctccatggaaaccactgcagccaattactgtcttgtctgtcagtttgtagcatttggggctatctcgggtatgaattgaaaatccttcactcaatcgagtgtctgaagcgacgatggaaaaatcttctccagcaattgccaatacagtacctccgttgaaggcataaggcgaaaaccgcagctgcacaggngcncggagcc

SEQ ID NO: 643820 - DNA, 183 bp, Homo sapiens
  misc_feature (57)..(57): n is a, c, g, or t
  misc_feature (60)..(60): n is a, c, g, or t
aagctaaaagctcttattttttttaaggttttaacccgcttaggtctatttggatgnaanggtccacattcctttcatccacatacctgtgtatatttaaagacccaattgctcctctggagcttgtactttcaagaatgattaatctgtgtaataaactggttactccagtccttccatata

SEQ ID NO: 643821 - DNA, 151 bp, Homo sapiens
ggtaaatttaagagtgtaggcacggatcaatatgtcacgagacactcttttggcgtaggtggagaggagacctgaccttgtgtgatttcccactaggttccaggcactgtgtcacataggcacacacgctaacatattaagagagaatgga

SEQ ID NO: 643822 - DNA, 652 bp, Homo sapiens
  misc_feature (22)..(22): n is a, c, g, or t
  misc_feature (287)..(287): n is a, c, g, or t
  misc_feature (380)..(380): n is a, c, g, or t
  misc_feature (382)..(382): n is a, c, g, or t
  misc_feature (396)..(396): n is a, c, g, or t
  misc_feature (417)..(417): n is a, c, g, or t
  misc_feature (424)..(424): n is a, c, g, or t
  misc_feature (431)..(431): n is a, c, g, or t
  misc_feature (433)..(434): n is a, c, g, or t
  misc_feature (452)..(452): n is a, c, g, or t
  misc_feature (463)..(463): n is a, c, g, or t
  misc_feature (465)..(466): n is a, c, g, or t
  misc_feature (475)..(475): n is a, c, g, or t
  misc_feature (481)..(481): n is a, c, g, or t
  misc_feature (527)..(527): n is a, c, g, or t
  misc_feature (582)..(582): n is a, c, g, or t
  misc_feature (586)..(586): n is a, c, g, or t
  misc_feature (591)..(591): n is a, c, g, or t
  misc_feature (651)..(651): n is a, c, g, or t
acaatatttacatacaattagntggttttgacagtgttacttttgagtagaccttaaatgaatccacaaagttaatatattaaaaataaaatatacacagtaaaacaacaggcatccagatgttcagaatcatgcagataggagtggtttggttggtgttatcactgggtaccttgcctatttaactcgccagcaaataccacttcttctgtttctcattcccatataattcatcaaaatcagagagttctaaacatatacaaaataaacctcttttaaagccacantcagtaaaaaatttcaattaataaggttatcatcaaaccaagaattccactgatcatttgatcagcccattactaggaaacaggcaatatcancncccgatctaaaggnaagcctatttcatttattaanacaccantaatgananntttaatcatatcaaatgnatactattaanannatgttattntttatntaatgacacttgagagaaaagtaaaaataatacataaatatctatntcttactgagctcaggatattatactcatggacttacagatacatgagtttctanctgncaaanaagtgctttaaatattttttctaggaaaaaataaaaaataacacaaatattattagaagnt

SEQ ID NO: 643823 - DNA, 1282 bp, Homo sapiens
caagcctccgagagcgcacgtcggcagtcggctccctcgttgaccgcaatcaccgcacctctctcccccagctgtcatttcccaacaatgtctgctattctcacaccaagctgcacgctggacaagcttggcacgttcaacagggcacagctgggtctgttcatgcagcagtcgactatcaatgtttcctcatgaagaacaaccagataacaaacaaccagaggattaaggctgctgtcccaagcatcaaattctgacttggacaatggagccacagtcggtagtccttatagagccaccataggccggcctgatggtgtgcccatgcctgacaagatactacctataaagaccagttgctagtaagaactacaaatctactagctgaggcacgggatgttactagttcttgaagtgactagtagtcagagcccagaaagttggagaaatgccatgatgccaaaacacagaatgactgaggatctgatcatcacatgaatgagagaatacatccgaatatacaatgatggagagaacgaaagggaagaggacaaaagatgaattcatggagaaacataggataaaaagaccagagcacagaacaagaatagcaagctaaaccagaagacattcactataaccacaagactaaggaggatagtacataatgaccaatcgatagacctataacggcacactagatacacagaaagaccccacagcaaccaatgggaaagagagtcacaaacttgacaaaccagcacaaggcctgagaggaatttcatcagacacgacaagaaagcgacactagaacaatacaatatagcagaaacgcgccttgcacaccagaccccaacaagacgcacaccataccatggtccaacacccatgagcaagacagacataaagaagcacagaacacaggaatcacacacactacacatcagtactcgatgcacacacaggagcacaaagaccacgagcacaatagaaagaccgaacaggcaaaaaccagacacaaaaagggcctaacagaaatgaagaacaggcacacaacacagaaaaaacaaacaagcacacaagcacagatccagcaaacaatataaataaataaataaaaacaaataaaaacaactatcacacaatgaattaacaataatcaacatatacaaaagaagatcaaacacaaaaatatcacactaaaaatacacaaaacaaacaaccacaaaacaaaaaataacaaaatgaaacacatataatacatacaccataaaaacataac

SEQ ID NO: 643824 - DNA, 250 bp, Homo sapiens
gcccccactcccacagaacgctgtaattaaatcagacagtagaaagactgggctgctgcctcaaagccacagcccttggatgttcttttgcgagagcagaggtctaggctacagggaggggagattggctccctgagtcaggcttgttttgggcttgggcctgggattgggaaaggggatgggcagactttgtagcatatctaggttccgtagtccttagatttagtagaacctatacagttttaatttt

SEQ ID NO: 643825 - DNA, 1241 bp, Homo sapiens
  misc_feature (182)..(182): n is a, c, g, or t
ttttcctagcaggttgagacggtttgcacaatgtcggaaatggctgagttgtccgagctgtatgaagagagcagtgacctgcagatggatgtgatgcctggcgagggtgaccttccgcagatggaggtaggcagcgggagccgggagctatccctgcgtccctcccgcagcggggcccaacnagctcgaggaggaaggcccaatggaggaggaggaggcccagccaatggctggcgccagcaggggaacacggagccttgcataacgggcccaacgctggcggagccagcccaggccaggtggcagggcgcagcacttcgagcagcgcaggacgaggtgctgatggaatttgatgcctgggaggacgactacagactatcccgaaggagtgagcatgctcagtggttgccggctacagagtatcaaggccgctcttgaagaagccgacaagatgttctgagaacacagagaacagccctggatggcgggtatcagatgcatcatgagaagaacccagactgatcagataagctttcatcgaagagcatttatcactgatggttgtcaactcgtctgaccgaagaactcggatgtgactgacgatctatatgactcgaagagtacgtagatggctgtcacaacgagcgagggcacctactcgacggagggaccaaaatgtacaggatatctaagtggagatcatccaaacaagaacgggcccctctgcacacaccaggaacctccaaccacacaatacgaaacaacaagaggtagaaccacacaaacaggccacgtcgagtggccacagatgtgacaacacgcacgccaacactacgaaagcgacaaggaaaccacacaacgagacacacgaacgaagcaacacaagacactacccggacaccgcaagcaaggaacgaaagaataggagaacgagaagaaagagagaaggagacaacagccgcacactgaagacgagcgagataagcagagcgacaaaaacggggagaaacaaaagcaaggaaggagcacgaagacaaagcgagacaacgacgacagacagacaagcagaaagaagagaggaggatactgataaacagagagcacgaagacacaaaaagaagacgaacgagaagataacgagcaacgaacgagactgcacgacacagagagaaacaacaacagaacctgatccgcctaaagcatacgacacgacaagagaccagatacaagagaagaaaaca

SEQ ID NO: 643826 - DNA, 1258 bp, Homo sapiens
  misc_feature (304)..(304): n is a, c, g, or t
ggggccgtcctgagcgacagagaaccgcccccagcaggagcaccgagcacggctttgagcaaagaatcccagactcaccgcccgaggaaggcagccgttaccatggagattcttccaggttcattctaactacttatattctccggttggccccaaaccagtccacagacgctgctcgtgctcgctcgtaactacgaaggagactcaaaagagtgggatgagttatgaatgatcatttctagcacacgcagcaggcaggccatgtcaagtagacgtatgcacaactttgccatggaacatgctnacacgaccttccttgtcatgatccagggcaattaactcccatgctaaaccgaatctgatattaaaatgtaggtgttctcatattctcgaggaggattctattgagtgtcaattaagacatgcatttctcaatggacatcccttcatagtctgtggatgtcactcctgagacggaacgtgaggtgagatccttagtatgacaatgagtctacaaactggctgtctctggagcccattacggtcttggtcgccttcaccgctgagcgacaatgtcatttaaactaaattttctcgaaggtcgtgtgtaactgcacagaaggtattcagaaactacgaagagccatccaggagcatcctgtcgttctgctgcctgagatcatcgaagttacattgacttcctcatgtctgtcttttcttctataacaattatgatttgcctgtgccagttatatgtagcggggattgtgactttccgtgcactgaacactggttggtgaagcaggtaacgacaggtcgggtggcatctttcatgcggcgtacctttggtgtgcataagctctactgtgctcggattctctgcattttttaaaactagtttcgacacggtatggcccgcggttgcactacccccaaaggggcaaaaaagccggttagccacaacaatgcgccctaggtgggctccgacaacggggcgagagacctctccaagacaacagaaggaacaccatgtctccccctagaccctcatgatacgaaccgccggaagacacaacaggaggagcctgccagacgacacaaaaacagaaaacgacggcgccgcgacagaaagcgcacaaagagcaacgtcggaaacgatcactacccacgagcgacgacacccaccacaccagcgacgaccagcagacgaaacatactatcgagcccgtcgcgtccagcgcatcacctccccccgcca

SEQ ID NO: 643827 - DNA, 456 bp, Homo sapiens
cccggtactctccctactgtatcctacctgtggagctttgaaagatgcagatgcctggccaggcgcggtggctcatgcctgtaattccagcactgctggaggccgagatgggcggatcacgaggtcaggagatagagaccatcctggctaacacagtgaaaccctctctctactaaaaatacaaaaaaattagccgggcgtggtggcaggcacatgtggtcccagctactggggaggctgaggcgggagaatggcgtgaacctgggaggtggagctttcagtgagccgagatcacaccactgcactccagcctgggcgactgagtgagactctgtctcaaaaaaaaaaaaaaaaaagatgcagatgccagctttaaaaatggagctatgatttatttactctggatacagatttatgcggtccggggatccctaaggatacagtagggagagggga

SEQ ID NO: 643828 - DNA, 276 bp, Homo sapiens
  misc_feature (182)..(182): n is a, c, g, or t
  misc_feature (227)..(227): n is a, c, g, or t
  misc_feature (246)..(246): n is a, c, g, or t
ttttcctagcaggttgagacggtttgcacaatgtcggaaatggctgagttgtccgagctgtatgaagagagcagtgacctgcagatggatgtgatgcctggcgagggtgaccttccgcagatggaggtaggcagcgggagccgggagctatccctgcgtccctcccgcagcggggcccaacnagctcgaggaggaaggcccaatggaggaggaggaggccagcaatngcggcgcagaggggaaacngagccttctatcggccaacgctctggagca

SEQ ID NO: 643829 - DNA, 362 bp, Homo sapiens
  misc_feature (123)..(123): n is a, c, g, or t
  misc_feature (172)..(172): n is a, c, g, or t
  misc_feature (188)..(188): n is a, c, g, or t
  misc_feature (195)..(196): n is a, c, g, or t
  misc_feature (230)..(230): n is a, c, g, or t
  misc_feature (257)..(257): n is a, c, g, or t
  misc_feature (327)..(327): n is a, c, g, or t
gccgatttcctcctccttggtcgccgcgtccttggctggcgtgggatgacggatgatgtcacctgtgtggactcagctgccaccatgggattgtggtggcggcgggtctgtctggcagctcanttccatctccaccagtgtcacctccacaccaccatcgccaagcagcttntggaaaggcccccgcnacccggnntgacctgctgctgtgtctgacccggttagtcttnctggctgcctctaaccttgctgctttncattcatgcatgtcctaggaggccaaagcaaaatgaggagcgggaaggcctcctgcacccttggagaccngtgtgggaagacaagcacaagtatgaggaggccga

SEQ ID NO: 643830 - DNA, 666 bp, Homo sapiens
  misc_feature (9)..(9): n is a, c, g, or t
  misc_feature (16)..(16): n is a, c, g, or t
  misc_feature (25)..(25): n is a, c, g, or t
  misc_feature (28)..(28): n is a, c, g, or t
  misc_feature (30)..(30): n is a, c, g, or t
  misc_feature (32)..(32): n is a, c, g, or t
  misc_feature (34)..(34): n is a, c, g, or t
  misc_feature (46)..(46): n is a, c, g, or t
  misc_feature (55)..(55): n is a, c, g, or t
  misc_feature (59)..(60): n is a, c, g, or t
  misc_feature (62)..(62): n is a, c, g, or t
  misc_feature (80)..(80): n is a, c, g, or t
  misc_feature (87)..(87): n is a, c, g, or t
  misc_feature (89)..(89): n is a, c, g, or t
  misc_feature (95)..(95): n is a, c, g, or t
  misc_feature (101)..(101): n is a, c, g, or t
  misc_feature (113)..(113): n is a, c, g, or t
  misc_feature (134)..(134): n is a, c, g, or t
  misc_feature (136)..(136): n is a, c, g, or t
  misc_feature (138)..(138): n is a, c, g, or t
  misc_feature (143)..(143): n is a, c, g, or t
  misc_feature (146)..(146): n is a, c, g, or t
  misc_feature (159)..(159): n is a, c, g, or t
  misc_feature (161)..(161): n is a, c, g, or t
  misc_feature (174)..(174): n is a, c, g, or t
  misc_feature (176)..(176): n is a, c, g, or t
  misc_feature (178)..(178): n is a, c, g, or t
  misc_feature (193)..(193): n is a, c, g, or t
  misc_feature (195)..(195): n is a, c, g, or t
  misc_feature (232)..(232): n is a, c, g, or t
  misc_feature (236)..(236): n is a, c, g, or t
  misc_feature (277)..(277): n is a, c, g, or t
  misc_feature (301)..(301): n is a, c, g, or t
  misc_feature (304)..(304): n is a, c, g, or t
  misc_feature (306)..(306): n is a, c, g, or t
  misc_feature (319)..(319): n is a, c, g, or t
  misc_feature (359)..(359): n is a, c, g, or t
  misc_feature (387)..(387): n is a, c, g, or t
  misc_feature (445)..(445): n is a, c, g, or t
  misc_feature (473)..(473): n is a, c, g, or t
  misc_feature (480)..(480): n is a, c, g, or t
  misc_feature (487)..(487): n is a, c, g, or t
  misc_feature (564)..(564): n is a, c, g, or t
  misc_feature (588)..(588): n is a, c, g, or t
  misc_feature (602)..(602): n is a, c, g, or t
  misc_feature (658)..(658): n is a, c, g, or t
taaagcaanaacgggnctgtttaangananancngggtctggttanaaaaaacanaaannanaaaaggaggacggggggntgcacanangaggangaggangaagaagaggangaggatgggccaggaggggananancaggngcnaaagcagcaaaananccttgaagacgananangtgaccaaggggcananacggggggcccccctggcaagcctgacgcagaagaanaganagggccgactgccggccaggaggagggggggggggggaaanccctcggccctcggagctgagggngananccaggcatgtggncccgccgacctgctgcccagcagcccggatcccctggggntgccctggtggccaaggcagggggagcnagcggtcgaggtttctggactgaggcccctcccccagtgcggtcatcccacccaaaanttcgctctgcccctgcccattctagganagccggngagtaanttcctctgagggagttgggggagcccactcctttctgcctggaagtggaattcaggaatgtggggagctggtctganaaggggctgggctttgccgccaanccgggttgccccanccctgcccctccaggcccaggtcctctgcgctgctgtgggatttcctctttgccanaacactct

SEQ ID NO: 643831 - DNA, 864 bp, Homo sapiens
gctttaactgctacctcaacggtccaactgtatctcacttcaaagcactgataattgtgatgcccgttgaagcagtgacgcgcgacatgaccatgagtaagactgagaaggtaccctatgcgagtcttataatttattaatgctaacagtacctaacaaacccacaggtcccattaaaagcgtacgcaaacactctgcattcaaaaatttgcggttggagtgcgcgagctctggagacgagaatcccaacctccgagctaagtactatgctaagacttcaccagtctaaatggcgaatctactatactcaattgatccaataacttgaccaacggaacaagttaccctagggataacagtgcaatcctattctagagtccatatcaatgaatagtggtttacaagacctcgtatgttggtatcaggacatcccaagtggtgcacgtccgcatattgaaggttcgtttgttcaacgattaatcgtcctacgtgatctgagttcagaccggagtaatccaggtcggtttctatctacttcaaattcctccctgtacgataggacaacgagaaataaggtctacttcacaaagcgccttctgccgtaatgatatcatctcacacttagtattatacccgacaccaccaagaacagggttgttccgatctatgaattcgaaagataaccccgaattctgttggagccattgcttccaaatagcttttaaaaacttctttggggccggcctagtgaatgaatgtggcatacgttcaggcacacgtggcctcaagggggtccacaaaaaagccggggccgggttggaaaaccaaaggttgggtccgggctcacaaggcacggactaaacg

SEQ ID NO: 643832 - DNA, 847 bp, Homo sapiens
gaatgaacagagaacccaaaggatataggagaagcatcctcaaaggaccatctccaaggcctaaatcctggctgagccaacataaatacgcaaggtagagtgggcggcagagagaatactactgttcctcaagtgagtgcacaatgtgacgcacctgtcttcagcgggtctgtcctggtagtcggcctgaatcgacacggcagggagccgtggcgggtaggccatgggctcgtgaggacgagagagacacgagggaagagaggcttcctgagccaagcagaaggaacgatctggagaagtcccactcggcgcgcacgagaataaagaagcagcagcatccaatccgagcaaacaacaaagcgtaaacacccaggctgacagagaagagaaaagctctagggcagagttccggggagaaatctaagaagcgcaagaaacgaaaaggcgaggagaagaatcaagtcatcaggcccagcagattctgaacgaggacccaaagcagaagcccctgggagtgggcagtcccgcggcagcaagaagcaaggcggagagctcgagatgactcccagcggagatccctcccagctgaagaggggacgcaagttggcaacaacaggcgtgcagggggggcgacgctcaggaggctaccaaagaaccagtggagcggagggaaacaacaccaggtcgaagtgcccctcttagcaattcctggcgagccgagataggggggccccaaaagggtagcagccggcgctaggccatcggcagccaaagccacgtgactagggcccgaggagccggcacgtgggtggccggcaacacggggggagaccaccaggccacagca

SEQ ID NO: 643833 - DNA, 267 bp, Homo sapiens
caaaatatcctaagactaccaaaggcagctgggtttgagcccaccccttttaaacggtgccctttagggccaacttcccctctaactggacagccttttttgtcccaagtctccagagagaaatcgggcctgatgagggggaattcctggaccctggcccccccccttggggggggggcctttggaaggcatggggggggtcctagctgttagggccctttcccagctgttggttgcggtttaaaatagaaataaaattgaggccta

SEQ ID NO: 643834 - DNA, 788 bp, Homo sapiens
  misc_feature (2)..(2): n is a, c, g, or t
  misc_feature (206)..(206): n is a, c, g, or t
  misc_feature (208)..(208): n is a, c, g, or t
  misc_feature (251)..(251): n is a, c, g, or t
  misc_feature (358)..(358): n is a, c, g, or t
  misc_feature (380)..(380): n is a, c, g, or t
  misc_feature (388)..(388): n is a, c, g, or t
  misc_feature (400)..(400): n is a, c, g, or t
  misc_feature (430)..(430): n is a, c, g, or t
  misc_feature (439)..(439): n is a, c, g, or t
  misc_feature (474)..(474): n is a, c, g, or t
  misc_feature (476)..(476): n is a, c, g, or t
  misc_feature (485)..(485): n is a, c, g, or t
  misc_feature (487)..(487): n is a, c, g, or t
  misc_feature (501)..(501): n is a, c, g, or t
  misc_feature (547)..(547): n is a, c, g, or t
  misc_feature (549)..(549): n is a, c, g, or t
  misc_feature (625)..(625): n is a, c, g, or t
  misc_feature (640)..(640): n is a, c, g, or t
  misc_feature (653)..(653): n is a, c, g, or t
  misc_feature (670)..(670): n is a, c, g, or t
  misc_feature (689)..(689): n is a, c, g, or t
  misc_feature (713)..(713): n is a, c, g, or t
  misc_feature (716)..(716): n is a, c, g, or t
  misc_feature (723)..(723): n is a, c, g, or t
  misc_feature (756)..(756): n is a, c, g, or t
gnaagagggtgaggagggaaagagggactgtggctcaaggccagtttgggtccacagccctgggtaggggagaaggttgagaagctgaaacttcattgtgcaaaaaacaaccaaaaataaattaaaaaattaaatagttttttttttaaaaaaaaaaaaaaaaggaaaacgagaagaaccaggctccccttccctgaaggtgtttntntccccccatcttgagtggcgaggggttaccaatcccatcaganagccaatccatccacacaccccaagacccagcagaggatgcttcaaagaactggaattaccagaaaattaaaaggtatttttaaaactttttttttttttttttaanaaatggcttccagagacctgcncgagtttnatggggtgggcnttcagggacacccagcaaatttatggaatnttttctganttccccttggaatagatgcagggcctgacccttantntggaaagananagggcttggatggngggtctggcgcccaggagggatggatggagcaggccccaggatgcnanatttcagttagaatccaaaacacaaggggctccccaaagaagttgaaagcagggaaggaaaaaaagggaaaaaatnctaagggggtttgcnaggcccagttttntggccaaccgggaagtnacttcacccccaccctctntaggggagccctcccaccttgaanatnttcccanaatattccggaaggttctttagaattgctgaancagtttagtaggatctctgggctcactgggta

SEQ ID NO: 643835 - DNA, 452 bp, Homo sapiens
ttaaaggcatttatcccagaccctgctcaggcagtctggccaaatgagtgcaaagtctgtttaccccaccaacttagctctcggaaagatgtgctggagtggaccctcttgttaatgaaggttactgccagtgccgggcgcggtggctcacacctgtaatacccagcacttatgggaggccggaggcgggcggatcacaaggtcaggagttcgatgaccatcctgtctaacacgtgtgaaagcccatctctactaaaaatacacaacacaattatgtcggacatggtggcaggcacctgtagtcccagctactcgggaggctgaggcaggagcaatggcgtgaacccaggaggctggagctatgcagttgagccaagcatcgctgccactgcactccatgcctggtgcgacatgagttgagactccgtctacaccaccaaacaacacaaggt

SEQ ID NO: 643836 - DNA, 421 bp, Homo sapiens
gttaaaggtcggggggtaagggaggctagcgaggtatgtagacgtccatccacaagctattagtgggagtagagtgtgaagtccttgagagcaggattgtgatgcgacatgtgagtgcgctcgtagttggagttgctaggcagaatagtaatgaggatgtaagcccgtgggcgattatgagaatgactgcgccggtaaagcttccgggggtttggatgcgactggctgttactacgacgagctactgtggctgacttgacgagtatgcacactgacgcgatttacggtcttgttagtcgtacggcagactggacgctagttactacattactgcctcatacgggactagtacaatggacacggggtatggcatatgatgtattggtcacgggaggtttgcgacactgacgtgttgacgggc

SEQ ID NO: 643837 - DNA, 472 bp, Homo sapiens
  misc_feature (1)..(1): n is a, c, g, or t
  misc_feature (13)..(13): n is a, c, g, or t
  misc_feature (52)..(52): n is a, c, g, or t
  misc_feature (81)..(81): n is a, c, g, or t
  misc_feature (212)..(212): n is a, c, g, or t
  misc_feature (413)..(413): n is a, c, g, or t
  misc_feature (466)..(467): n is a, c, g, or t
ncagtagcctacnctgtagaccttatggtaatggaagttaggttaggttgcnttcagaaccctcaaaagtcaagcctatcncccatatttgagaagaaactcacagtatttgatatacccttagtggatttgaaaacaacatccttatgttacaaaaaaatagcattttaaaaattgggtggggcactgtggatcactcctgtaatcccaanacttggggaggccagggtgggcagatcacttgaggccaggatttcgagactagcctggccaacatgataaagccccatctctattaaaactacaaaaattagctgggcatggtggtgcacgcctgtagtaccagccactcaggtggttgagacatgagaattgctttaacccgggaggcagaggttgcagtgaaccaaagntcatgccactgcactctaacctgggcgacagagcaaggctctgtctcaaaatnnaaaaa

SEQ ID NO: 643838 - DNA, 211 bp, Homo sapiens
aacaattgtttgccaacaaattagataacctagataaaatcagcaaatgcctagaaagacacaaattactgaaactgacccaagaaaaatggaggccaggcatggtgggtcacacctgtaatcccagagctttgggggtgctgaggcaggaggattgcttgagaccaggagtttgagaccagcctgggcaacacagcaatacattatctct

SEQ ID NO: 643839 - DNA, 468 bp, Homo sapiens
  misc_feature (82)..(82): n is a, c, g, or t
  misc_feature (113)..(113): n is a, c, g, or t
  misc_feature (120)..(120): n is a, c, g, or t
  misc_feature (122)..(122): n is a, c, g, or t
  misc_feature (127)..(127): n is a, c, g, or t
  misc_feature (161)..(161): n is a, c, g, or t
  misc_feature (231)..(231): n is a, c, g, or t
  misc_feature (236)..(236): n is a, c, g, or t
  misc_feature (245)..(245): n is a, c, g, or t
  misc_feature (274)..(274): n is a, c, g, or t
  misc_feature (285)..(285): n is a, c, g, or t
  misc_feature (288)..(288): n is a, c, g, or t
  misc_feature (304)..(304): n is a, c, g, or t
  misc_feature (327)..(327): n is a, c, g, or t
  misc_feature (331)..(331): n is a, c, g, or t
  misc_feature (414)..(414): n is a, c, g, or t
ttgtatatggtccggcaagcccagggggttgagcttctcagacatcccccctggggtcgtttgctggtgtgatattagcaancagttcgggggggggctaccaacagggggcnaaaaggntnctggngctggccagggccccagtttggcccgaaaggtcngaagggttaaaggattttttcccttaaacccgccccccccctttttatcaggggggggaggacgggttcnaaacnggttggttncattgggccctttaggtttgggggaaaangcggggttatnatnaccaaggcttggtaancccttcaaagggaaggggaatgntttnggggcccccttgggttttttttttggggggggggggttttaggtttttggtttttaaaaccgggcttttttatggggaccccntggcccaaaatttggtcccgaatttttgggcccctttaaaaaggttaatgggga

SEQ ID NO: 643840 - DNA, 337 bp, Homo sapiens
  misc_feature (9)..(9): n is a, c, g, or t
  misc_feature (84)..(84): n is a, c, g, or t
  misc_feature (184)..(184): n is a, c, g, or t
  misc_feature (308)..(308): n is a, c, g, or t
  misc_feature (319)..(319): n is a, c, g, or t
gaaaagttncaagctagcagatgttgcttcatgaggtttaaggaaagaagccatccatattatataaaactgcaaggtgaagangcaagagtggatacagaagctatagcaagttatccagaagatctagctaagatcactgatgaaggtggctacactaaacaacagactttcaatgtagganaaaaagtcttctaatgaaagaaggtgctacctagaactttcatagataaagaggaaaagtcacttcaaaggacaggctgactctcttgttagggaacttatgggacctgggtcactttgaagtnggaagccactngccttaattgacccttac

SEQ ID NO: 643841 - DNA, 122 bp, Homo sapiens
gtagctagtgggtagactatattttctggagagacgtggattgtctggaggacatggtcttgtgttggagagacgtggagtatacgtttcgggatagacactgattgactggaagaccatgg

SEQ ID NO: 643842 - DNA, 108 bp, Homo sapiens
ggttgctctagaggattccccccagcgcggctattgcgcggtgacttctgcagctcgggcagagcaatggattcgggcgactcggcaagggcctcgcgcaggccggcg

SEQ ID NO: 643843 - DNA, 176 bp, Homo sapiens
  misc_feature (11)..(11): n is a, c, g, or t
  misc_feature (51)..(51): n is a, c, g, or t
  misc_feature (89)..(89): n is a, c, g, or t
  misc_feature (153)..(153): n is a, c, g, or t
attgaattggnagatacagattcagagaattcctcctcagagaagaaattnaaaacatgataaatacaaagggaaaacaaaaagctacnaaagtagccttacaaaaaaaaaaaattgtttagtgaatacagaggaaaggaaaaacaagtattnaaggcacatgaaaccagggcctg

SEQ ID NO: 643844 - DNA, 703 bp, Homo sapiens
aatctcaatgtctttatagttgctgagctaactaatgtgattattgagttcacagatttaaaaattgtcactgttagagtatctactgttttctcatgaagtcaagagcttatgctgcctcagaaatccctgggtactgaaatggtaacatggaagtgacagaggtcactttgaaatatggtgagtcacaagagattagagaaaaggatcagtttgcagatactcagaaaaggttattgaaataattactgaacagcacatttgctctctaaaaagtagtttcatatgggtgtattgttaagatcagattatcattgtgatattggtcaagaatttgtaccttaggttacttagagccagatttaacatcatgaacattatgtggcttgtctttactacagatatgtggaactgtaaccaaatatgtgtctctaaaacttgttgattgcaaaatacagtgtctataagacaataacaccatatgtgactatctcaaatgttgacattgctgcggaaggtctgggcagattcataactatagcatttaagttgagtctgtattggacaaataagcaccatgctttttcaatgattcaccaattacttcatgtgctcttgattgtgaggtggttggaattttttgaattaggtaactcccttaaactgtgccggtccctggccatcacctggggctatggaggac

SEQ ID NO: 643845 - DNA, 393 bp, Homo sapiens
gaagctcctttgtctccaacattataccttggtattcagatgatgtctccatatgccaagcaaactttacggtctctaggctcgatgtcttgtccacaagctctttgtatttggcaatttgttcagcacttggctcaacaacttcattgttgatccatactcctgggtactgagcctgaactttggacagaagttcaagatcaatttcgcctgcacttccgcctatgcttagcatcgtaatgtcagattttgtgtctccaatccgtcccattatgcctgacaacctcctgtccatgcattcctgcatgcgctgatgctccgtagcatggttcacaaacctcggcaaagattcatcatctttgacgtggtcacagaccgagctcctcatggaag

SEQ ID NO: 643846 - DNA, 352 bp, Homo sapiens
cttttggggtctttgctacagaataatacacacagttgtgtgtgcatataaaatacatatttacgccaggcgtggtggctcacgcctgtaatcccagcactttgggaggccgaggcaggcggatcacctgaggtcaggagtttgagaccagcctgacatggtgaaaccccatctctacgaaaaatacaaaaattagctgggcatagtggcgggtacctataatcccagctactcgggaggctgaggcacgagaatcacttgaagccgggaggtgggggttgcagtgagccgagatcacaccactgcactccagcctgtgcaacaagagcaaagaccccagggtaccgagctc

SEQ ID NO: 643847 - DNA, 512 bp, Homo sapiens
ctatctggcaggagtttctgagaaggaacagaaaatggaataaggaagtcattgatactatatggaaattcaccactgttgctgccgtgactgaagaggcaacgtgagttctatgccataagaatcataatgtaaaataggttaagcataaaacaaaataatataagcacctacccacaaaaattaaaatttatggaagattcggcagaaacagctgagagtggtgcttaataaatcccaggccttgtgctaaagccttgggttatgaagataacatacattctgttgcctgtgaaatctgaaggggtctgtaactgcatgaactgcaaagacaccctcacattcacaggctgtgtgtggacatacgtgtgtgtgtgtgtgcatgtacgtgtgtgtgtgtgtgtgtgtgtgtgtgggggaggatactcataaaatcaaagatatcatgccatccttcctttttcctggagctctcttgcagtttgtgtcagcacaaagagtgacccaataat

SEQ ID NO: 643848 - DNA, 704 bp, Homo sapiens
tttcccttgagatagtctcgctgtgttgcctacgttggagtgcgatggcgcgcttggctaactgcaaactctgcctcccaggttaagtgattcttgtgcctcggtcacccaagtgtctgggattacatgtgtgtgccaccatgcccggccaatttttgtatttttagtggagacggagttttgccacatttgccaggctagtcttgaactcttgacttcaaacgatccacctgcctcagcctcccaaagtgcaggcatgagccactgcacctggctattttggtttttaaaagcagtatgataccatttttttttttttggagatggagtttcgctttgggggctcaggctggagtgcaagggcatgatctgggctcactgaacctccacctccggggttcaagcgattctcctgcctcagcctcctgagttgctggcattacaggtgcctgccaccatgcccagccaatttgggttattttagtagagatgaggtttaccatgtgtggccaggcgggtctcgagctccctgactgtaggtgatccacccactttggcccccaaagtgtggggattacagccatataaacaccgaaccgaaagatactttttttaaacataactttaacttataatatacacattaagtcccttgggtataatagccgcaaaattgtgtttaaaccagacgtgttttattttgg

SEQ ID NO: 643849 - DNA, 551 bp, Homo sapiens
taaaaaaaaactttttctctttattccggctggggatacaattgtccagtggggatgatgaaaatgaggcaagttacggggaagacaatgggcgggcctcctccttgtttggctcccaaataaacctccaatgggaagagaaagaacgctaaacgggttgggggagggttccgggctcatacggcatcatagctttactcaaattctacacgctgggatacttcgggacacaggatttccgtgtgccccagtgtgattgacacggttcacacagaaggggcacaaaatgtgaaaaattttcaaccgtgtgttattccgcagtgtggcagtcgtgagtgttctcacagaagtgtctctcataaaaatctcgtgtatttggggctcagaaagccgggggcagtgtgacaactcggggggtggcgtgggcccccaattttccgtgcctccccagtgggcgctcgccgagaatctccgtgcaatatggctgtgcctttgggcagggggaaacagctaagcatttacaacactcgcggggggggcattggtggtgg

SEQ ID NO: 643850 - DNA, 134 bp, Homo sapiens
cctcctcgtcggtcctggctgccggatgaggcgaaatacgctatgggcagcaggataaagtgactcgtccgtgccaaggtatgtgtcaaccaaagaccgggactcgactcacatcagaacaagatgcgtcctac

SEQ ID NO: 643851 - DNA, 263 bp, Homo sapiens
gtctgtaaacaccccccctatggtggcaggcgccaaatcgaattcggctttaatccggcctgtcacgactcagccacgtgctgtttcagcgattcagaagccctgaacagggagtgttagattgagtcttgtatacgtacgcctgcggaatgtgctgcgcggtgatttgtctcggtgtttgtccaacttgatggcgtgctcctcggaacccaagacaggacaccgtggcctgccatggatggtggtttcaccactttggcgct

SEQ ID NO: 643852 - DNA, 323 bp, Homo sapiens
tacaaaaatactacttcttacccacccgtcttaggtatgtatgggctactaaaatcagttctgtggaactgggattttgaagtctcagcaattcattcttcttgcatacatttctaggcagtacaagtttgggtgatgaacatgtgtactgtgcattaatataatccaattctgctgagcaatgccctgaaatttatcactgctatagagggtgggcagaagaggcgacagatcatatttcacacatataacaacattggctgcttctctacaacacatacagaagcaagtgtaaccatcagggaaagtttcatgcaatccca

SEQ ID NO: 643853 - DNA, 270 bp, Homo sapiens
acgtaagctcgggttgcggtgggccaagattgcgccactgcgctccagcctgggtgacagagcaagactctgtgtttaagaaaaaaaaaaaaaaagtcctaaatcaggggattctgccgataaactaccatctgggacggaatgaacctgagggccaatagtttaaaggctcaccccccgactggagagaaagagagagagagagagagaaacagagtgtgtgtgtgtgtgtgtgtgtgtgtgcgcgtgcttgtgtctacgacgggtgta

SEQ ID NO: 643854 - DNA, 116 bp, Homo sapiens
gttataggttgcccttctgccccctacattcatatgttgccgtactaacccccaatacctcagactgtggccttacttggccacagggaattgcagaagcgatttagttaagcatg

SEQ ID NO: 643855 - DNA, 333 bp, Homo sapiens
cgaggacttgggccccaatatggggcgtctgtctactcgccgccagcctgtcgtcgccatggagggacatgcggcggaccaccgccgccgggctcttcggcctttctcagaggaccgcgtactcctgattgttatttgaactgtcctgactttgcgttcgactctgtgacggtgactgcttaccgaggccgactcatcgtcaatttcacaccggtactctccggactcctcgagctggacagcgggcagcaccacgtcggcggacagtgtcctccttctgcaagaacagcgcgcggctcttccaacatctcctctccatcgttggcccagctg

SEQ ID NO: 643856 - DNA, 220 bp, Homo sapiens
caggggtcctggaaaaacatatgcgtgcagctgcctggaaacagattttggcgagaaggtagcaggcctgtggttgggtttggagttgagcagctgaatcacagaccgactctggtgtaaaacagctcccaaaacaatggttctcaactgcacctggctaatttttttgtattttcagtagagacggtgtttcaccgtgttagccaggatggtctcgatc

SEQ ID NO: 643857 - DNA, 535 bp, Homo sapiens
cagttgattctagaggatcccttgggctcattcaggtgcactgtggtcttgccccttggcactggccaagagaatgaagcacccagtctcgtaccattttgagccctccagcactatttatttcccccaccttggccttgctgtggcgggaagagcgggctcatacccccaagggacactttcagcgacagctatggacagcatggtaccagggagttaagtggaggctttttccagcttcctcgggtacattggatggctggataaggcctcaggatctcagcatggcacaagtgcctcagggaagccttggagggtatcacacagacacccccaccttcctccagccggtgcgcacctgccctctttgcagcccagcacacctgcaggtgtacgggacgatgggagtttcttcccagagagtctgtcccagaaggactgtggcttgtgtgtgtccatctcgcctgtgggctcagtgcttcatcccatttgcagagcctcagacacgtcttggtggtgaggtcagttacccttg

SEQ ID NO: 643858 - DNA, 280 bp, Homo sapiens
tctagaggatccctcacgtgcgaatattttcaggggaaaaaatacataaggcaacaattttcaaatgttataccatctacataaacaattacactagcagaatttacaaattaatatactagagcagacagaaatattatacatccttttgcgcaatccagtcaacaactttcacaaattcatacagggacaacacaagataagtctctctatacaaatctacctatttacatagctttttccaccacagatatttggtacgtggagggtaccgagctcg

SEQ ID NO: 643859 - DNA, 315 bp, Homo sapiens
agcgagcacagtgcttcctccactcgcgcgtggttgcaatgtctgattctccgtgccgtcgatgtcctccctggtctgggattacaggcgtgagccagtgtgcccagcctgtattcatttcttttgaacatatacctcagagtggaattgtgaggtcacagggtaggtatatattagatttagagaactaataggggctgggattacaggcacgagccaccatgcccagcccatttgttgtcgtaatactcttatcccccaaccccgaacctctctgagtttctttcatgttactctgtgttacgtctaggtcgg

SEQ ID NO: 643860 - DNA, 258 bp, Homo sapiens
  misc_feature (9)..(9): n is a, c, g, or t
  misc_feature (23)..(23): n is a, c, g, or t
  misc_feature (76)..(76): n is a, c, g, or t
  misc_feature (108)..(108): n is a, c, g, or t
  misc_feature (155)..(155): n is a, c, g, or t
  misc_feature (159)..(159): n is a, c, g, or t
  misc_feature (182)..(182): n is a, c, g, or t
  misc_feature (217)..(217): n is a, c, g, or t
cctgtccgngggagacatcctgnaggtgatcctggaaggggaggatggctggtggactgtggagaggaacgggtangtggttcgtccctggttcctacctggagaagntttgaggaaggccaggagcccttggacctgcctgccagtggagccangagngccccagcactgtcccaccttgntaggcccagaaccaagcgtcccccagcccgacgangagcctgtcgtctcccagggaataaaggagtgcgttctgtt

SEQ ID NO: 643861 - DNA, 381 bp, Homo sapiens
gggtaaacaggaggccagggggtccccagggttaaggtggggaccctttttcggggaaagcctgcccccccccaatgaatcccccctgttccattgggggcctttcccaggtttcagctttgggtggggaacagtggccgctaccgacagggcatgtcccgtttttatccaatttttccaggccccccctccctgcccccctcccctttataaagcaggggagtgaaggggtatgtcaggcggggaaggggccaaggacacgtctttgtaccctgagggtccccagggagtggaaatggggaagggggcctggaaaggggaggcaggggcccctgtgctttttgaacaagttgaaagtccaaataaaacttccctgttcca

SEQ ID NO: 643862 - DNA, 536 bp, Homo sapiens
tgcttactaaaaggctttcagtgttggctactcttggcccttccaccatcagatgacacggcaaaaaggtcctctccaaatgccaatcacctggatatgggattgcccagcctccagaactataactttctgttcttgtataaattacccagtctcaggtatccggtcatagcagaacaacatggactaagacaaattcatacaggaaagccaggattggctggatcctgacaaataaagggcttgccctttattggtcagtgttcaaggcaaggagtgggtatcttataattcttcaaaggtggtcagttctgttttaatatcatggtgaagttatgtagtgaaaggtgatatgtgatgggttgcattcccatgcagtgtagatccttatggaggtgcaaggtttcccatcttcagtcagggacagccacttcaaggagtaaagttaggttggtcaggactctagtcatcattgaaagctaactggccatcaggtatgacaagatgttccaagtcaatcttatacactttctacc

SEQ ID NO: 643863 - DNA, 131 bp, Homo sapiens
aggctagttactaatcaaagaaccttataccaggaagaaatagtaccacccttagactagtgactgctgattgaagtctatcatcttctccacctctcttgtgcctctacttctggtcgggctagtcgggg

SEQ ID NO: 643864 - DNA, 291 bp, Homo sapiens
ccacccatgtttatcactttggcatttgttattgggttatggctggcggttattattcttgatgattgttgtgatgacaatttactggcccctaatcatgagccagacacctgctatgatctaggcgataacatggttaggctctacggaggctccagggtgcgagctagttccctgctcacgtagggtagactgttcaaccctgttcctgctccggcctccactatagcagatgctagcaggagtaggatagagggaggtaccagtcagaagcttatgttgtctttactg

SEQ ID NO: 643865 - DNA, 113 bp, Homo sapiens
aaatgatcccagtgttcccaatcagaatgcaacagacagctataacgaagaaatgctgcgaaaataaatacgtcttacatgtcatggagagaaaatatattttcaccataatt

SEQ ID NO: 643866 - DNA, 501 bp, Homo sapiens
  misc_feature (50)..(50): n is a, c, g, or t
  misc_feature (66)..(66): n is a, c, g, or t
  misc_feature (109)..(109): n is a, c, g, or t
  misc_feature (366)..(366): n is a, c, g, or t
  misc_feature (396)..(396): n is a, c, g, or t
atccccgggctgcaggaattcggttcgagcaagaatggcaccaaaccatntacgagggatcttccncgacaaccagaacccctcctaccaggctccacctcagcatggngcaccacacgggccccacctcagcatcacacgggcctcacctcagcaccacacgggccccacctcagcaccacacgggccccacctcagcatcacacgggcctcacctcagcatcacacgggccccacctcagcaccacacgggccccacctcagcatcacacgggccccacctcagcaccacacgggccccacttcagcaccacacgggccccacctcagcatgaggcatcccagtttaacatcaggcttggtggngccaaagaaaccatatccaaattacagcanactaggatagggattaactgtagactttaataagtgcagtttacaagttctaaggacatatcgtaggaatagaaactggccaggcgcggtggctcacgcctgtaa

SEQ ID NO: 643867 - DNA, 315 bp, Homo sapiens
cccccccccccagggttttcttcctgttttctcccctccaagggggggggaggggcccccctgggggtgggccccccccccccccccttgggggccccccccacccccggggggggggggggcccccggggggggggcccccccccaaattggggccctttaccccaaggggggcccccccgggtccggtttttttttttttttcccggtttttttttaccccctttccccccccctaaaaaaagtttttttttttccccccccttaagggggggccccccaaggaaagggattttttgttggggttttttttta

SEQ ID NO: 643868 - DNA, 143 bp, Homo sapiens
ggtcacagtcttcctgaaccaggtggaattcagagagctggtgcgaataagatctgcaaaattttctcaagaaggagaataagaatgaaaaggtcttataacacatcatggaggagctggacacaaatgcagacaagcagctg

SEQ ID NO: 643869 - DNA, 245 bp, Homo sapiens
tgcagatccctggtgagattccaggctagcatcagcactcctctcccgcacgcaccacagctaaagcacacaagggcaccgctgaacgccaccactcccagctgccagagtgccgcatccgtcggcaaggaaaatggggacccttccatagaaaacaggcaaagactgaacagacattcacaatggccccaaacaaatggaaagaagtcacgccctccaaaaaccaaagaaatgcaaattcacac

SEQ ID NO: 643870 - DNA, 263 bp, Homo sapiens
  misc_feature (252)..(252): n is a, c, g, or t
ctctacaggatccctgtggtacaaatgaaaaactagtcttgcatgcacttagagatgtcccaccaaaactgatgaccccaggggatcctgcactggtgactggcagactgccaaaaacggcaggttgaggacagtgctaggtggctgcttggtggtgctactagaggtggtggttgcagatggatgtcacagtggggctcctgtgttgcttccgctaacacctgtgggggggcatgtaaaatgtaaaccctngagggcacgcc

SEQ ID NO: 643871 - DNA, 405 bp, Homo sapiens
cctctggagtgagaggctccacccactacagcacaggcgggaatagcacaactgccctcccatgctccctacctgtcccctcacagggaggggagcagggtagggaaagaaaccaggcatttggtcaaaccagcagatcaaaaaagccaatagagctggtgcagaggcaggaagcaggggccctcctggtacctcctttgactggtgagaggttgcgcactgatagagggacccctaaaggagggactagaaaccttagttcccttatttttcccctttcacaaaaatacctctgtaagttagctttccccattccaccttatttttgtggttggtttttttggtggcctcccctaacccccttttaattgggcgcggctttaattttttaaagtttaaaaaaag

SEQ ID NO: 643872 - DNA, 784 bp, Homo sapiens
  misc_feature (711)..(711): n is a, c, g, or t
tgatgtgaaggtcaatgtatgcagtgcgcactttacgacgcgggtcgctgtcgttcctgtcagtggataatgcagccgattccagagcaactctccgctaaaaccgccgatcttaaaaatctgctcgccgactttccggttgaggaatggtgcgcgccggtgtcaggcccggaacaagggtttcgtaataaagccaaaatggtggtgagtggtagcgttgaaaaaccactgctcggtatgctgcatcgcgatggcacaccagaagacctttgtgactgcccgctttatcctgcctcatttgcgcccgtttttgcggcgctaaaaccgtttatcgcccgagcggggttaacgccctacaacgtggcgcgtaagtggcgaactgaaatacattctgctgactgaaagccagagtgatggaggcatgatgctgcgctttgtactgcgttctgataccaagctggcgcaactgcgtaaggcgctgccgtggttacacgaacaactaccgcagctgaaagttattaccgtcaatattcagccggtacatatggcgattatggaaggggagacggagatctacctgaccgaacaacaggcactggcggaggttttaatgacgtaccgctgtggatccgtccgcaaagtttcttccagactaatccggcggtcgccagccagttgtacgccaccgcgcgcgactgggtacgacagctnccggttaaacatatgtgggactgttctgcggtgtggggggcccggaccaattcgcctatagtgagtcgattaa

SEQ ID NO: 643873 - DNA, 266 bp, Homo sapiens
atagtacatccattgttaatgggaaaacactctgctttcctgatcatgtgttgtgtgcttggacacgcttctgcaacaaactcttaagtcctccagctcctctaggggtgtaaagactggaagggctcaaataaatcacctactcattgcatggtccttcctaaagagcctagaatatggtttctcctgctgggtgtggtgtctcacgcctgtaatcccagcattttgggaagctgaggcggtcggatcatgcataactgatctat

SEQ ID NO: 643874 - DNA, 683 bp, Homo sapiens
  misc_feature (99)..(99): n is a, c, g, or t
  misc_feature (158)..(158): n is a, c, g, or t
  misc_feature (400)..(401): n is a, c, g, or t
  misc_feature (414)..(414): n is a, c, g, or t
  misc_feature (648)..(648): n is a, c, g, or t
  misc_feature (657)..(657): n is a, c, g, or t
ttgcctcagtcccacttctgtgtggcccactcttacaaccaacactgctttgagagttactcgaatagtgatgctgactgcccacttgccctccctganaaccggaaggtcatggatatgatccgggcccaggaacagaaacgagatctccatgatcnattccagcatcagctcaagtgctccaatgacagcttttctgtgattgctgactactttggcagaggtgttttcaacaaattgactctgctgaccgaccctcccacagccagactgacctccagcctggaggctgggctgcaacgcgacctactcatgcactccaggaggggcacttaagcagcctggaggaagatgtgggcaacagtggaggaccaagagaacagacacaatgggacctggnngggcgttacacanaaggctggctgacatgcccagggctccactctcatctaatgtcacagccctcagaactaaagcggactttctttccctgccttcttatttagtcagcttgccatccctcctcttcactagcagtgtagatcattccagatcagtgggggagggcacctcagcaacctctgagtgtggacaatagctgctttcttctctatccaagagcaccaggctgtgcttgggtccttgctntcagagtcnataaataaaagaatataatgaaaaaa

SEQ ID NO: 643875 - DNA, 338 bp, Homo sapiens
tttgcttttgcaaattgtgctgctataaatatgtgtgtgcaagtatctttttcgtacaatgacttcttgtcctctgggtagatacccagtagtgggattgctggatcaagtggtagttcagcttttagttctttaaggaatctgttttccatagcggctatactagtttacattcccatcagcagtgtagaagtgttccctgttcaccgtatccatgccaacatctactgttttttgattttttgattatggctattcttgcaggaatgaggtggtatcatattgtggttttgagcaaagccattatatgatctaactaaccatattataaaagagtc

SEQ ID NO: 643876 - DNA, 172 bp, Homo sapiens
gatacccggcacgctatccggttcaatgtgtataatgttgtagtcatcgagatgatatacgattgtggtctgaatcagaaaatggcgcattgtgttggagaagatggatggattcaagagatatgtaaaagctggaatcagcaagacttccttgattgaaccggatagcttg

SEQ ID NO: 643877 - DNA, 151 bp, Homo sapiens
tgcttgagaacttcctccagagcgaagggcttaagaacatgcaaagacgaactctgagctgggtctgctaacatcactccaggcttaggatggatctatgtgctgagagacatgcttgttcctctggtattggacacgatgatttactctc

SEQ ID NO: 643878 - DNA, 465 bp, Homo sapiens
agtaaattttattggttagttttaagaggggaaccctttttattgcaatggtgacataaagaaattggcctaccacatttacaaaaagccagtttaaggcgggggcttacaagccaatgtgatgtttggaagtaaagggaaatattaattggcggatgaagcacttggtgaggaaagtttatcctataatgacgtgaagcccgcggaaccctgtggctacaaaaaatgttgagccggacatcccgtccgaaatggtgaagggagacttggagtcctttgaggcttgtaggagggtcaaagagagacccttttaaattgtaataagcagtgcttgaattatttgggtttgggtgttttctattaacactttggggagctcaggggaatgaacctcctcgtgcaagtaatacggatgtgtttaagagtggtaattctacgggaattaggcggggtgatgccttttgg

SEQ ID NO: 643879 - DNA, 267 bp, Homo sapiens
attcatcaagattatggtgcgactggggccgagggcgctcctcgcgggcatgagagttcgcctacgacggcaaggattcacatcgccctgaacgaggactgagctcctggaccgcggcggacaccgcggttcagatcacccagcgcaagtgggaggcggccggtgtggcggagcagttgagagcctacctggagggcctgtgcgtggagtggctccgcagatacctggagaccgggaaggagacgctgcagcgcgcggacccccaaa

SEQ ID NO: 643880 - DNA, 326 bp, Homo sapiens
aaatctggtggtattaaaataaataaaaggggctgggtatggtggatcaccaccctgtatcccggactttggggagaccgaggcaggtggatcatttgagttcagaagttcaagaccagcctggccaacatggtgaaaccctgtctccactaaaaacacaaaaattggctggtggtagtggcacacctctgtaatccccggtactcaggaggctgaggcaggaaaattgcttgagcctgggaggcggaagttgcggtaagccaagatcgtgccactgcactccagcctgggtgacagcgagattccgtctcaaaaaacaaaaaaac

SEQ ID NO: 643881 - DNA, 326 bp, Homo sapiens
agactctagacggatccccttcattaggcgactcactacaccatagagtcatttatgtgctctctaaggttggagaaaggcaataataaacgagtgaatgtgaactgtcaggtcattggattatgtatatctttgctcctctcacctggaaagcaattaggtcttcctttggctatttgaatcatgagattagctctcaaacatgtacttccgtatgccttctatagcccacttagtatgctctctccaccccgtagtttcccatttgccatccatcagtttataacctattttgcctctatgattcatttaggctaatttaatgt

SEQ ID NO: 643882 - DNA, 335 bp, Homo sapiens
  misc_feature (141)..(141): n is a, c, g, or t
gtcaaaagcaatggaaatctgcatggtcctctttctgttcaggaaattgaattaattaccggagaacctacctaccaagaaaactcctgcaaatatacatggtttcctggtgaattctatcaaacattcaaagaagaaatnacattattcttacacaaactctttcagaaaataaaagaggagggggaacgggtgctgtggctcccacgtgtaatcccagcactttgggaggctgaggcaggaggatcacctgaggccaggagttcgagaccagcctggacaatatagtgagaccctgtgtacaaaaaaaattatacttgtagccccagctactt

SEQ ID NO: 643883 - DNA, 488 bp, Homo sapiens
  misc_feature (83)..(83): n is a, c, g, or t
  misc_feature (86)..(86): n is a, c, g, or t
  misc_feature (88)..(88): n is a, c, g, or t
  misc_feature (126)..(127): n is a, c, g, or t
gtgattacatcatgatgtaaaatcagaggttgatctgatgctgagcaatgggtgctcagatggtatagagagagagagaagangtnanggcactaagcattcatccccagctctacctgggacagnnggggagactggaggccaggagaggacaggcaacatgaggagagggctctgcagccagagaggggcctgaggactgtgggaccgagagctagcagacgcactttagtgcttatagctcttcctgctggaggaggaggtggtggtgtacttgatggtggaactgccgcctccaacagagctgaggccacccccaatggctctgccactgctggaactgaagccacctccaacgccatagaccactgcctataggagtagctgcttccaccaacacaggcctaaagccgcgtgccggagcactatgtggctaccaccagtagctcacgggagatcggtggactgtgcagagccagagatgtatc

SEQ ID NO: 643884 - DNA, 174 bp, Homo sapiens
tcccacagctagaggagcatgtcgagcaggaggccagagagaaggcggccaccaatgtcgctgaagcagaaagacaagaagctgagtgaaatcttgctgcagtgtggcggacgagcgcaagatgtgccgagcagtacaaggagcagtgcagagaaaggcaatgccagggtcaag

SEQ ID NO: 643885 - DNA, 496 bp, Homo sapiens
ctatccccaggctgcgctgccgccgcggttggcggctgctggtccaccccgtcctggccgcgctgtgccccagcgtggggctaacgggcgccttgtctgtgtatttctattttgcagcagtaccatcccactgatatcacgggccgtcaacctctcagatccctcggtcagcaccgtggtgtgaggcccccggaggcgccacctgcccagttagcccggcagagacactgatgggtcctgctgctcgggaaggcctgagggaagcccacccgcccagagactgcccacccatggacctcccgtccgtacggccgcccacaccgctgcctggaggacaagcccatgtgaaccaaacgtgcgagaccgcacgcggcctgaaaaacgagggcaaaagccagagaccggacagagcacggaccgaaaggagcgcaccaggaagaagagcacagcgccatggaggacatcagaccagcgaaagagggagagcaaatagccc

SEQ ID NO: 643886 - DNA, 497 bp, Homo sapiens
  misc_feature (83)..(83): n is a, c, g, or t
  misc_feature (86)..(86): n is a, c, g, or t
  misc_feature (88)..(88): n is a, c, g, or t
  misc_feature (126)..(127): n is a, c, g, or t
gtgattacatcatgatgtaaaatcagaggttgatctgatgctgagcaatgggtgctcagatggtatagagagagagagaagangtnanggcactaagcattcatccccagctctacctgggacagnnggggagactggaggccaggagaggacaggcaacatgaggagagggctctgcagccagagaggggcctgaggactgtgggaccgagagctagcagacgcactttagtgcttatagctcttcctgctggaggaggaggtggtggtgtacttgatggtggaactgccgcctccaacagagctgaggccacccccaatggctctgccactgctggaactgaagccacctccaacgccatagaccactgcctataggagtaggatgctgcctcacacccaggcgtgagtcactcggtcatccgagttggaccgtccataggccctgggccgtgtcagtgcactatagaatgtgcctttcggagaagaggggattg

SEQ ID NO: 643887 - DNA, 587 bp, Homo sapiens
atagaggtggctgctcttctggagccgcacggcagtccacgctgccatgtgcccgcgatggctggggggcagcagctccgttgacatgttggatgctgaatgaagaagcctgcctgtcactgttgcccacatgccccaaagcctgctgctgccccgcagggaaggagagtgaggcagtggaagcagtgagacccccctgagtgaggctttgcgcaggccagtcccgcctcgtgacaatgtgtggcttgggcgccacggacgttgcctgacgaccgtttccgtggtgaatgatggccaagccgctgcgtccacttttccgtcccatgacccggttcaccgccagctcacaacagtgctcgcgagtgaaggtacctgacaatagttgatctcaagattacaaccaaatatggacacacatttgttagacataaaataatgtgtgtatagtagaaagaaaagataaagaaattagagaaagatataatgataaaataaaagaaaaaatgatataaaatagccaagggtgaaaaacgaatggaaagaggataaagaagatattatttgagataaagaatgagtggataagc

SEQ ID NO: 643888 - DNA, 827 bp, Homo sapiens
gatttttgaataccttattctgaactgtcttgaatacatgttgggaagaatcggtgtcttaaacagtctccagtgtccacagcggtgactggccgtggtgtgactccagtcgggcgtctcagcaggttctccagtggtccacgcgctgacatgccgtgtgtgacatctcagtcggtgtctcagcgacgtcgtaccacgctgttgccatctgcgttggacgtgcacgggtgtgattgccagtcgggggtcgtcacacagtctgcgcggtgtccacgcgttggactgccgtgtgtgactccagtcggcgtactcaacagtctccggtgtccatgcgattgagtgccgtcgtgtgactccaggtcggcgtgtgcgagcaagtctggcggtgtcgcacgcggttgtactgctcgtgtgatgaatcgcagtgcggagttctcagtcagtcgtcgcgggtggtcccacgcggtggagcctgcgcgtgtgtgacgtccaagtactggcgtcatcatgcgagtcgtccggatgtagcacgcgtggacgtgcagggatgtgacttccagtctggtgtctcaggagacctccggtgttccaggcgttgagtgccgtgtggtgagtccagatgggccgtgctcgaaacaggtgtccggtgtacaacgggtagacgtggccgttgtgtgaggtccagtcggggtctcaaggagcactccgggtgtccacgccgtttggacttgccgtgggtgtgattcccagacaggaggtctggaaacagttctgcggagttgccatcagattgactggcgaagtgggaaacccgtgaggggtttaca

SEQ ID NO: 643889 - DNA, 308 bp, Homo sapiens
  misc_feature (83)..(83): n is a, c, g, or t
  misc_feature (86)..(86): n is a, c, g, or t
  misc_feature (88)..(88): n is a, c, g, or t
  misc_feature (126)..(127): n is a, c, g, or t
gtgattacatcatgatgtaaaatcagaggttgatctgatgctgagcaatgggtgctcagatggtatagagagagagagaagangtnanggcactaagcattcatccccagctctacctgggacagnnggggagactggaggccaggagaggacaggcaacatgaggagagggctctgcagccagagaggggcctgaggactgtgggaccgagagctagcagacgcactttagtgcttatagctcttcctgctctgttggaggcggcagttcccatcaagtacaccaccacctcctcctctgttcacca

SEQ ID NO: 643890 - DNA, 456 bp, Homo sapiens
  misc_feature (1)..(1): n is a, c, g, or t
  misc_feature (262)..(262): n is a, c, g, or t
  misc_feature (278)..(278): n is a, c, g, or t
  misc_feature (439)..(439): n is a, c, g, or t
ncatatgcacagctaaaaaaaccccacataaattggactagagcaaaaaaaaaaaatgctatgcatacagagacattgtcaagagcaagaaaacaccatacagcatggcttctagtatcagaatatataaagaactcttagaccaggtgaggtggctctcacctgtaatcccagcactttggaaggctgagatgggtggatcgcttgagcccaggagtttgaggcctgcctgggcaacatggcgaaaaccatgtctctacangaaacaaacaaacaanaaacaacaacaacaaaaaacaaaggtagccaggcatagtgacccatgcctgtggtcccagctactcaggaggctgaggcagaaggattgtttgagcctgggaggtcaaggctgcagtggggcgtgatgtaccattgcactccagcctgggcaacagagagngactctgtttcttaaaa

SEQ ID NO: 643891 - DNA, 209 bp, Homo sapiens
agtcaggaacgtttagctgactgtgggaggaagactgctgatagatcaacttctgtgtagtgctccagtctgacctcttgtagactttcagtactcactcttcttgcttaggctctctgtgtgttgaaaccatcccgtgttgcatgtgttgttaaatttttctgtgatacttgcaatttatgtttgagaagaagtgaaaagtttgcttt

SEQ ID NO: 643892 - DNA, 350 bp, Homo sapiens
  misc_feature (2)..(2): n is a, c, g, or t
  misc_feature (15)..(15): n is a, c, g, or t
  misc_feature (68)..(68): n is a, c, g, or t
  misc_feature (92)..(92): n is a, c, g, or t
  misc_feature (97)..(97): n is a, c, g, or t
  misc_feature (162)..(162): n is a, c, g, or t
  misc_feature (179)..(179): n is a, c, g, or t
  misc_feature (249)..(249): n is a, c, g, or t
tnctgctccgtattnaatttactgatccagcaagaccaaatcattgtatcagattatttttaagtttncccgtagttttgataaaagatttncctanccttggtctgtcagagacctaataagtgctactttccattaaggcagactagggtcatgcttttnccctttaaaaaaattgnaaagtctagttcctactttttctttgatttcgacgtttacttagccatctcaagcaactttcgacgtttnctagccatctcaagcaagtttaatcaatgtcatctcacgctgatcattggtcctactcaacaaaaggaagggtggtcagaagtacattaaagatttctgct
